United States Patent Application Publication US 2013/0096032 A1 - sequence listing, part 4

SEQ ID NO: 92 - DNA, 87768 bp, Arabidopsis thaliana
tataatttctgataagaccaggttagatctgcttcaaaaagattgtattcttagtatataatgaaaagttgaacttattgtcacctctattcaaaagatcgagtaggattatcacaactacacagtggtggtgtaaacttattgaaccaatttatctttattagtcagaacatggcaatagaaagctaaaaccagaattctctcggataagaggtggtggttctacatctccgatctctatccgctccatcgatttcgacaaatcatcaaccgagaaaggaatactgccaacaacaacaaaaaaatacaaaatccatcattcatgtacatagttgataaaaggaaattaaaatatggggtcgaatacatgagtgagtactaacctcgaatcgtcatccagtagaaaagagttgctaacagcattgtttgaatcttctgtcattagtactctcatatttgctatcacctatcgtataaaatacaccaaagattggcatctttcctgtattatcatcatataactcaaaacagatttttcaaacttacgtctggtgatacgctatgagttccatacttgtcgtcccaatacatcgtacttattcggtatagttgttgtatgctgagcacctgcaatttcaacttcatatttcatcaaactgtccacatttacttactttctaaagatcaaacaattcattcacttaccggacacagctcatgacttatctcgtccaaggtttttttaggtttttggtgtatgacctgcatattattacaacattaaattactgcattttgataaaccctgacagagactgactcttgaggtttacaagcaaatcatgaaaatgtaccagaaacccgatggcctgtctgatatgcttcagctcatcccaagaagaacccgcatattcatctgttgcattgtaacaccagtgctccagttcagctaatcctgcttttacgtattccccattgctaaatgaacagcactcccgtcttaacagaagactgtaaggatgatatgagaacgcattattaattgatacaacaaggcaacttttgagaatgagactggtaatcaacagacctattaaacagttgaacattgatgaatgagaagatctgcgtaaacaccttccggaccaagaatggaggaacctaagaaaaagagtcaatgaaatgatttgaagtcttggaatctctcaaacaccgttttttataacatgactagattaggaactcacgtggttcgatttcagattgttgaggaagttcgtgaggctctttacaattccttgccagtgggcgatcaatgcttgctgtgctgcggtgttgccaacagaacgagatgcccctttcactaaactcgctcttgaggttcttggtgcctattttatatgaccaacaaaagaagatttaaatccagtgaagaaatgcgcaattgcttgaacatgtaactgatgtattgccatatatacctgaatgcacaatccaaggagtggagaaatctctttcttcaaattatcacgaatcattccgtatattttctcaacataggctgttagctgttgcttgaagaggagagctgggtatttcgcctcaacttgccttaaggtatcaactccaccatttatcatggcaagattcacaccttggggtgtgccgcgaaagctctagagaaagattgacattgacaagttaaaacttgtgatgcatctgatatgatgaagtttatatattagttggccacacacacacctgagtcatcctcccaaagagagtggcagaagatgagcgacggcgctgtggagccattcctgctgctccactagctttaagcgtgcgttggaggagtaaaagcaatgtcgaggcattggataaccaatatgctagtatattgttgttgtcttgcgtctgaatgagaaaaaaaatgcaatcactaccagtccgaaatccataactttcattttcgtatctcaaaatagtatagtagcacaaacaaacctcaatagcttgtcctattgtctgaatgatcctatcaaagacactagttctttcaacttcaaatgaccgccattgcaataagcatttgtatatgatacatgctgtaacaggtcgtttcccttggaaacccaaatgttgaacgatgcagcgaataagcagctcttggttttcttgctgcttctcgtttagtgatttctgtggcttatcgtccacttcagagagatcccttcggttaattgaatggctatgcaaatcctgattcaaattaaatgaaacccaaatagaagaatagcacgattaagagaactccacaaaacatgcaagacaatatttgttagacatatcgaggtacttaccaaacttggccttgcatcaactgatagatgaccactttctgaacctctctgttttgtttttatgcacatatggaagtcattaacttcagatagaaaaacaaaacaaatggaggccaacagttttcttggtatattatccgtacctgtaaaatcgacctggaccggccagagagaaacttatttggtgcaatggacacagcttgttgtcgtaacaccttattctctgattctaaattgttgcatttttcttccagcctgaccatcatgattacaaatttcagcgcaacagtgtcacgaatttccattaatacatgtgaccaagatctataccattatttacttcctactattaagaaattaatgatttgatattgacttaccttgtcacggactcttggagctgctgagcttttttctctgtgtcttccaactttttctttctgtcctcgctagactcttgagcttcatcaaatttccttgttgcatcatcggccctttgtttctcttgttcaagattagcctgttgttacacaaatgattactaatgctccatacattattctgcaacaatacactaagagtcgaattcaggcattttaataaccaacaaaaaacctagcgaaaggataaaccaatctgatcgccaatgaatacgagatttaagtttggacaaggagggagtacctttagaccctccacttcttctgtcaatgcttcaatcttctgggtatcttcaactaaaacttgcgtttctgttacaacaggaggcgcttcttcaatggccttcttagcagcttcacgttccttaacaagaagcccatttgtttcatccactttcttccgcatttcctctaatgaactctgcagtttttttatctcctgattcttttcttcttccaggtcaacctgacaaggtttattatatgtttgcttcaatatcatcctaccgaaaacaaatatatttatcaatcaaaatcatttttctgtatcaaatacccttgagcgtttctccaactgtgcacggtatgtgagttcttcgactttcttttcgagcatatcctttgcctctttcagtgcgcctgtttcccttgaagcctgaagataacaaaaagtgttgatgagtatgcttaggataatagtttaccagaagatcacatacatggcaaccagcttatcaataggcaaaacatgaaagaaaaataaagaactctctatttcatcttcaaaagtccctaaaagtggcaattacacagtgaacgtacaaagtgcacccacgtaccattttgagctgtcgaagttctctccttgcaagtttgcctctccatcgtgtctgagacaggatcactcctttcttaagcttcttgaagtacaaagttgctctgtgacaacggaactgagcctgcaatttataatatgttaatgcgttagtaagaaaactcccaaaattagataagctgaccaatgtatattcccacagatatataaacctgaatagttgtagcagcctttgtttgcttcctgaatctaaactgtttatgagcagccattgctcttaaacctgtttgtacaacaagcgccgctacatggaggtttttgtatgattttctagaatgtaatctccgagcattcttctgaatcttcacagcagcagcttgtcgtctcaagttatcgaaaattttggaagaaagtcttcctataattttcgcaaagaatagaaacttattaatcatcttatatctagaaatcattcaatcaaactatgagaaaaacatttttgcttctaaattctaaccaagagaaagtacacaagagagggattaagagactataagatgaatcagatggttcacctctgcataaggcttggagagatatggtggcttttcttagtaaaatgaaccgtctttgggcctgatgagtccgtattcgtctctgaatttttttggcagcagcactgagaaccatagttcttctcgcgtcgagttcagccatctgacccgcccttaaaaacacctttgttttaccaacctgcattacccaacgatcattgaaccatattccatggcatcattagtattagataatggttgaacgaagaaaaagacacttaaaatcaaaacctggtatcctttgagtccaatattgtctaagatcttttgcgctgcagccttctcctcgtagctgttcaggaacaagcagtatacacactgtttagttccaagatatttgttataattggatcaacagaacgaaaggattcacttacttcccttctagagctcgaggatatagaagtccaaaacggttaatgaactcaaagaaaggtttacgagtgggataccccgcacaactgattctgatcgcttccaaaacaccctacacaaatacaaaccaacaatgtctgtttgataaatgaaaatttgtaatactcaataagtctagaacaacaccacagttggaatcatttttcatctattacttacaccacaccgaagttgctgcataatgtttacattctcaaatacggcaggcttcaaaaggttattgggcttcacacatctgatgtagtgaggctcggtagagtttaatgtttccatcagttgctggagttgcaactgcatcaatcgagaaagcacacttaatacccgacattggaatactttcagagaattaagcctatctaccttaaagcgagagccaatggaagaaaactttgaagatttagatgtttcttccgggagcggaggaaagagacccacaacaaaaggacacttggaagcacccaacaaatcttgatgttcagggataacataatccttgtttttgtctagaaatagatcagactgatactggacctgaaatgatattccacaaaacaaaagtactaataagaaacctataagacagttgattgtgttgtacaatgttaagtttcctttgaaggaaaaaagaccctacttctccagcataatgggcaacagcaaaatctgttcgagagagttttggcttgatgaacctcttgtgtgtcttaaaagtttgataaagcttgttcgcaaatgtttcatgggtcgacttcggaaacatgctgaagaaccaagaaacattgttcaaaataagataaaatgaacataactcaagttacatacacaactcaagttgattgatgttaatattaccaagcttcatcaaggagagccacaattccaccaggcttctgcagatggaaatttttctttttgagtgagaaagatgaaatatttagattgcattgtcatttcggagtcccaatttaaagaccagacaaaaatgtgatattgatcagaaataaccttttcgataagatcgagaacatcttggttatccacaaattcaatgtagctccaatctattgcttcttttgtgtattcctcctgttccatcttgaaaacgtgctgaaaacagcaatagaaacttgtaaaccccaaaagcctaatctgtgaaactcaggggaaatggtttacactacaatcaagaaattacctgattgaaatgttgctgcaacttctcatttgtgaaattaatacagaactgttcaaaactgcaggagatcgctattagcagtggaaacacaaaaatctaacggaagtttagttctgaaccttggcgcagtagacattccttacctatttgttttaaagctctcaaatccgtatatatccaggactccaatgagtgatctagaagtcgcatcttggccaattgagacgttgatcttttctaccaacctgcaaataactagagatgttaacttagaatcaaatctgtcaatcaccaatacttgtgtagtgttactagtgacaaaatacctattaaaccagccacttaccaatcaaataaccgagaatagatagtcttagctagaccatctctgctgattaaagcactctgaggatctagacttctcttgataacttcctcaggtgtgaccataacacgtttacacagtgcatcttcaagcgcctttacatcgcacctaaaatgagaggtctagttagtgcatgtattgagaacaacaaccaagtcttctcgggacaaaaatatttacttacatgagaagttctgccactgtgttaagatgaaatttcgacttgtcatctttgggaactgatgaatccacttcttttcccttggtaaattcgacgttgccaaggtggagaattgcagcaaccactctgaaaattgcttcctgttgatttatatagagggtgacggatcaaaataaataccaaaatgcatcagaagatcactttcatacacaagcttacctgttccttttcgctcatcccgacaatatccattgctcttcttgtcgcaatgtaatcatgagcatcacttataccaacaagttcgaagcatttcgactggttcagataatgaaacgtcttgggatgacccaacttgtacttttcgagctcctgctagttctataatgttatgccaagagttttcaatgacaatcagaattaacaaagacttcctggtgagtatacctcctgtggtgcagcacatagaagataaaaacagtggtaattgcgctctggatcagaaatctgacagacacgagacctctctagtagatacgtccttactgcagctccagatattcttccttgcttatcaaattggatttcaacaaatttaccaaatcgactgtgagaaaacaaattaactatcagctcaaattctaacaaaattttgtaagaccacacaatgaattatgcataggttttttcacctggaattgttattcctgacagttttggcgttaccaaaggcctcaaggacaggatttgactgcaagcagaagttacaggcgtattatcacggtgtgtgaaagattatgtaatcaagattgcagaaacgtaaaaggagaatctaaaagacaatccagattgattagaacatcatacttcaagaacttgttgttcaactgtccggccttctgtaacagcacgacctccaagatatgcaaggtatctcataagcatcttcgtggtctcagttttacctgctccactctcaccacttacaagaatagaattgcttttgccctcattgatcattgccctgaacgtaaatatcgcatctcagcttacaacacaaaccacaagtatataataaggttaaaagctgacaaataagagcacctgtacgcaacatcagcaactgcaaaaacatgaggacttaattctccaaatggtgctcccttgtactgttgcatcatatgggcatcataaatatgcggcagtcgttgaaatggattaatagcgataaggatatttccagtgtacgtctgtcaagacaatgcaagaaactgtcaagaaaggcagagtcttaagatccaaaaagtaaagaaaaaatttaggtactaacataaatttcattaagttcatatctgatctttaagttctgaagaacaccaggctcatgcaaataagatagctttgtcatgtcatcaactccacctgcaggtgcttccatatcttttgggtatatctttgacaactttgcagtgatctacacagaaacaaaaaattagcaaatcagcttcagtgtattccaggcttcaattatatggaaactcaaatatgtttttaactcgccttttttccgtttgtggcttgaacctcaacatcttgtccattgatcttttcaaccagaccatcaatccaagccacatcagaatcttcaatccaaacatgagagcctacaatgatgttaaccggagttccctgcaattttatgaacaaagaactagcgttttgataggcgatctacgacatttagtaattagatactcaatgtgaataccgagtaatatactaatctaagaacagagtcactgaatttctcatctcattgttcttccactcttagatttcaagcctacatgctactaatcgagaaattgaaaaatctccggttcgaatctcaatgttgcataaacaatattttaaataaatgaatgaatgacataccatttggaagcttcaaatgcaatgctcagctgaatgaaaccctatccatgggtagatttcacagaaactgacttgttacacaaggaagctataagattatgtaaattcctaaataaacacatcgagaaaccccaaaatcacaattcaacaccactcaaattacccaaaaacgaaacgaaacaactgcataagtccacagagcctcgagaattagggtaaagcagaacaaaattaaacgaaatcgagtcaccaaaaaactgagattcgatcgaaagaggtgtagaaaacggaaaaaacgggaagagagaatagtgaatgaaaaattcagagagtggcataatgttcttcttcttcgccgagttcggtgtttcttccctacgaattcgcgccaattcgtggccctaaatcgagtctcttctttcgcacacatcaccacactctctctcatccttctctttctcagcttttttaattttggtaacaaatcacactctcaattttttcaaagctaaaattgattttagactttggttagctcacgaattaaattttttctaattatttactttgaaattatcacgtaatatgaaatacattcgagcaagaatcaagcaaatgtaaatttatgaagttctttcactcgagtaaataatgttttcatctatataagaaatggaatatacataaaaaattctatacgagacattatgacacaacaatttttttgttttcttttgtgtatgtaacaagactaaacttacccttttttttttgttcgaatcatggctcgaaagatggaacatgagttgcggtagtgtgcgtcaaactgtagtttaatctgtctaagacacttctgtatggatcttcctctcgtttcttcaacaggtaggctatactattctctacctccgcctttacctccaagtaaacttgatttgcttcttctttgtcttttacaagctctggtcttccctttgtctctatcggtttcccaaacaggtaatagaacctacccgggactttcggtatgagtcctggtaggtagagtggctggtttgccacctctccctctgactcttccctatcatcacaaacaatagtactcatcaatctttgactagtaacaactacactcattagcatctatttcagttatatgaaaaacaatgttacctcaatttaaattgtttggtatcgcgagtaacttccgtgatatagtcattaagaatagggatcttcatcaggtcgttgtaatcaagaaccaactgcaatagcaaaagaaaaatatatttataaatgactattttcaataactgagcacacgaaattcaaattttttgggaagtttttctgtgacaggaagcttacttcagctatgtcgtcttcaccaactgttccaaacggcactattgttgcaccaaaccgtgctgccattcttacaaactcttgctgttcaggccaaattagtttgtattgttcaccctgcaatgtcatagaaagtagtatatgtatcatcagaaattctaacaacaccaccaggttaataaattaagtacacacttctattaggacaaagaaacagaagatctcagataaccaaatcattttagtattatttgagcttaaacaggttcaactgcatagtcaagactttgatttcaccgtcaagtgggtggaaccactctccttttggctactaatttttcttaaaccaaactagaaaaaaaaagaattgaaagatggctaacccggttatggagagcctctcgtgcaccaccagggaagagaaggacatgagatttagaatctaacagcttaaatagattggttgcggtgacaggataggcaccaaatactttaatccagtcaccataatcaaacgccttagctggatcattatcagaatacagaaccggatgggccattccacgaaagagaatgttcttctcttttataaacgcctcggacattggaccaagttcaagacccatcaacatgtggtaaccaacaagtagcaccggacctttatctggaacaccagcaagtcccttcactattttcccgtcttccatagttgaaaaaaacacagaaccaacagcatttcgcaagaatctgcatatcacaaggaataaaatcagaccagataaatcacatgaagctaagtacatttggttctcttttgctcatttgaggagatcaaggaacgagacacattaacttgtagtgtcaactgttttggagaaagtttttgaatatttagtagatggaacttttttctaagagaaatagagtcaaggaaggcttagcaaagttacccaagcacttcatcaagggcgtaagcaagttctcccttacttggaggcaagaaatcagaaaccaaatcatatctccaggaccgccggtacttgcctgtaccttttataactgtgagcaaactgatgctatcttcctgggacaataaatggtagtatgtcaatgaataaatagtcatactactctgtgtttttctcttcttgtaagaaattactctaatactacttaatagcttcacctaccatccggaacaaaaggaaactcaagagtaatttagtatgtaaattactatgttaaattaccaataaaagggtatgcccattgtccttgaagcatcgaactgaacagtttttaagtaacccgtgaagccgctttgcttcttcttggctaggaagcatcatgtcctttccactgaaagtcgatgaaatccgaagtcatttctattttcttgataatatgtcgctcattgtaagccaggttgtggtatttctttcatagaccacaaataaagaagagagaagaaatgttataccataagaaagaagattacctagcaaggaccaagacttcagcttgaacagcatggatgcgggaattggcataagcacagccagatctcagtaacttaagcttccaaagtaaggtttcccgtggaataattccaccgagctcctgaaaatgaatggttagaaaagatgttatcttttatagaaacagaacaaagtaaatgcatttaaagaacactcacagagagaagcgggagcattgttttagtaagcctttgtctcaacttttcaatttttactcctgttggaagttggttgtcgataccaagtgtcgccatctttatcggatcacctataaatccaagaaagcttaagtaaagacaatttaagaagacaaaaggggacttaattaacttatacaataaacatcagttcatgtacccataataaagcttagagcatatggaacagtaaaatgaagctcctctggcaccatctctaatataggcagcaacggctgtagcggtgacctatcaaatgatgtagctaaaaaaggagaaaacgtgtttggtcattcataaaagcttatatgcaagtatgcgtttagatacaaagctacaaaattaaataaatgtttgctgacctgggttgactagtatcaacaccaagtctaacgaacggtttctagcagcaacagcaagagccaggcatcctccaaaggaatcgcccacgagatatatcggcttattaggacgtgtagcctgctcctgcctcaaaacatcttcgactactttcagaagccctttatggtaaaaccaacagaagagaacattcagagaaaatcaagtaaacaactaatgaccttatacagaatcactagttagatatttctatccatttggaagtcaatattcatttgtaaaaatcttctatttgatgtcaaagacaatgaactgagtgcaagtaatctaagtattgttgtatgtacatatatacttgtagaaatgtatttatacacagcacatgcatctaaaagagaaaacacaagccagcgaagaactattctatgatcttaaagggacagctactgtataaaatcttcataaccaaatgtatatatcgctatctttttattaccttcaaatggagttcgatcaagtacaggaatatgcaggcacgagacatgaaaagccctgtattgaggaaatacaagaacaacagtttagactgcaaacacttgtgtgattaaaaacgagattcaacataatatgaagtgtcagtttgtttggattagttttcttgcttctgcattaagtattcaagtttatatatttacatttccacattcttagaccaatgtcatttccagagaaactagacttaacaaaaatagtgaacatacttgccaagagctttgtgatgtggaacaaggcccatccctgtgccatccatccctgcataaaatattaatccatcaggcattacgaaagtccaaaaattggaactttgaagcgataatcagagagtcagatacttgacactgaaaaacagtaaaaaaaaccattactagaattcaaaatacagcctaaacaataaagcattatcctaaaagcttggaactttgaaacgaagatttagaatcagatacatgagataagaaaacagtaattcaacaaaacagcctacagattcaacctttcctccatgaaacacacaaagaagtgagaaaatgaatacaaagtttcaaactttggaagaatagtaaatttttagctcatgaagcacacacaaacctcacataggtcaagcaatttcaacaatcaaagctcaaaaaccattgattcttataaatcactgattttgttttaccaggtaagaagagtaacgtaggagcatcttcaacaggtcgaccacaatcaacgggactaaaccaccgtggaggaccaccatcagccttcaaaatctctttagccgcagcaaagtaatctttaacagatttggagccatacccatcatcccataacaactcaatttcatcactcactatctttctcttggatttccctttcccattcacttcatttgcccctttttggttttgaacagtagtagacaaagagaccgaaccgttgttgttcactggttccaatgatgtcgccttcttgttttcaccagagatttgagctcttaccttgaaattgcgtctttggttagaactcaatctcaaatttggtaacaccaataagcttgaagaacatgttgccattgtcttttgattcaggcagtccacaggcaacgggaggagagatttcttagaaacgattaccaaaaaataaaaaataattttaaaaagattgaaactttaaaaatatcttacaaaagtttttgaacagacaaagcaattttttttaaaaaagaaagattattaatatttcttctttctttcggtttcgttttagaaatgtatttcatagaaagtgctaaaaataataaaataaatctttagtagaaaagaatttttaaatttccatcggacttcaatttcaaacctccatattaaggaagtggggtttacaagaggtagacaatcagacacctaaactacttgaaacggaaaaataaagaactttgtattctttcttgtgtggtgcacagaaaaaaaaaagtattatgatgtctttatagcaagaaatctgtactgcaatacaaaatgggaaaagacaaagcatttgtaataggtaagttttaaaattgtaatatatggaatagagaatgtttttagtcaattgctaaatgggtattttatacatgttaaatccaatatgtatccataattatgatctacaaattaagaagaagaaaaaaatattcacttaactaataatataattaataagaattttttaatatttaatatctatctcctctaaaataaaagtaagaaataagatactaaaataactaaaaaataatttctgaagtgactcagattcacattctataaagaattttttacttttttcttttatttttgaaggtacactagaacaaattgtatgaagaaatatatttcaaactacgttcagagatgtctaatttcacatataaaattgaactatttttcttttggtttttatttgttcttggagtcgttatcaagattacgcagttaattcactagtcgctaaagaaacagaagcttttcactattgtttatctattattccgtctctctttatgattaatatctttttgtttttctcataagattaattctttgtatcgctaactataatgataaacaaacaaaagttaggtttggtgtaatgtgtttgtagtgggttaggtcacacgaaagacgtgttcaaataggttccgcaaggtttttaacggtaaagaaggaagagaagcaaagcaagaagcatagattcttggatgtattcatattccttgctttaagtccttccgtctcaattttaacaactatggtcacatgtccatactgatctcgtaccatgcacttgtcttcacatgcttcttcattttctatttttgggtattcgacaaataaatcgtgcatggaaatgaatgtggtatcgtccaatgcagtttacgagataatatatatatttttatttttgttaaaaagtaataataatacacaattaataatatattattaccaaaaattataaacaaatattaattgcatgggatgaatttctggttgttgatttgttggttcagactaggtttgtattcactagagaacttcaaatatgctgaaattcgaccactcaaaagcaagtgagactctaattgtcaagggaaatagaagacgctttaagatcggatcgttgaggattagcttgcatgaagtctgaagatatcttcaagaagggactttgggttgggtccgccatggtagtgtttttgtgacttacaccgaaaatctttaattatatggaggaatagtaaatcttgctaagtaatcccattaacttattaattgaatatatttttatgttaataatatttgtcctaaacgaaaagtatatctatttctctaatcatcaaataaaacaatgagtataagatacttacatatttaatttgtttttcttgatcttaaattagaattattaattgattcttttagtttcaaatatcatgcaaatatagatggcaaaagattcgagcatataaatatggtacttcaaattgtgaaagtacgatttgattttctcttttctttgttgtacgtatgatattaaaagtagaggaatatgattcttgagtgtagaatcttgccttctaccatggttcaagtgtaagcaatataaaaaagggagatgtgtgtttatttcttcccaactttgatactcacaagacatctttttaattcactcccttgcaaaatggtggatcatcatctcaaagctgatcgtgtagttgctcgggtagagaagtcggtcaatttggttataggtcataggcaaacacaaaggcaggccggctcaagggagtatgaaggtgaatcaaagcagaagtacacaactaagaagatcccaaaatggaagcataatgattcagagagaaagataggtcaaaagcaaaacaatgaaacaccaactatgattgtcgctggtggatgggtcaggccaaatcgagccatgtgggcttcacctccaaattcctcgagctccaagccacaaaagaataattaattattgagagaagctggtggtaacatatataagaactcaaattaaatgttcaagttgggaagtagacaactgttgagcgagaacaaggccagtcgtttcaaaacatccattaaaaactcagccatggagggtgtggtggcatatatatgtgtgtagactctagatgggtgaattttataagtttattacatgtaatattacatcatggaagttgatatgtctatatatatatactgtatattgcgtgcctttgtaatatatagaattcaataaaacctatcttttttatttatttatttcttttttggtcagacatttttttaaaattcgtttttcaactattaaaatgatttaaatagatacatatatacttaattggcaatccataaaatagttgaattgttggaattataatctgaaatcgtacccgaaaattcaggtacgaggcatattaaattaaatatcctaataataagagttttgggcaacatgtttatcaagaaaattgaagttgtatgaagtgtatgaactcaacattttcgagaattttagtcgccatttgccatatataattcaacttgtaacggatcgtaattaccacacttaccattctctgcattagctggtagttcagatcgaatatgttgttatataattttatttttttaaagtgtatttgttactacttactagtatatgtatatcattggtgtcaaaaccatatagttccacaatatagagattttgtcttcatgtcatcagttgaaagttgaaccacacttactttttctggtgcaaaagtaagataagaaaaacatttcacattggcaccaagagatgctatattgctttttattcacaaatgtaaattgtttttcaggtcaagagcgaaaattcctagacatatacctttttttaaaaaaaagtctatcacataagttattaattaaaaatatatttaattcactaaagagaaattttgtcacaaaataaaaagcagtctaccataagctaaagccactaagtttacacctcatagacaaacttagaacctgaaaaaagaaaaaactcttctcagttggtttttctcttttcaagagtcgaagtctcaaactcttctcagttgctagccttgttagccttcaaagaaagctgctagtggtgtaaggtctttgttacactggtgatgaagaattccggtgagacacctttatatagtcgtggctgggtttaatgaatagactttcactcaaaattttgagattttcggaaatttttgactagagaggttacaaatgatccagtttaaataagcaaaacaaatgtagtaaaccactattgaaaaagtgttatttcggtttatttaattagttagattgtaatattgcaaattttaaaattatctaaatgttcgttattttttcaataacatacaatgcgtgagttcaaatgttgatgttattgcaataacaacactaacaaaaaccgctaagattatgacccatgcacattaatacatttatgttgagaatagtctgattattaatatttacatgttattcaacatacaatgaaaataaaatggtaaaaatgtatttacacatagtaaattgatgcgtacaaaatgaatgtaaattgattacagacataacagaaatgacaacgtaaactttataataacacaataaaatagtaatcaaaattatacaattgcacgaataaattttctgaaattgttttcgtataaaaaaaatttaaacagtaaaacataattaaatgtaaaaaatctttgtgatttttttttttgtaaaaagacgtagtagaatttacaaattaaatttaaaaggcataaaatgtataaacagataaaaaaacatataaagatttcttaatattttgcattttgtttcttgtcaataggttttattttccaacctgcatctgccaaagcacccaactccacctgacttgtctgtgtctgttgcgttcactttcattggaatctcagattttttatttttttgtttgttttggttgttgcgagtttgtgactataaaacctctcccacttggttcttcactctcactgtttctcatctcttcgtcttctccgcctccttcaatctcactccgatctctctacgattcattcgttctatggcttccattgctgcttctgcttctatttcccttcaagctcgtcctcgccaactggtctctctcttccctcgaatctctcatcttgttttacttgttttgctgtagatctgatctgattgattgttgttcttcttcttcaattgtagatctaatttgcagaatcgttttctgagttctaggttgatttgtttaggtggctctatgatttagttttctggaactttggctctgtagatctgatgaatctgttttactattctccgttgctaatcaccggaataattgttgatttctcgtcgaattgaatcacatagattttagttgcttctgtttaacttctctcgtagattgtttcgttattttggtttgatgctttgcattacgagtttaactttgtactgatggcaggcgatcgcggctagtcaagttaaaagctttagcaatggaagaagaagcagtctttcttttaatctccgccagcttcctacccgcttgactgtttcctgcgctgtaagactttgttttttgctttctcgagcctgttcaacaatgtgattaggctctttgatacgtttgggtgattggttgatatatatctccatttttttattgttgtgtaaacaggcaaaacctgagacagtggacaaggtgtgtgcagttgtcagaaagcaactctcacttaaagaggctgacgaaattactgctgccaccaaatttgctgcacttggtgctgattcccttgatacggtatagcttaacaaccttctcgatgtctaataattggattcaacttttgaaatgggattgttcattggacttattgatgcttaatcaatgcctcttaaaaattgtatcctgctttcaagctcatattgtcgaatgttttagattgcaagtcttgtaaagggtcgctgtgtctccttatacgcagctctttagtattgttactgatacaggcaaatatataggacatactcaaacacatacttcacaagcaatgcatttatcaaattcaaaatggattcgaacgtgtgcacatactcatgactcggcgttttggatttcaggtggagattgtgatgggactagaggaagagttcgggattgaaatggcggaggagaaagcacagtcaatcgccacagttgagcaagcagctgcgctcattgaggagctcttgtttgaaaaggccaagtagaatatctttattacattagcaaaaacgaaaaaaatcaaaacccaaaccactatcttattgtttcgttagctagagagcaattgtgtctgttgaaagattttatgttattttggggaaattattacaaggcttgtatctgacttttatctttcttctaaaacattttactttcagccttcatcaaactctcttacgaaacttatgtagtctcatttcctaaataaagatgtttttccctttgcttatttctctgaaatgtttcgagaagtaactgtgaaactcgaaacctcggagtgtaattgctccaacgtaaaaaaacttgtgtgtcgtcgtgggatttgtagaaatgaaagggggtgtattgtacacgaggcacgggctaagaaaaaagactagagctttcattttagcgttaacgttaacaatattgtctcttcaaatgaacttgtccccatgtaaagtgaagttggtaattttgttgttgtccttcgaaaactcccctctcctggtgaagcagcaacttgaaaaagtctttagcattgtggtgatggggtgaaatgtaaatttctccatctcttgttctcatctttcacaagagaagttaagaactagtaagcagtaacacttttattaggatgaacagatactggacttaaaaaggattaaaggcatatagaattaagtttacgctttggtgatgttacaaaaaaagatacatcgtttaatcaattatcttagaaagatttgaaacaacaaaaaacactaaaaaaaaaaaaactgtacgtagcactagatttcgttcagagaaggcatgagccagagtctctcctcggagactcgttcgcgatcagcagcaaagaatctctcttcagcgagcaacgaatgtaaattgcttccgttggctaagctattgaactcaatggatttagaaggcaaagctgaataacgtcgttgacaaaatgtcatcaatcttttaactgactgaagatacttgcgagtggtttcgttattcatgatgtgagcaacactactgctagtagaaatcttctctcgggcagaacgttcgtgaataccaaccatagtcacaccgatgggccatggtgcgttccctatggctagtttgatgaattgagccgttgcatcgaggtaatctcgctttatccagcagttaaccatcaccattaaaccttgacgaatgtcagctggtaaacactgcaaaattttgcttatatatattaaccctaataagacacaaaagataaaaattgcttgctttgcacggaactaaaagaaaaaaaaagatttatttagtttaccttgttccggcataagtggaagagaggagttagatacctagcacactggttaaaagtggctagcatctgtttccctatagcagttctcctctcagtgttttccatagcctcaagttcctgcttccattcaagcaacagcttcttgcagaacacaaggatcttgtcctcgtcgcataaatcctcgaaattagcttcttccaaaagcttcaaatcctccttctcagcaccaatgagctcatcatcattactcgtcttcctcttcctatcattcatgagaccactactcctctcccgcttcttgagctcagtgatgtcacgcaagaaatcgtttgtctctccttgagtcatgtcgttatcgacctcctcgaataatccttccttcaacacgtacttgagtcgatccagccgcacctgatcacaagatttcaatgcctttgtgagttatggtgacaagtattcgaatctgatagagtgttttgcttagaccaagtcaagctaactattgataaaagccacggtggtgtaggtgatacgtcttatttcacatcatggattgatatatactctagtaaagcgtagcatcacacatctagatgttaagtgtctgatcttctagattttgagtatcatgagatgcccctaaccttttatatctgcaagacactcgtatacctaaaactggctcgggtgagctttgatgatgtcgagtttgtttctttacctcttctcaagactatgcatttaaaagataatatgtatcccaatgaagccacttttgagagacttgtctcatcctgttccctctcggaagagttaaagattgttgcatgtttgaagcataatgcgaaagtctttcgggtgctctctaggtcattgataaggcgcattataagaatacgcttttctcggcatgattcgggttcaagaattgtgattgatgctcctcagctatgctttttgagcatttgtgattacttgccagaaagctttagattaatcaatatggatttcaatgccaagttagatatttctcttgccttcccatcaatgagaaaaaacatgcgccgttttttttctcggaatttcgaaggtcggagatatgacgatatggtcaaagactataaagctcatccacgaatatgtgagatttgaaccacggcctcgatttggttgtgtgtctcgcctgtgtgttactctctgtgatttgaaattgttgccatcttttctcgagagctgtccgaatctgaagtcccttgtcttgaaatgggaagctagcttaaagcatttggagttgatgaattcattcggattttcatctgcgcccaagtgtttgttatcgtctctcgagtttgttgatttcgaaacgaccatcttgggatattattcttcagagatggagctggtaaggtactttcttgagaattcggcaatcctaaaaaaactctctctacgtttgcgctattatgaaaaacgacaatatgacatatatctacaaactcatcaaaatcccaagacgctatatcacatgtcatgtcgtcgtatcacactgttctgaccagtttatgtgaagactattaagttataataatccactatcacgaaaaataatccactatcacgaacgtagttattcattctatcacgaccatatcactaatctaaaccaaatttctagtgataagaacagaatgatatatttaaagctaatagcaacaaaagaagtagtgtatatatataataaatatatagttacaaatacatgaaagtctacgcaaatttgaaaagaattaaaacattttctcttagaggaagccacaaagaatagagggtaaacacttacattgttatacatgaagtagtaaacactttctcttctcaggccactactgctctctttcctttactgcttttggtgttatctttcttctttcttgaaacgcctgtgattggatgacccagaggacctgaccacgtctggacttgtgttggtggttcgtctttggaaaaattgaaagaagaggatgtgaaggatgggaccatatctcgtgggataaatgtcgggtctatatgctgtgaggcacccaatggtacacccattgctccaccatcttggtgtggtggcggaaacttctcgctcttgctctttgcatttgcgtgtgtgattaatctccttctctgctttttaagagtcaaaagatagaaatgattatgtaaaaaaaggatcagtctttgtgtgtgtgtgtgtgtgtgtgtatgtagatatgctagaagcagaacattagtgaagaatcactgtcctagaagcataagcactggtggtataaaaccaatattcagcttacttcctaacgtagacaatagcctaaatgcaccagtatatacagtaaaacctatctataacaacagtactcacctagaagcaacctgattcgagtcagaggaataaatgtagaaaagaagagacgttatcgaaaagaaaacagttgggaaggacatacatcgacatttgactgaagttctgcattagcttcaggagctggaagagctcgatttgaacgatctctgtgccgattcttccttgcaccatccccttgggctttactagcagctctttgtctgcacaggagaaaactgttagtctatgcatgctgacaaatacagtataaaatagctacaagtaatggtaaacgcaacaataatatcggaatttctaaaattaagcatgctgacaaatctggatggtctatccagccaaagttgaagcctaaattggtatctggtatggtcggaaaagctctccattaagaaaatcgagaggcacaactaaatacgaagtgggacatgtttttttttgtggttcattcctacccggaaatagtatatgaatcatgattaaagtggagtacaccaaaatatacataacatttcaaccatttgcatcttcagcaaaggtcatggtaagattcatatatgctgaacatgaatattcaatcatattggcatgtcattcatgcccgaaagaattagaaatgtatttctctagtttcataagaaacagacgctatcagttgaggttagcgatgattaaaacactacagagaaaatgttacaaacctccgagtttcttcatctcgtcgctttgcatcaatttctttgctcgggggatactttggcagatcagcaggttcacaggcatatggttcacttgtaaagaactggaaaggaaaaattgcagagtaaacagattcaaatctgctcagcatcatcagaacaatttatgtaaattagcagaaaaatcaaacctaagaacttacttcactttttaaagcagcagatgcagtttggcggtcttctggctcgattgaaagaagagcgtcaatgagcggaagagatgatggtggaaaatctttaaatgtctctcttatgcttcttttgtatggttcacggggtttgtatatggctccatgtgtgaatttcccttttttccaataatcctctgatggtgaaccacacagcttgtaaatcttatgtagctgctctacctatttcatgatgaacataagcatgcatacaagcagattttagatactagggaaatagaggacataacttgcatatggagggaaatattaagatgatggattgataagatacctctgtccgaccgggcataataggtcttcccgccaatagctcagctaaaatacagccggcactccaaagatcaatacctacaccataatcagtagccccaagcagaagctctggagctcgataccatagtgtaaccactcgactagtcattggccgcttgtgattaggatcaaaaatcgttgcgagtccaaaatcagcaatctttaggaccccaccatcatcaataagaagatttgatcctttgatgtcacgatgaagtacaccacgactatgacaatgctccaaaccagatatcaactgacgcatcaaacatttaacctgcaacgtaaaagagtaatctgatcttaaaaaacgactgaatattattagcctataaatttagaatgcgagatactaaaacgcctaactaacctctgattctgagaacttaacaacaggacttgaagcaagaccagccaaatcatgatccatgtattgaaatacaaggtataagctacaagacattcttgacgtaaccaaaccttccaacttcacaacattaggatgatcaagtctccgcaacacaagaatctctctcgccataaacttcacactttccggctccaagttatcaaaccgaaccttcttcaacgcaacgattttaccggtcaacatatccttagctttgtacacattactatatgttccttgtccaatctaccacatcaaaaacaagatatctccaaatgagaaacttcaaaaacacccaaaacaaaaacagaaagaacaaagtaagagtcttttcatgaatcaccttatcaattttctcaaaagtatcagcctttctaggaacccaaccatttaaagcttcaccacaagcatcagaaagccaagaaggccaaccagcagcaacctgttcaccacgccaatgcttggaaggattactcaaccgcggattcggctttgtcgaccttcttcgatctcctttggatgatttcctttctttatcaccatttgcctcctcattcttcttcttctctacatcatcagcaataactccattactcttagtcacactactctctcctactactactactccactactagctttagagctcttagcttgtttagcttcagctgttgttgttgtcgccgcctctcggccaaatacacaacccataacttaaatctcaatctaagcttcatttctcaccataacttctaccaacaacctacaagaaaaccatcacaactatataaaatgaagtcgatctaatcgaagaaaacgaaaccctaattaatgatcttgaactccattgaaagaaagaaaaaaagtaggtagaagttgaaatacgaataaaaacctagtttccagaatctgattgaagaacttttggagcttgaaactatctctatggtgagagagaagagaagtaggcgagcgttttttttttttttttggttgggtcttactgatttggttgagacagtcaatttaatttccttctgtttttaattcttttttatttttcttattaatgaagatgacaaagaaagaagaagaagaacgcagatctctcttcagttcagggtcaaactcagataattaattaaatataaataaaatagaaatgatgtagaattgtttttttttttaacaactaaattagtaacagtaaaagtttttatgagttgattttttattttgaattactaagaggttttatgttcaaggtcatatatcttcagctatatacaagtgggactaattggacataaaaatgaagaatgtattaacatctcaatagtcatccataactaaggaattgaaagcttattttcggatgaaaatttaatgttatgtgcgtattctcaatttcattaatcgttcaaaacagataaaataattagtattataccgaaataaaaagtgacttgattgtttacctaatcacaaaatttgcaaaatgacacagacttccatatatataattgggtcttgttgattttttaaaagtttgtaaaatatgttctagagaagtagtagtgatcagcgttatttcaactcttttttcgtacacatgttttgtaggaattgtttgatgcatatgtaacccccttgtcgcgcatgtgtaccttccacatgagtgtattgcagcagcccaaaaggaacatagtacaagacaaaatgcacaaataacattctaagaacttcatgtacaaaaatagaagcgctggtatcaattttctacttggattcttttttgtcctttacattgcttaaattgttatctaattatcatctatgtatacatcttgagagagagaagacataacatgtatgtttgggacaaattaaaaactttaattttttataataacatgtttcatgtaatatcattgtaaagcatcttatatgttctttatatctattctgcaatagattttatatgtaatgtgttcaacaaagcaataaattaaaaagctatagaatagtgacgctatgttaatatattttttaattatagtgacataaaaaactataaataacttcttagaaagagttttttatctactgtgctaatttgttttgtatataatatttcttttattgactattattgttttgaatgatttctttaaagactactaaaaataaactcgggttaacatccactattatcttttggaatgtctttatttttgttgaaatgttatttttgtcaatagtgaaacatattgtaattgttgtttattcaaatgttctaggtatttttttttttaaaaaaaaaagagaaataggcagttgcacttcttaacacttttagaagtatgattggatataaaaatataaaattaaactgtaaagacttttgtagtgaagtaaaaattctcacatcccattaacaatcaccccagtaaattgattcttacattatttttttttatctaagtttgtatatatagacttttcaaatctatgtttaattcacatgttagagttatagaagtcaaaagtctttttacaatgtcttatagcaaaatcttctatagggtgcaaagtttgctaacttagtttaccgaggtttgaccttgtaatttgattgtgagcaaagaaagtgcaaaactaaacttctcatttattaagatatgttaaattcgagtattatgattttcaaattcaaacttagtaacacattttaatgtgtgattgtcctttgtaaaatatgacatcgcacataaataatattatgaaataattctagagtaattttacttttatcaacatttatttaaagaaaatatagaaaatcacaaaaaaatcaatgagggtaggattttaaatatattttttgattaacagataaaataaataaattcgttgtggcattttctaattattaaaaaactcaataaactcattagactagaaacagttgatatgttaaaaaaaggtattcaacagttgtaaagaatgcgatgaatatttaataaatgattaaatgttgtaaaagaagtaacaaacttggagttttagtttatcaaattttgttaggtatctagctccattcaccacaaaagataaggattaaggattgaaaagaagaaaataagtgttaatgaaaaaatatgtaagaatcatttaaaatgaaatttttttgacacacttttcatctcataaaaccacaaagccggccctaaaacataaagttgtatgagaattatctttatcttgtaaatagtgaagcaatttttaattctttagacggtaaaattcaaaatatacaaaataagtgacaaaagacatctttttgtaggtatatatatgcctttagtcaagtgattaagttcatttgactccgcatttctcgtcggagtttgactctattacatcgcgtaattccgcgtactaggaattgattatggatctggccttgtcgatccaaatatgtaaaaaaaaaaagacatacttttcatagtgtttgtcgtaaaactaattaagtcaaactttttggagtaccgcaccaatcatgtgtcttacacactgggagaagacatgagaaccaataagtagtgtcggtcgcagcgttactataaatcatattttatggcgcttaaaaaaatattttacagtatatatcaaaataaatttgctaactaccccaaaaataaatttggctagaagctagtatcccaaatatttttttgacagttaatataaaaaaattagaaattctaattaaatcataggagtgaatgatgtgcgttttatgtttcacttaaaaaagtgatgaacaatatcaacattaaaattatctcaatacttatatgaaactttttgtatttttttaatgtttcttagataataatttataaactgtaggtattttagattgacttatttgatctatatacttttgtaatatatagcaaaaatatttgcttttatcaaaaaagaaaaggaaaaaatgcaaatgatatgaactggatattctatgagtagttaatccatggatataatcttttaatttaaaccgtaattatcatgttgattatgagaactaaacaaaacattctcaacacatgcacacacatatatatttttagtaaatactaaatatcattttgattaacagatctaagcttgtctttcataacttttttcaattaaaataaaactcatgcaacctccggttccttttcaggcgctaatctaaccatgtcgattcatattaaaactgtaaggaatattgatcacgtcgaaaagaacatcgttttctttcttcatcggagatatttgtttattgtcgccgttgaatcccatttcgcaaatgcttggtgcttcttttgctttctgcaaatgaaccgaaactttaaacagatctctcactttaatgtacttcaaagctgaggttaacgcgtcatagccttcagaataaagcttaaggcacttttgcaacaacttcttactcagcctgcccttatattttctctcgttgaaaatcttctccacaattcttttcacgtttgttaggtttgataaagcgttattcgttcctaccaatgttaaatcattgctattccttgctttctgactttccgcattctcttcgagagatgcaatgcaaaacttatagaaatatcgttccgcgtactttgaactttgattgcaatatttctgaaccagagagttttccactctgttggccgtcaaaccattgaaaagaagaacaaacacaacgaggtaaatcaagaacttcattgtttctttttttctttggaagcaaaacattagaggtaatagattgaatagttatagtaacatgtgatcctatttataagcaacacagaagtcttctaacatgagagtgttattcaaacaaatgctttttttagatgactcatgtcatgcattaccactccgcttacttcgttgccttcttttgtggtcaatcttcattgcctaaaaagaatcattactctagacatttcgatgatatctctaatttcgtttgattcatagcaaaaatattttttttaaacttgcatagcaaaagaagtgaggtaagaaaaaaaatgtttatgccccttcccctgaattttggaatcttcggacaacaaaacttctagattataaagaaacaaaaaaatgtcaagcactcaaatctttcattagatcatcaaccatattatattatttaaaacttatgtttgaataccagaaagtactaatattttaaaggtgaaagtaaaatgtttcagacgaaagtaaatattaaaatacaagccttgtaataattatccgaaaatagcataaaatctcaacggacacaattgctctctagctaaccaaacaataagaagatagtggtttgggttttggtttttttcgtttttgctaatgtagtaaaggattttctacttggccttttccaacaagagctcctcaatgagtgcagctgcttgctcaactgtggcgatagactgtgctttctcctccgccatttcaatcccaaactcttcctctaatcccataactatctccacctggaaccccgacacacgaagcatgagtacgtccataacaatataacaagaatcatgagtatgtgtatctcagtaacatgtttagagatgtgtgtataaggagaagcagcgatccttcacaagacttgcaatctaaacattcgacaatatgagcttgaaagcaggatacaagtttaaagaggcattgattatgcatcaataagtccaatgaacaatcccatttcaaaagttgaatccaattattagacatgagaaagtagttaccgtatcaagggaatcagcaccaagtgcagcaaatttggtggcagcggtaatttcgtcagcctctttgagtgagagttgctttctgacaactgcacacaccttgtccactgtctcaggttttgcctgtttatcaacaatcaacaatggtgaatgatgaattggctcgagagatcaaaagtaaaatagaaacaacatcatatgagagaagagacaaggtcttacagcgcagtaaacagtcaagcgggtaggaagctggcgaagattaaaagaaagattgcttctgcttccatagctaaagcttttaacttgtttagccccaatcacctgccatcatattcgaatataactttccatcagtacaaaactaaactccaaatgcaaagcaatatatttgcactgaaacaaaccaaaagaaggaaacaaaagcaactaaaatctatgtaacccgcatgctcttaccaagagttcgaatctattcaaattcagatataaaacaaatccaattcgaagaggaataggataatttttccggtgattcgaccgagttaagtaaaataggttcaacagagcctaaaattccagaaaacgaaaactaacttacctcaatgcaaaaaaattacaggacaaaaaatgaattacagagcaatttcaacagatcaatatagagatgagaaaacgattctgcgaattagatctacagttgaagaagaagaagaacaactaggtcgagatgaatcagatcagatctatagcaaaatgggagaaatcacgacaaaaattcagtaagaaaaagatgagagattcgagggaagaagagaaaagagagaccagttgacgaggacgagcttggagagaagtagaagcagaagtagcaatggaagccatagaagaatgaatcgtagagagatcggagtgagatcggaggaggcggagaagacaaagagatgtgagacacagtgaagaatccaagtgggagacttatttttaattttatagtattttaacctaaacaaaaaaaaaaaaaaaacttttctgagattccaatgagagaattcagacagacaagtcaggtgaggtgggtgatttggcagatgcaggtagagaaataacaaattcggaaaaaaaatccaaacatattgttttttttcttaaagcgaaataaaacaattagtcaattacgatagtttactggaattataataaacaaccttcttaactttttttttatgaaaaacacacgataaatcataaacgtaagaaaaattaacatgttatttctataccttaaaacaaattaatgcatctttcatattttttaccaaatttttacaactattttgtagggaattttctactaatttcctaccaaatatgaatagtaaaaatttgatagtaaatttcttttaccaattttttttgtaatgataggattaatatgttccaaacaaatgctagatgttaagctaacggtgattcaccgctataaatgctaagcgaacggtgatccatcgcctattgcctaaaacatctaaccgagatatagaggatttttggcttaagcgtttaaatcaaaaaatttaaaatatctattagaatctgttatttctgttttcatgtgtctgattatgcacaatagtggaatgcttttttattgttcgatatatcatttatttatacgaaacaacacaaattaacttttttatatataggatcatatttatagtctttactcagtaattaattgttaaaatacataaacttatacagtttattttttcaaattgaatgaaataaccataagatatttgttgcatacttaattagaaccaatctataatctccttaatcttgacataactagaaacgattgtcatatatactcatacatctaaaccctttcaaagaaccaccaattggaacttcagtgaactcctctcgcctctcgttatacactataaccttgtcttctcttcttccattacctttcaccactaggaagagttcttcgtttcttgctatgcacgcaaaaccaacatcaaaatttccgtttctatctaagcacgctaaaccaacatttaaaatgttgaacgctttaacattttccttccacgggtcgatattccaatgcatgatctccttgccttttctatgcggacgccatagacaaatgtcattatttagacttgggtaatgatcgataacacatagctctcctcttaaaacccctaaccatgaactgtatttcgactccgtgtgcataggagataatagctcttggtactcttccttggcgaaatcgaaacagaggatggtgtttttcctacgggggtttttggtgtgagacctgtctgctatccacaaccgtaccggtccggtctatgaatttgcgatgaagagaagtatctggtacactttctctccaacagctttctttgaaagcatagatataggttttgaaaccaattttcgttacaatcttgtaatcattagaaatccggtcataaccaaatcccaatagatttgtggtttggcccggtataaccattggtattctcttgaattcctccgaacctggtttccaaatcgctaggtcattgttttctttgagggtcagacacatcattccacgacaatgaagaatacagacaggttcggtttcggccggtaatgtaaagggcaagtctagcttcaacaacgtggtttcgttgaggtttagacggtataaaccatctttgtgtaatgaaatgagatgtgatgattgttgattcgacataggaaaattgatcaaaacagatatattttggtgaaaatcaagaaaaaaaaaggatattgattgcttattttatatagagcttatgactatgaacaacaattcattttatagattgcttatttattaatattgagagcgtgcttacatgtttaactaattgtttagttattagttattacttctaaattgtttatagatttggaaatctgtatatatcaaataaaatttattatactgccacataagcaaatacaatctttaaaatcagcctcatcattaaaagaacaattttttttgttgaacatatcatcattaaaataactatataattgatttcttacttttttcttcagtcaatataattatttacttgatttgcttcatttgtttgtttattgaaattatcaataatatcttagttttacctaaagtttggaaatagatttttgagtttaaaaaatatactttttatgatttttctcttatcaaatatctcaatttctttgatatagttttacaaatttgattcgtgaccagggatgggtgaatttgaaggtatggttcggatttgttcatctaaactttaaagattataattaacttactcttagctcaaaagtcacacgtttgtcaataacagagtgtgctcaaggacgtctatcatcaagcacattagttcaacattagcgtatcttgagaacaaaaattccaatatcttcaaaccaacatgaagttcatgaacattgtgaattgcttgaagaagagagatcatgaaactcaaagattgtttcgcaagaaaaatcttacactaaaaaaaacgaatttagttttgatctgcaatgatttgacgactagagtcttatgaatatggttttgaatatatgaacaagtgaggttacaattagagaacaaagaacgtgaacttagtatgagaggatcagtgtaaagataatccaaacactagactctgcaatcttcttcacagatagagcattgcgtttcaacttaattagagaagggcttttggaacttcccatgaacccaaactcggtacatgtccttaccctttctccggtttactgctttgacacaacaatattcaagctcaacctatacacgagaatcaaaatatcataagatttgttattcattcaatcacaacaaagaatagaaaaactgaaaaaagaaagtttacctcaatgaatccagcatcagtaaatagtttcctggcagtgtcgagacaaaagaaataggaaagggttccatcagaccgcacatattccctaaatcctacacgtttctctggctcaaaccgtagcatagtcatgtcatataatcctgtcaaggtgtttagcctattagtttctctttatttgtaaacatatgtgatacagctcttaatagtgaccttaccataatctctaaataagagcagaccaccaggtttcagcacagcaaagcattccttgatagctctcggcattctttctttaggcactgccgacaatgtaaatatctgacataacataaaaagttggaataacaaccgtttcgattagaaatgttcacatagcagagcatataacacatctgtaaaaagcctaatagctaagaatcagatcatagaagattagaaacataaatttcagtttcacatctatcttataaccacattataaaaaccatgagatcaactactctagttccactgcagaatatctgacattactgtttcctacagtgagcattgttattcctcttaactaaatgagcgatgttcacataccagagtgacaaaatccaccccaccgatgcaatgtttgctctcactccctcctattaatgaagatatacaagattagctaggacgtgtatgagagaacaatgtgtatggataaattgctacagagagaccaaaacctgagtggttaagcataaacttgtctcgacaacgatcacatgccacccaatctggaaactcagaagtcgaaaagtcacaacaaaaagaatgaaagttatcaaccgaagaaatagcgcgatcaatgttctctttagtcctaacaagagcgtcactgctacaatcacaagcatacacagtaatgttcttgcttccactacacaaaaacaaagataaaacacataaaggttaactccaaaaagctaaatcggaagaataatacggcgaagatcgaaagaattataccgtaaaatcggaagcacggtactgccattaccacaaccaatttccaaaagttttgagttctctccacaagaaactaattcaggaaattccttcaacagataccttctttcctacacgaaaaccagccagccaagacgaagaaatgtaggaccccgaaatccagatttaaaaacactcaatttctcattcaaaataacttcaatttttacatctaataaggctcattacgaaggaatccaaagactccatgatccggtcattccggtgatgaacttcaccggaaaaccggaaagttggccggagccacttgtttaaaatgttccaacaataacatcattcttacccaaatcctaagattaatcaatctctctacatctcaaaaaattcagaagcaaatttttactactaattcaaacttttcttcgattgtaaatgataagagctgattacaagatatggagtagtgatgtgtgtgtagtaccttgaagaattttccggaggagtgacgggagtgaaaatcttgccatggctgcgaatctggtaaatatttggagagattttggtggtggtggtggagatggtgggagagagaaggatcgttctcgacgatgttcttgagaaattcccattcgaaatctttggaatgatactctcctgcttcttctcttttctccattgtttgttcaatgcctgcaagtattttctcttttgagaagtacggaccgggaaaaaccatactaaaccgaatattttttagaaaaccagtatatacggtttgattgaacgatttattagggttttggcttttgggtgttcaattctgattcggtttcgtttgatatggtttttcaattttggtttttcatttttccggttcatgtatatatggtttggtttcttcggatcgattttagtcgtttgatatagattaaaatcttcattaattgcacatttatataatgttacttataatgaaaaaaattaaataaaacatgaattaagtaaaataaatgaaaatttaagttcgtattgtaccgcatcacaaaattaacatctccaaataacaaaaagagataccctaaggagtgaagtcaaattgtttaagcgctggatgttttcaagttgaattctaggtggtctaatatgatatacccaataaattcaaactatagaaatcaaaccatgcttattattgaaaataaaactaacacatatttattcaacatgtacacattagaaacacagctatacatatattaatcttcgtcatattgaagattagaaacacacacaaaaattaaaaaaacgcacagtgtgatattagaaaacggctaatatccatccacacaacataaaacggagaaactaaaaaacaacttgcactgtcgtatagttctgctcaaatagatattctgttaaggaataaagaaaccacgtgatgtttcatcaactcaggatgtgtaaaaatgtcagtgtctttgtacaaaaccttgacgaccctcgagaggtttaggaatcgcatgacgatagggaaagcaaaagagtgatctctcgtcatcagttcttgattaagactcttccatgaatccaatgccatgattttgatctcttcttcggctttttcccatgaaataccatattgcttcatgtaacaatcaatggatgttcctacgtgctttctcttatgttcaaactgcattagatagatctcagattttaaaattatctttacaccaacgtggtgacaaaaattgtatttgtatgtagagtgtcaactacagcttaagttcttaggtctgatattataattcgaattctacaagaaattggatctcaatctctcttggaatgtccaacgtcaaatatcatgttctttttctaatgtagtaatgtgtgtcattttcttttgtaacatgttgctttctcatagtacatgttatatactacgatcacatgctattccttccgaaagcatggagacaaaattttacacatgacattgtttttttctttcagtatgacatgtttttttttaaatgacattgatttctttctcattctttcggatatctctctttcactgacaaaactcctgtcttaatttttttctcctttcagattttgtgttattattatttgtttcatgtttttccccaaactacatatgctactgaatttttgtcttttgtttgtggaaatctataaattttctcctatctttcctaaattttctgattcatggctactctggtcaaaatctagttaataatataatcttttagaagcaatatctttgtcatttaggatccgataggtcaaactagactggttattaacttattggcatcactacaataatgtgagttaattacctcgcaactagcaatgtcaccacagagacggcctattagtgcagaagtcacaagaaggggtgggaaagtgcttaaccattcaaacacatcaagggtgccttcatccaccatccctagaaaggatcctgttaacagagctaagtagctcgatgaataaactccgttctctttgtactcgtcaaatgttgccacaaagtcttcactcaaccattttgcctcttgaagataggctttagcagttacaatcatctgatttattaacatataaccaacaaatttttcatttagattcaacacacatgaacatagacttagtacttaattactaattagttttgtgcttttgaagtagttgtgtatataagtatttagtaataccgattttttagcgaaaaggccgcatcctgaccttccttccctctccatatcctcctcaagttttccgtagaaatctaacaccacatgatgaagatacctcatgctctccgggagcccttctatgccgctaggattccacataatcaatgaaatggttcgagttcctcaatcgtgccaaatgcatcgtacgtatcatcaacaagagtcaataagataacaacaatggccaatctaatccttgcttgagaatatcggggctcaaagtatgctccaacagcccacaagtagctttcgacagtcctattccttgcatatggtactttcaagtcgagctctagatttgagtaccacctacaaaaaaagaagaatcgacaatcattatggtagtctctccatatataagagttttaaaatgtatatataatctatcttgctagctcataatggcacctgaagacttggcaaagctctttgcggtgcaaaatttgcagaagattgaaatctatcttagcaaattctagcaaggtttggtcgtgcagatcttcttcttcatagtatgagatatattgtcgtgtctctatccttgatatacccctagggtatgcatgtttgagggcatttttaatgcggatggacataggtggactagattgatcagccagtccttccaaatgagacctagagaaagcaagagcttcatcgagaatgtcttcaccatgggtgctccaatgtgcagcttcataaaggcataaaagacctcttgcatcctcagctaggtgctccttgaactttccatccttattcttgaagttgttaaacacatcttacacatataattttttgttagtaatcaagtttaataattaacattgacttggtagatttactaatcattatgcacagagagtacaaagtgagtataccttgcgcttccacagtattaatatgatcgaattaggtgaagttgaaaaagaagaaaaaatacgctcgctatacttatgtcagttttcacattaaccaaaatgtaatatagttcttagaccaaaaacaaaatactactaacaattagcaacattctctttcatgactttttcttagtaatatcaattcaaattttttttaacccaaaaaatatggaaacataaataagaaacttattcatactgataaattaattaacatattacgctcgataattctaacattagagtgacttaccgacaccaagtttatagccaaattgtctaaaaatttggaagacgagggagacggtgtataaatcgaactcattgcctcttatcatctgcataaaaccatgacaccaaacatcgtctctaactgcgtgaagatgtctacttcaaagtggtaggaaacaccaaggcgacaaagagcatcaatgaatttgatgttctctatcggctcttcttttgaagccattaacaatcctcttacggtttcctttagtgaactcagcttctcttcgtttatctcactctcctatatacatcaaaataatggcacgagagaagacatcataatatagagtatattcatagtgttttgtgaacaaatttgcctaattgtgacttcaagtcgtgtgggtacgtaccggatccaaaacagaaaaagagatcaagggatcttcccatatattcaccggaaaatccgctaatggccgatatatttcttcagtcgtaagcgctgacaaagtatttatcagctcctgcatgcttaagttctttttctgaataaaagtgtatctataatcacacttcaaggttttctaaagctttggtaaaactgtggctgcacttgatacatatagaggccatatatagggagatgagcctccctctcttcttttggtgtttctttttttagtaacctttatcttaattttgtttatttctatggtattttcttttaggcgtgtaaaaatgagtcattgattgggactcttagccgacacgatagatatgaacacattggccattttacttttctagtactccctctgttttaatatatttctagtttaaaggtgtttttttttgttacaaaataaatgttgcttttatatttttttatgcaaaaattaaatatatttaatagttttaactaattatatttaatagtatattttcgaattaattttatttgataatattttataaaaaatagatatattaaagaaggtttttatgttttttcttttaatttgtatgaaaaatctttaaactataaatcaaataaaattgagggaataatagacaagtgacagattttcttcggttactaaaagagcaaaatcaattcattttaatattttgacgaaaacaaaacaaaaaaaaaaatcattttaatattttatgtccatcagcccgttgaattaggcttaaatggcggcgacacattaaagcttctttaattgcgccactaatatgatatgcgccactaatatgatatcccctacctcatatcaatcattgtaagtgtcattatagtttcttacatatattaacataacaattaaaaagaaagggttgccttccatgccaagccagcacatggaccgaattgttactcgctacagtgaggtgactggtgagatgggaacaagttgccatgatgtatgcaggtaagtgagggatgaacgcctgtctgtgttgctgcatgcctgcatgtgctatttgtttgtttccaaggtggtgtgatctgcccccgaggaatgtctaggagaagggttttctgctgtgattgctgaaggcaaataataatcaagagtcgaggaacaaaatttgtttcaaataaagtggaaagaaattcatatttgaaactccttcgttttttaaacagttcaacatttgatgtagattttaaaaatgtaaattctatttaataggctgttcttttttttatataatatgtgaaatctataaaaattaaataactatttgaaaaaagcttttaaattgattataattttgtagtgggttaaaatctagaatgtcaataaaaatataataaaaaaaccgaattaaaaatcactaataaaagccttcgaattcataatcccaatgcttttttaatctttttcttctacacaatttccagaagatgattactaattagaacgaaatataaaatacaaaatttgtccaaaaacttggagatgcgggggatcgaaccccgtgcctctcgcatgcaaagcgagcgctctaccatttgagctacatccccagttgttgagttacaatgcttcacgttttataaattcgaatatctaaaccaacatgaactcttcttatctccaagcgagccgcgtcatggtgctcggatctaaatctccggtagaccgccgccggaaatcacttgaaagagtggataaagaactcttaagaggcaattacgaaactgctctctcactcgtcaaacaactcaagagcaaacatggctgcttatctgcttttggctctgctaaattggtttctctcgcatctctctcttaatgcttatttgccaataaatcatctctaattcctttttttttttaattagcttccgaagaaattagacatgagtagcaaaactgatctcaggtcgttgattgattctgtctccagaagtattgaatctgtttatgtccaagaggtactttcaatttttgcagtgttttaccaataaacacatgtaatttcatgtaccttaattttttttattttttttgtaggattcagtgagaacatccaaagagatggaaattaaaacttcacctgaagaagattggttctctgttgttcaggtgaagatctcttagttgtcaaataaaactagaacttaacattgttgcaaagtgaaattttatcacaaatgttgtttggtaatgagaccaaatcaaatagaactttttgtggtgtacctttatgggcaaatatatataaattgattttctgcgacgtctgcagcatgaatcagggcattttcttgttggttacttgcttggagttctcccaagacactatgaaataccaactttggaagctgttaggcagaatgtgtcgaatgtgaccgggagagtagaatttgtggggtttgaattcctcaaacaagtaagtagtttgctcaacaaatggtcagctttgtgtatgttcccaaccacaagagttttatgttatcaccgcaggtcggtgctgcaaaccagcttatgaaagatgatgtcgacggccaaatgaaccaaggcaatatctcatccaaggtaagatttcctcaaatggacctgtaatgagtgtttttctttagctcaagctgtttctgtaatgattggtcaaatctgtgaatgcagacactgaacaacttttcatgtgtgatacttggaggaatggtaacagaacatatactattcggatactcagaagggctatactcagatattgtcaaggtaatacaaactcaagtctccttccactcatagtcatgagactataatcttctaatgtattttttgagatttgagtgttgcagttgaacgatgttctgcggtggctcggcttcacagaatcagaaaaggaggctcatatcaaatgggctgtttccaacactgtctcattattacattctcacaaagaagcaagagtctcacttgcagaaaccatggctaaagccaaacctattagcacttgtattgaagccattgaatccgctatttcaacacatcaaatttaactatttcacttcttcaaaccgaattcattactggatttgcaaacacagtttttgagtaacatgaaaataccaaaactattgtggaacagagagccatgtctatgttacaagctaaaaaataaaattaaaactcttgagaagcagatccgatatcgcctttgttctttccaacctttgatgggagaagagtctgatgaatgttgggcaaaactcctccattagcaattgttacacttccaagaagtttactaagctcttcatcgttcctcactgcaagctgaatgtgccgtggtacgatacgtgtcttcttgttatctcttgctgcatttccagctagctccaatacctaatgattatatcaacatcatataagagatcagactctagaagacaccttaacatcaaatcaaaatcaaagattcggtaaacatcgaaaaatctagtgatatatcaattacgagtgattctcatcatagagactaaaagactaaataccaaacagaagattgtttgttacctcagcggcgaggtattcgagaacggcggagagataaacgggagcaccggcaccaacacgttcggcgtatttaccggctttaaggaatctagcgattcttccaacgggaaattgaagaccagctttagaagatcgagagacggactttgtagcttttggctttcctctgccacctttagttgttccactgccggcgccggaactcattttttgtttatcgggaaatttgaagaggcgattgtaaaatgtgattagagatggctgaggattttgtgagtggagtgatttagggtttaggttgtgatttctgaaatatatagcgttgagataatggattttgattggttagttgtgagtcacgcggattgccagcgtggcaccattgtaagttctcgcgggtttttttttccgcctctttttaacaagtcggtgaattttttaagacgattactatttgtgttaaaattcggtttagaaaaaatgcaccaaaactataattcggttcggtttgaaaaaaaattaacatccaatgttgaaccgaaattagctcaatttgttgggtcatgagataaatttcaatcaaatggtagtgaaggataagcccaataacaaataacacaaacagctttaacatgggccaactaaaaagtgactgtcaagcataatggtggtgatgatgatagattgatagtggtgtagtatgacagattgatagttattaaattaattaagataattatatgtatatattctttgtacatttctgcatgtttttataaagtcaaacttaaaaagtcaaaacacttatgtcaaaaaaaaaaaagagtgaacaactaaaactcaaactttgaccacatgttacaactaatgaatttattgacaaataattatagcatacatggaatggttgcgacttatgcaaggtcgatatgttttgtatacaagggtgtttatcttcatcaaaataataacagtacaaagaaaattattctattcttagctagtattgatgaaggagacaagatagggttttgtttactctctacagtcgatgaagaatgcgatgatgcgaaagtatcttaagatgaagaagatcatgaccggtgttgtagtgactgaggtcaatcagcatgcacttggtaaccagtttgtgaagaagaatgacgtcattctcgagattgatggtatgaccgtagaagatgatggcaaagttttctatgaaaacaggttgtggatgcacttaaatggtttcattgctttgaacatgtgaatattcggtcccttaatcctttgatagcctctacaaaattttgatctttatagtcaaggtaaaccaacaacgttgattgtgaaattcaagtggtaaaaccgttaaaaacaacatcgagaccttgatttagattataaccattcatgggaaacattttgggtttaagtgacatgaaaaaagattgctttagactatgtgttactttgttatgatttttggaagttttaaatatccactaaaatctattaaatgagaacttatttcacaattaaatgataatatttaatattaaggtctgattagagaatgtgaaagagttgagttgacgcgattaagaaaattcggtgttgtattcttaaccctgcagagaaacatgagattataacactgcaatgcaacaaaatatacaatgcctttactcaattagtaaaaacccaaacgaaataaatctttatttctattttttgcctgcttttttcctttttttctcttttttttttgatgaatgaatagagagagttacacgaaaaaaaaagattacaaagaaacagtccatggaaatcgagagactgttgataatgaacattacatttacaagcatttacagaaacagatgataaaagaaattgattttaaatgttattttttcagggtattaaagatcatcagtgagtaaaagttgcagcaaacgggattagtatgtgaccccttctccattagagctttctttggccatagtttaactaaactcaacctgtaacacatccaaaaatgttgatgatatattgagataataccgttagaagaggattcaaatcatcgaaaaaaattacaggctatgggatgtattcttcttaccttcttcggagaaagcgaaaacaccaccaagcatgtcatcgtcctcatcatcatcgagttttccatcagatggagcatccttatgctcagtttctgtaacagtttcattggagaccacctcctcgaaaaactgctcgaagtttggggagccgtcaatgggtccttcaccctcgtctgctgcattcatgctcatatcagaacggttagaacttacatttgaatctccacttatcccactgctgttttcaatttttgtttcagcgggcagggaggcgttctttggcaagacatgagcgtcgtcgtctatataatcagtgtctttcacagcagaagaaatggaaactacaggctgtttaaatgttacaattccggtatgaggattttggtttggagttagtgcaaaatgggcactccctcttctttcctcatcttcggggtaaaccatacctgctaaaacttcagttttaagatttgacatatcttataatgcatggattaagaaagtaaatttgattaccattgaatggatgcatttctttaacttgtccagggtcagaagaagaagaagaatctgaatctctttccccagaaaatcctctacaagcaaagaagaaccacttcaaaattggatcaatgacagacgcagtttataagatgtgatgcagttagcgaggtaacttacctgttgcgcatactggtatacacactgtgaaaattatcatataccggcagaagatcctttcgcctaatgtcaacctcgttcgcagatactttcccgatttctgtctccccaccaccttgatgcgaattcaggttcttgccatcagagtctggtggatacatcggatagaaagatatctggaattgataaaatttaagggagtgtcagccattgtacattctatatagtaagaagacatgaccagcagagacgtagatggcacctctgaattttgccagattggttttcttccggagtttatcagcacctctgcattggcaagataaacatggtgtttctccagaggctttgtttgatcttcactatcagaagtatcaacagttaactcagcattttttcgtccaccataagtaagcccgcatatgttctcctccctctctggccaatccgctcttcgacagacatcccaacactgaactggttcaactttcactctcagttcctcttcagaggtcagcccagaagttgctccatttcgcgtattgctctcagcctggtctcctccaagagatggaatgagtttgtattgaactacatgacctgatggagtgtaaaccagtaagtagtccaaggcaggagatgacgactgcgattcttgtggcacagattgatggaaaacagcagcaagacagccagaggggaaggtgggttttcctacaacggaacttgcagcatggaagaaattgttgcatttgattcggctaaccacagaaagagtaactgacgctggtggtggatatgaaaaatgggtggtcataaacgacggacttgaccaccatggcagggataatgttggagcaagcgtcggtccatcgaattgagagtttcgtatttcaagaacattttctcccccgaacggggataaaacataaatatggcaggtgctcttagatgaaacaattgcaatccactgactgtagctactaaagcaaatatcttgtatcacctgtgggaatatagcacaacagcgtttacagtaacataaccatccaaatgaactatagctacaagagaaaaaggaataagaaacatacagctgatgtcatgccacgatgtagtttgtaaagaggcacatgggaagagctccaatcatagctttgagcacccggtccattctttgtaggtgtcggcataatccggaaaacgttaatattgttaccgtggattgaggctgttactagtaaagtgccactagggtcgaaacagagagcagagattggactagtgtgagccctgaattgtgctataatagctcgggactcaaaatctttgacaattacctgccacaggtcatattgataagcatgttatactccttgtgttaagatatccaaagtgcagaacaaaataaagacaaaacgttataaaacatttactatcctaatctaggttctcaatactccataaatggtttggcatatgtttaacattccacaacgcataccattctcaagcaaccgaacaaaaaaacgagggtttaatataatcaagataagatgctttctctaaaagactaaccgttccaacaacatctgactcagctgaatgagaaccgacccgaccaactttccggccagggctggacgaaagagaaggaccaggaccgtcatgcttgagatcttgacagtatttagatatagttttgtaacccttgtcacccaaattgagtaacccagctgccaaatgcttactagattccatagcgtatcttgccaccagattaccattatttggcgaggtagatggactgacaccaggaggagtaacattctgagggctcagacgacctatactagaagacaagggactattggaagcatacgctaaccatctagccccgacagccattggaccatatccaacattaaccccagatatcccttggtttccaagctgaggtacaggatacgagaggacactgaatttgttttcaagagttagcgcatcaaaacaatatatctgcatcacaatggaaaagcattaacagacagtagaaaacttgcactccatatcgaagagatagataagcacataaaaagctaacctgcgaaccgaggccaacagcgacaatccgaggactgcatctaaccatataaacagtagatctaaacctcaaaacatgaacatagttatgcgatctaagcgaataaaatcgcacaaccgtgggagagagtgcaagaggatcctcataaccatttctaacagatccatctctactagtaacaataggacctgaacctttagcttcatcagcaacagctaaaagtataggatgtgatgatctaaacccttcaactccatcacatttagcaggtaatggctgcatctgtaaaaatgtaaccggatcatcccgcctcgacacgaattcggtaacatcatttgaatcatcgatatcaagaacttgaaacccgtttgtataacctagtaatagaacgttcttgaaagatgattcacttgtgtgcaatctatcaaatgaagaccacaacacctgcttcaccaaacacaaggatcacaacaagtcaaacctatctcgataaaaaagactcacactttttcctaatctgatcaaaatcacataaacccaattggaaaatgaatcaaaaacccccaaattccaaaatagagaatcacgaattggggaaaatcaaaattgaggtcaaaacctgatctttaagctcgtgagaatcagaagagagggaagcagcgacggaggcgctagctgagcgaacaccggaggaagcagttctgatgcaagtagagatgaattttaacgaattgggcaaaaagccattagtaccattattcttcgtttgattatgattatctccgttgttgttgatgttgaccttggagttactcttcatagtaattatgaattcttcgtggaagataccaccggagatacaccggagaagagacaacgatcggaaacagcataagccggcggcgatttcgaagaagaagaataagtaaagagattgtttaatttgagaaattttgaagctttgccattttttggtaattggggttaagcggtggtgtgttttttgaccttcttcacggaagaagaagaagaagcgaagaagatgatgatgatgatggagaagaaacggttctttgcttttttttggtttctgttttttttttttttttgggtttgctttttgttttgttctttgggcctttgtggctttaagttttagttagttttgttttgtctatttggtttttgagtaaaacttaaaagtcactgtcctaaaagaaagagttactgtagtgctttggcgtctacgggtgttttagattgctgtgtaagcaaacaattttttgtattttttatctcgtgcatgttcacattattacctttttttttgggaatgtttaaatattatcattcaaaaattacaccaaattgattaattgaatcaacaatagatctatttattgtttaagaaatgtagagatcgtgcaagcttaatgttccatataatataggtcctagggctagttgttacttatttggtgtataattgaaataggttttagtttgcacgtcacaactcaaagaaaatcaaggcatccctcaggcctaagccttccatgtttagacccatttgcaccaaagcagttaatgcccaacgactagtgatttgggtaatcaattgctttgtatgttgaatcatatctttcttttttaggttagatttttttttttcttagtcaacatgaataatcagattatataccctaaattttttagaaattgctacactataatttcattcaccctctttattctagctaatcagaagctatcccctaatttttaaaaaatatatttaattattattgaatttgctgttcaccatttaaaaaaatgtactccctctagtcaatgtgttctcaactatattacatgcattaataaagacttaaagagtgactaattcgaaatcttgtcagattattgaagtaagagttttattacgtcgttgttagtatacagattatataacaaacaataaaatgtggttcccgtgtaaagataattataagttataaccttatattagacgacaaaaaaaaaaatgttataaccttatattatttgagaagttacaaaaaaagattaaataaatatggacgaacaagagaaactatatctgtatatagtacttaagttataaccctataactcacacattctttcagtagcaatgagtttaatcaaaatgattccttagacttgtatttatccactcacacggtttagtaatatattaaatgaaaaaaagctctaaaaggaagttgctcctatatatcttattcttcttttatatggttttacaaattcataaaattcaccaaaatgacagtaccatgcatataccaaccaccctacgatcaaacagcaaggctaaaacataactgtaagtgttttcactattttgtttcatgttttcaccctcttggttacgaaggcaactatgccaaaacttattagtaaactttgattaactgacttttgttgagaccaaagaacagttccaaatcttgcgtctacccgtctccaattatttaaagaatattttgtcagagttgcacgtttttacgaacaccatttcattaatataactatatgttcttttaaaataaaggccaataatttcaccaaaaaacttaaaaataaaagccaactactgtttttttgtcctacactcctacttgatttgtttttcgtcctttgttaattacccacgatatcttcaagcctttttaaaaaaaaagtgtctaaaacttctcaagatcctatataaatgtatgaagagttttgaacttagtacttgtcacaaatataagtgacaatatcctcttaagtctcttactctatctctctctttaactgtatcttaaacaaaaagaaagagtatgatcatcagaagaaaaaagaaacaacaacaatggagagacaaaagagcatggaagccagtttactcaggaagagtctcagcataagagaaaggaaacacccaaatgaagatggttaccctgaatccagtttactcagaaagtgttcaagcattttatttaacaccttctaggcgtgaaatgaaagatctaaatcaacaggggtcaacttaactagcattgagctcttctctaagtgatgagactatgcaactatatatcatgaatcaaacattaaacaccctaatctagcctaacgatcacctatgaatgagactactcaattattatgacaattaaaatacaaaatgtaagaaaactaaagattatcaataaattctaaaacaattgaataaatgttagtgatgttagcccaaaagagtttagatctaagaggctactgaaagtaagagcaagacggctactttaggtaatgttttgagtgaactttgctttgtattatttcacttaatctttaggttacaacatggttcccttttatagctaaacaatgctagggtttcaatgattgtaaactgacagctgtctctgtcttatcaagcttcggaggtcaccaaacaaccaaatctgttctttgtgttgattggatccgtacagacgctcctcttctctgtcttcactctgatttgttttcttgcacaggtggtggtcttgtctgttgagaagaggaagaacacttgttgggcttcgttgttgtgttggttgtgttgtcattgggcctgtttggtgagtggcccaataaccattttcctttgttaagctgagcgacgtcgttttctttctttgactctttagctgaacttgagctctgcttcgatctcatttcagatcttggagctgttgatggcggagcagtggagctcttgctaatagctactacaactaaccataagtgaaaactatatatgaaaagcttaggattttagttcttatatgatagtatttatatgaaaatataagtgtatccggatcgaccgattcagattgggcaaacccttaaaggagaagtagataaatgattgatcgtctggtcgattaccattataaatctcatgaaatacgtatgtctttcctctttttcgttgaaggactaacttttttcaagagagatttacccgttcgattgctactggtcttagtttcttcttactcgaactcgttattctcttcttggttctttgcttgttcccatctatagagtgtgtgcttcagatagtttcatagacctattaaaagataatatatatttgcaatgcatatgctctaggatcttaaattcaaatcaaaactaaaaatacaaaaaaagaaaagaaaaaacaaaaaaaagaagacataaacctagttgtttaaaccactaaaatacaaacgcataaacttactacacatgaaaatgaaacgactacatacgactgactactttgcatatatatatttgtgaattactcttcactttttctctatatataataacaacttgaagacaaagacaaaataataaaataaccttatctcttctctatatattagttcttgagatctctccaacaactctactttgtctttactcaagtatttcactaagaaagatagaatcacaaaaaggaaagagaaaatgagaggagaaatcgatgaagctaatcttgctcctgaaacttcacttattaacaaagagaatcaagactcatcggcgacaataacaactactctcttgctcaccacttttgtagccgtgtctggttcctttgtctttggctcagctgtgagtttacaattactaatttttgcttttgttcagtaattgtgtgttgtgttttgtgtttgaatcttaatttctaatttcgttgaaaattttggcagataggatattcatcacctgttcagtcggatttaaccaaggagttgaatctctctgtggcagaggtaaactgttattttatttttttgtcttttaatttattatgccatatgtttttgtttgctagctagataggtaaaatatacttaagtacatttaacttatgtgtatagtattagttactgatctaatcaatgagtatggattgaggcagtagtttttttttttttttttaattgaggcaagtagttgtgaaagggttatgatactagaagaaaataatgagtggagaattaaaatttaaaggattatctcactatttttgtactaataatgagtggagaattgacggaaaaaaaaatgagtggagaattgaatttttgtactgtagacgtactggtcctactccaaatgcttgcatgttgagataaattagttgtgtccggctattaattatgatctctatttcggttagaattttttttctttttttttctccgtcttgatttaaggtttataggtgtggaaaaaatatcatttagtagaaaattaagaaataagcatacctttacgaaagatgacaaattatataaacatcatcgtaaaaatcaagatatatcacctataaatgtttttaaactacatgcagtactcgctcttcggttcgattctgacaattggagcaatgatcggcgcagctatgagtggacgaatcgccgatatgataggcagacgagctgtaaaatttgttcttctttctttccatgacaagcgaatatttacatttttgcgtcaaactggtaaataaatcatttatttgtgtgtgtgtgtgtgattagactatgggtttctcggagatgttttgcattctcggctggttagcaatctacctttctaaggttagcttagtatttttctatatatctctctgtatttctcatcaactatatttcttcaagaagtacttaaaatttaccatgtggtttttgtctattaaggttgcaatttggcttgacgttgggagattcttggttggttatggaatgggcgttttttcgtttgtggtaaaatctataaactctagctagtagcttgaataatgaaaaatattgtggtgattacaagaaaacaaattcgatgatcaattgtaagatgagtgacctaatgatctaaataaatatatctctacttttcttatatatctatttacaataaacattagccttctacaattgttaatttcttaaaacgaaagctatattggtcatattagatactagattatatgttgaaactatttgttgcccccaagagtatgatatttcatatgtactactagctggtattccggcttaaaattgcgcatgcgaggaacaacacaatgaaaagataacttcttcgatttatgtagctgaaagttgttgctagctatagtacagtagattttgtatcgttctttcatctagattgttttgttaatcgatgatcaggttcctgtatacatagctgaaatcactcctaagggtcttcgtggtgggtttacaactgttcatcaggtatgaatatgttatacaataactaaattagtttttatgaatatgttatacaagaactaaattagtttttaaaaattaaatcagaagttacaaaatatatactctaaaagtattattttcatctccatcgatctttaacagtgttaacattgcagttactgatatgtttgggtgtctcagtcacatatctcttgggctcttttataggctggcgaattttagctttgatcggtaatatccgtcaacatactttaaataagttactcatactaaaaaattgttaattaattttttttttatgctccaggaatgataccatgtgttgtacaaatgatgggattatttgtcatcccagagtctcctagatggttggtacgttatccgtcaacatactacaagtttaatagtttttatgtacctaatgccaaatctagtctatccaatcattacgctaagtaacccaaaactttcattgttatagaaaataattgttcgcaaaaattctcaggcaaaagttggcaaatgggaagaatttgagattgcattgcaacgattacgtggtgaatccgcagatatttcatatgagtctaatgagatcaaagtaaagtaacactaaattctatttcttgagctcactacattttttacaaatttccattaaagtgtaaaatctcctgtatttctatattttctaggattatacgcgaagacttacagatttatcagaaggtagtatagtagatctgttccagccacagtatgctaaatctctagttgtaagtgtttttaacttataaaattgttcaataagtagttattttcattattctatgatgaaatgccaagtgggttttaggtgggagttggtctgatggttttgcaacaatttggaggggttaatggaattgctttttacgctagctctattttcgaatctgctggtacatgcacctttaatattgattaatgtgcctaaaccccaaaaattaaaaaagaacttcactaaccaacttaattttttgttttgtaggggtttcttccaaaattggaatgattgcgatggtggtcgtacaggtaagtttttgggtattattattttattttccccaattttttgatggttaattaagtgaatgaatatatatttatatagggtaacaacacaactaatacaaatatatattacaaaaataatataattatactaaaggatttttagggaagaaaaacctgagaaagaaagagaatatataatgttagagtgtgaattgtttccattcgaaagagaaggaagagagcaggatagcgatcagtcgcgacgactaattcctggagattgttgatcgatgcgataggtcgctggatctgtcgctaaatttaacgactaccaaacgaccatcactggcgactactaaacgatcatgaccataaaattataaaatgaacacacgcttctccgatacaaaccaaatcgttctaatctgagtttcatttgtttacctatcaaatacaaaaattaatctgacccaaaatttatcctataacaagattatagagagataaacccgtagaggaaccatatatcaaggtaacatgttagaaatacctaacattaaagaaatgagacgttgagtgatatatgaataatatggtctaatccacttttgttttgaattgaaaagccaaaataattacaattaatatataattgtttaacatttaaaattcaatgtatcatttcttaaaattatttgtagctgagacgaattttctttccagatccctatgacaactttaggtgtactgttgatggataaatcaggaagacgaccattacttctagtaagaaaaaacaagtgactaacatttttttataatgttattagtcaaatacaaagtaatttttacaagtaccttttctcactatattaaaaataaagtttttaaagaatttatgttataactgtagttccaacttattattgtttttttatcttttattattattattatacattggtggataattatatattgcctccctagtccctatatatatgtcaatatgtatatgttgaaagaattacatataatgaatttaatattttatctcttcagatttctgctactggaacatgtatcgggtgtttcctcgtcggtttatcattttcattacaggttctctccttatttatattttaaaataatatcttgattttatctatttttaacatattatgttttagtatattaatatcagtataaaaattgaatattttttgtctacagtggtgccatatgactttattgttaccataattataattttttcttctaatagagatttaatatattttctcgatctatgtctagatctagatgataaatatctagaaatattaatttttattgtttgattgtatattaatattaaaacttctcaagtagttgcatatatgcttcaaaatgtttataatttcatattatgtactataatttttgggttcatcctgttgtagtttgtaaagcaattgagtggagatgcttcatatctagcacttacaggcgttttggtaagtttgacgactaaaatctagatttcctttttttttatcctcaatttgaaaagtttgaaaatagttgatatgaatatgatagttttggcatactgaaacgttgctgtttgaaagtgggaatgactgtaccaataagatggtgcatgaaaaaaatagaagaactgatatacacatctatatcatcaaaatacgtttatttttcctgtaactcgttctgaaagaactatatagtagacgtgtttgagttgaaggaattttacgatgaatgacttgctaaaacaaatttccgaatactatgtcggtgaggaaaaactactagaaaagaacaaataatatcattattgttattaacaagtatttcgtggcttctgggatagcgaaccaactattggatgaaattagaacccacacacatactttgaaagatcgtagacgtccataaatgataaatttatcttattttttcaggtgtacaccggatcattttcattagggatgggtgggattccttgggtcattatgtcagaggtaagtaacattcataaaaattctttggttttaaacatactcttatacttaataatccgatcgatgtcttaagaaatattaaactttatatcataaacctacggtttagtattaaaattaaataataaattatttaactctcatatggttgtatgtggtatgattttgatcagtgtatataaattatgttcctttatgatttatttattgattctttgtttatataacattttaattcaatttagttggtgcgtagatattaattttatgttttatatgataaagatatttccaatagacataaaaggatcagccggaagcctcgtgactgttgttagctgggtcggatcatggattatatcttttacatttaactttctaatgaattggaatccggcaggtataaaatttgtttaaattttgcttttatcaataaattttgttctttatctaatagtggcacaagttttaaattttcaggaacgttttatgttttcgctactgtttgtggggctactgttatttttgtagcaaaactcgtaccagaaaccaaaggtcgcacacttgaggaaatccaatattcgattggttatgtagaattgtaatgtatagtagttgattacgagaatatcagtccctaattataacgattaaaagtaagattttttatttttcttctttccttttggtataatcgtatcatcctttttgcttagtgaatttgaataaatggtgttgtttttggttaccaaatatcggagaacataattgaaggtgtcgaggaaaaaaatcgaggttatgacgagtttacaacttctaaagacagtgaaagatattcgaagtttttttggacatatatgttgggttctacaaaaaaattataaaatatttctttgagatagttagaccgcttacaaaaatgttatgtatggaggtcaattttgatttcatggatgagtgcaaaaaatcaattttaaaaaatgattgtttgacaaatatccattcaaaatatactaactaagggattagatcacgatattaatgacatattcttgttttccattttttcctttaacacacacaaaccaaaaaaaaaattaaaaaaaaattttaaaaaaatagtcatttttcctctttttatatctaaaaacaagaaagaaaaccaattaaaaagaagtgacagagattgaagtgtgaagccatctgacgtgggacttatcttacgttctcttctaatctctacaggtcatctttctcggtggcacctttattcaccaagcaaaacaccgcttctttcgatcatctatctctttcccattttcttttcttgacttttttttctctctcttcttgttctattataaacaaaaaatgtgtaataattattcatcaatcctcagaataatacaaataggggagtaggtatctatcttgtcaccctctctctctctctcttgttaccaagatgagcttctacaaaagaagctttcactctttccttggccaaaccaacaccaaagggatgccgtttgaatccggtcttggccatgatgagacacaatcacatggcttaatgttgtgcacagagtatctagggtttgagagttacgacatgaggatgtccgataacgaggtggagaacaagatgacttgtcatgcggaggtggagaccgaaagggttgaagcaaagaggaggaagacgaaggagaatgtggtggtgcaagcgcagaaaaaacagtttcctccgcctctctcgtcattaaacagccgtggacagcgatatttttatctccgtccggtgagaaaagacggtagattggaacttacgcaagttatggtcgatcgaccagagattttccacgtttctagagtagatggacggttgagattacattttgtcgatggtgtcgagaatcccattagagcttattctggtcctcaagaaattgtggccttagaagaggaacctaagggtctaggtaatgagaaagagggaggggagattagtagatctgatctggaatgtggtagagagattaatgaagacgacaatgatggtgcatgtaatcaaggaatggatttatctataatcagtgatgatagtggtgcaagaagttggagatgtaaaagtagtcatgatgtttcggtgaatagtaataatgatgttgcacatttccatgatgaccatgacacgagagaatggatgtacaacagtggttttaagatcgtggcaagtaggaaccatgatgagaacaatcatcatcattatcatcatcgtcatcgtcatcatattcatccataccatcatcataatagtaacaataacatgaatttatggacccggacgtacgtgaggaccaggtgaggttattaatcaatgttttttttttttacgtggcggcttgaaacaaaaaatatatcaactaaaaaagagtacagctatattttctctggaagttccgttgtatttttataaaatattcgaaaagtcaaaggttgggtgttgttataagtagtgtcaacaatatgatagcgtgtgagtgtaatattattgttcgtttaagatgcttatgtatatgacttccataattgaaacatcttattacaactttcaattttcatattattatgcctttttaacaaagtattattccaattttgattacaccgttttttatttatgtaatttgatcaaaataaaatcgacagataatctcttcaaaagtttagagtttagatgttccagttttaaaaataattatgatgaatccggaataggccacaattttttttttttaatacaagattttagagtaaaactcgtaatcctctcagacacgaaacgacaacatgtaatattagtttcgttccaaaaatatcgaactgacgatttttaagcttcggctaagagttttactagttcagcaatgatacttagtggaataggccacaattcatatgttataattcaatgtttcatcatttaatgttttagaatcgaacttagtttggtgttagttaaaatcttttcgaccctcgtaattaagaaataaggaaaacataggtgaaaagatagaaggcaatgtaacgcaaacgagtctgtctgatcggtccaattgttggtcattcgtccatatatagctgtctgttgaaaattggaacattaatgttgtcaaaattctaagattgcaggttgcatttatagactccatttccctccacaatcgacaggtcacaggcctttacgccacatataaccccaagatacaatgcatatttaaaagttcttgtgaactgaagaaaagtttcgacgggttgagatacgagacattgaattttggagaagaaaacaaaagctagggaaaaagtttgtggtccgcaaaacattgaaatgcaataagaaaactgagttaaaaattagagtaggagccgtgttgattccctaggaaagcttcaagtataggagattgcatgaaacgttttgataacggaaatgttaagcctaataaaaggaagtcacctccttatggggagtttattacggcctatacatcgcatgtagaaaacgagtttctcggttagaacttaaaatggatttggaagtagtggttggttttctgaagataagggttagtgaaacttatccgctgtctttcctgttacgcttgtgacatggctttatatcaaaggattagaatatcaaaatttcacatatttaccgggaggataatcgttttgcggatgaattagctaaccatgctttttctttaaatttagtttttcactttttagatactattccaagatgttctcttttgtcggatgatgcccgttgtttggcaattcgatggcatgttgttgcttgttaagtttttgtatgttgctatgaataaatttggggaggcattatctccccgtcccctaccaatttctttttttttcttctatcccatatatatatatatatatatataaatttcgaaaactctttgctttcattttcttaaaaaatcacgtaaacataattttagaaataattaaataacaacttataatatttttttttcttcccatatatataaactccgaaaacatatagtcgtatattatttcttaaaaaatactttcaattgactttttccttttgtattaaaatctattctcccacatatttggtagttatttaaaattgtagttcatacaatcacagtctttaccaattaatttaaaaatcatacagtcaaattccttacatcaaaaatccttataacctttaactatgcgaacaacaaagattaccaaacttccaaacattgatctacagattgactaatttttatgcaatttaaattactaccatttttccatctatataaacccaatcttgcacccacaaaaaaaaaaaaaaaaagagaaacacatacttaatctaaatttctcctttctttatagtcaattcatatttttgttttcttccaaaatgaatcccaagaaaaccaaaggaaagcaaatgattaacatcaaaaaaattgaaaaagatgaagacagattggtcacattatctaagcgtcgaaatggaatctacaataagcaatgagctttccattctctgtggtgctgaagttgcgtttctcggatactcttgctcaggaaaaccatacacattcggcagtccgtcttttcaagccgtggcagagcgatttctcaatcgtgaggcctcatcatcgttgcaacgatcggtcatgaatgctcaccaacaagcgaagattcaagagctttgcaaagtatacaatagaatggtggaggaggcaaagacggaagaagccaaagtaaagaaggcagctgcattagcggagacaatgcccgtagatgaggatgcgtggtggaaagtggatccaaaggaggtggaagatcacgaagaggcgaagaagataatggaaaagtgtgaagggctctatgagaaactgtgtaatgaagctgctgcaaggatccaaagaggagatgctgagaataataacaaatgatccattaatgattaagattttaattagtagatcattactaattaagtatttttgagtcttaagaattatgtttttttttttgtcttttcttttttatacattatgaattgttattgttttctacaacatccagcaatggattaatgaaactgaaatattttatacataaaagaagcccattacagccattaggcccaattcgtgatctatcatctactcaatctctaaccctaatatctccaatcttcatctccgtcgatctccattgatctctaacactaaaattctactactcttcactttctacagcttaggaagagttctcgacaagctgattcttcgagttctcgacaagtttcagtgtttttgtttccgggtcacagagaacaaaggcaatttacaataatggcagagactaaacaaccactgatcggtcttaaatgggaaccaaagcttccaggcttatccttagacttgaaaactggttcaaccagaagcaaaacagctgagagttctaagtcagagcttgttgatggtctttgtcttccacctaatgatccaaggaagattaacaagatgattagaaaacaactcaaagacactactggttctaactggtaactcttctttatctcctctactcggattagtttgatccggcttgtgattaaattgtatttcttcaaactgtggataggtttgatatgcctgctccaacaatgactcctgagttgaaaagagatcttcagttgcttaaggtaatagattcttttgcttttgttgttgttttaggttccatagtccttacattattctaattgtatctttattgtagttgagaactgtaatggatcctgctctacactacaagaaatctgtgtcacggtctaaactagctgaaaaatatttccaggcaagtttcagaactagatcaaagagaataaccgtctctttcggtttctgtcttaacacaaacttttgttgtaaaaaaaaaaacagattggtacagtaattgaaccagctgaagagttttatgggagattgacaaagaagaatagaaaagcaactcttgctgatgagttggtttcagatcctaaaactgctctctacaggttagttactaccattgtctattaagaaacaatgtataggaaatgcttaaattctgtaagtattattgatagatgtaagtaaaataagtgtgtggtttatctattctatcaagaatttgtatttttgagaatttgtattcatatagcacatgtgcaatctttgttaagtgaatgtttttgtgttgattatggttttacaggaagcgtaaagttagggagattgaggagaagagtagagctgttacgaataagaaatggaataaaaagggaaaccagtctaagaacacaaagccaagaaggaactgaattatttttgttaagagtatgatcatagttttgggacacattttttctatttttaatagaatatggtcatagtattggatacactttcttgcggtgatataggttgtaatgactcttgttgtttatggcctttgtttaaaggattttgtgttattggttacacctttgataactgtaataactcttgttgtttatggtgcttatgttatgtatatccaaaaccaaaccttgtctagagctactaggtgggaaacttgtttcagcaagactgaaattgagtcctagtttacaccttttgcagaattgcagggtccaaccacgagagcatcgagttttatactttcaggtagcactcatagtacctccctgtttgagtcatctggcactgaccatgccacacatatttatgtcagcacagcaaaactttggtattcagcaagatctaaattatgtgactttcttcttttgaatcatagttgtaatgaggaggctaagagtattgctgcagctgcttcgagcaggggaaagattgaggtcagttgtttgaatttttgttttcgctcggcgttgttctatgatattatatcagctctttggaattaagaagatgaattgtgtgtgtaggatttaaatctatgtcaagttgaactgtttaagcttgctttttttttttttttgaatctgtgtattggctcggtgttgttagaatctaatttcttactaagtatctcgacaaagtcagtttcttggagagtgctgattacaggcagtttgagaaagagagagacgctagtttgagaagacacgatgagaccgactcctctaacgttcttctacatctgctgtaagtaatcttgttttctgttctgttagagaagtcttctttagtagactttgtagcattttctcaagtgatttggtcacattctttggcagtgtctaaaccgagtccccgttttcttgattgattcggatttatttcttatgtctctctcgagagagagttcaaaactgagaccatcctctctgaaggccatggccaatgaaatgggcttgcaatgcaacgtaagcccaacttgaatcccacgattctaattcgagccgatatctgaaacaacaattcatttgtgactgcaatctacaccaatctacaccttgttcttgtaaatcgtttgttttcttagtttctacctaatgaagctcatttggtctctatacaacataaatttcttcttttggttttgaaatctaaaacctgaagtaaagcttgattgatttggtttatggattgcaggggaaaaagtggctctctctttaacatttacaaaaaaaaaaaaaagtggctctctacagagttgatagtcgtaaacaagcaagctcgtgttaggttttttctattgttggatggttttgtatcaatgttctcaatattgttttactagataatgaagataacttttatattgtaaatatattaaattcattttgtaattattattttttggacaaatataaatgcatatataagtaaaaatgtgataacacgtttcattgagtgtatatttaaaatgtaattatgcaaaaaaaaaattaaaaaatatttaattagcaatttagaagtttaaacatcaattctgttttgagaaaatagtatagtttatagacatgtagtatagctaatgtttatttcacacatatgccaatttttagtaaataaatcgtgaagtgatcatcaccataaaatctgatggccgcaattcaaacccatgtaatcgaattttgtttctaagatagaatctaacacaaaataaattagtatacatacatgatatattaattttttttttgtaacatgatagattaattaatttaaagataagaaaccacacacataaattatttatagatttttaaaagtttcaatatttattacatagaaacccaaaaaatccatcataaaagcggttatcaggaggcgtgtaaaatttcacttgagcaaatttgttttggttgcagagatttttgcaagcaattctcacaaaaaggaagagttgccgttttagaatctttcatgcactgatttgggacacaatgtttaacacatacttctatcgtactcgcgtatgttgaaactatcatcgttaataaaactacaatcatcaaaacactatatatctttttcattgtttcagttgccattatttgaaaatatgagtttgtgaatgtttgaggtaataaaaatattgtttaggttatatagcaaaaaaaaattaacaagataattagtgttgagttggctttttgtagttttgtactttatatagcaaaagtatttttatccacttaaaattattgattttggaagtatatccgtttcttattaattaaaaagttagttttttttttgtttatgttattagctgtccaaacaatcttgcaatgttaaatcgtcatttaccaaaaaaattgccaaattttcaccattgtcaataataagtcaaatattttataatcttaattcaaaaactatcccctaaaacatgattatataaaaaaaaaatcgtattgatgggtcgagatatttagcattaacttataaaccaaaatgaatttacaggttgatttgatctatttaaatttattggattcataggttgacctaattaatttagctaaataatttatctaacactcaactaattaagacaatagatggtacccataatagattaaatttgagtaacttcaaaagtttctattcagttttttttcttacaatttttttgtggtattaattctaaagcattatcaataatattgtcacatttttaaaaatcttatttcagaaattatcccctaaaaaagattataaactagaaccttttttttgtattgatgggtagagatatgtaatcatttaacttacaaaccaaattgaatttacatgttgatttgatctatttaaatttgatggattcatgggttaacaacaacaagaaaaacaaaattagtttaatattataccacatgtcacgctctagtgagaatgttaagagtttatgtaataacactaacaaattttgtatatttttcctatactataaacatttttaatttttttttttgaatatattaacaacaacaaaattaatagaatgaggttaatagtttaatatattagcattttttatataagaagtaaattttatttatttttgaatatttaacaaaaacaaagtttaataaaattagtttaacagtttaaaatagcaataacaaaagtcgaacataaaaacaattttttttcttacttaatatatatatttcttttttcgataggattaagaacttttgtatttctatttttaaaaatattaacaaaattaagtttaacatcttaagttttaaaaatttggcaaatttttaaattacatatatttttattcttttgtttttgaaaatagggagtaatagttaatgtagttatagactatagagatgcattgtcaacaataaaacgccacgtcgcagcataattaaaatcttttgcacaaaaatgtggttggccttagccttggccctggaattaaaacattatccagaaaatcttacatttccaccaatccttcacttcctttcacgatccaaaacaaaacacaagaaaatgcaacaaaatcttctccatctctgaactcaaaaactcattcactgagaaaaatggagacccttctctcccctcgtgcgctctctcctcctctcaatcccaaacctttgtcccttcaccagaccaaacccacttcacattcattgtctctctcaaaacccaccaccttctccggtcctaaacacctctccacccggttcactaaaccggaatcaagaaactggttaatagatgcaaagcaaggactagctgctttagctttatctctaactctcactttctcacctgttggcactgctttagcctctgagttcaatatcctcaacgatggtccacctaaagaaacttacgtagtcgatgacgctggtgttcttagtcgagtgacgaagtcagatcttaagaagcttttgtctgatcttgaatacagaaagaaactgagactcaatttcatcactgtccgaaagctcaccgtgagttttttgttttcttatgaaattgattgtttttgtttaaccggaaattgatccggaaccggtttggtaaaatttggcagagtaaagcagatgcgtttgagtatgcagaccaggttttggaaaaatggtatccttctattgaagaaggtaacaataagggtattgttgttttgataacaagtcagaaggaaggagctattactggtggtcctgcttttattgaagctgttggtgaaaacattcttgatgctaccgtctccgaaaatcttcccggtatggttctattactctagtttagtatatatatagtgtacttttggaattttgatgcatcatctagtgcccaagacaaaaacaaaactagaggtttggttttgattaggatttttcggtttataaacaatagtaaccaaagtagaacctattctagtgtccatcgtttggaatggtttcggttttggtttggtttcggtctaattttcaagtagaattttgggactggctgtttctaatttctctttgtttttttttttttgtatatagagaaaatgaatccattaaattttaacattttcttttatatccaatctttattttgcatactaagttgaaaacatattttttaacaaatttagttttaacttttaagaaggagcatattgtaccaacataagttttcagctgtaatgttagaaatcaactatgttaagtttgagttggtattgattagtttttgaatgtatgatggtgcagtactagcaacggacgaaaaatacaacgaggcggtatatagcagtgcgaaaaggttggttgcagctatagacggtcaaccagatcccgggggtccaaccgtaaaggatagcaagagagaatcaaatttcaagacgaaagaagaaaccgatgagaagcgaggacagttcagtcttgtcgttggaggattacttgtaattgcctttgtagttcccatggcacaatactttgcttatgtctccaggaagtaagtaagtaaactcggttcactctcgtaaaccaaaccgatcaggtcagaactttgatttacctcggttatttggttatggtttcttggtaaattggtttatttgaacaatataagtaaataataacagaaaactaaagaatgaatgaaaccatccgattgtaacggcattgtttaaaatttcaaggttagaaaaaatggcatttgatctgaaaacggtggatcggaatattttccggttaagatttgagatgagacgaactcgtttgcggcttcggtataatgaattccatcccagtttatgtactcggaactatcgttgcaagctttggctgttactgatatcccatctaagactttagtttggccacatgtaatgcgactatcgtaatttaatggcgcccctccgactccacaacacgccattaacggtttttcgaagcctaaaacattcaaaattttgttataaccaacattctcaagatggttaagatcgataagtggtttagtgaaatgcttaccaaatcgggaataattagcgatgagattagatttaatagagaagatgtcaacgtaagtaacatttgcatcagggtattgagcttgaaatttgttggacatagcatggagttgaagattgaaaagcttagctgcttggttatgggaactaacgcaaccaaactcatcaagttttgttgaatctgtcccaaacttggcaatattttgagctaaacatcctaaaggccctgtgttgtgtatccaaatgtttctgcctccttcctcataaagcctctgccaaagtaaatttctcatttgcatgagaccactccgatttatccaaataaacgcccttggcgaaaacaaaagcgagaaatattgatataccttgaggccagcttcaaaagtttcaagaatggaaggaatagaggcaagaacttggtcaagagtcttggagtagaaggcaccagctatatcattttggcctatgtcaatcatgtataatccttttgaataataatcaattggtggtaagtacttttcatatttccttcctgaaaaatcatcaaacaaaccattgcttcatttctacatcatataacattatacgcaatcacatctcaccaacaattttttttaaaattagtcccacctgttttagaaagtaattcaatggccctagatttgaaccggatgaattgagagatttgaagatcaaaggagaaaggagagaccgaggtcgggtttgcgggaagaattgtggatcctgctgctgcaaagttacacccttttttgaaatttggtaaacctaatgaatccaaatatggatttaaaaatggcaggtccatttcatccactgcacaacacaaaacacatatcaaaaacaatttctttgaattgaaggaaccatttcaatgagaggaacaacatcagtttgtatatatacatagaaaatctacaataagacggccgtcacaatatcttcctgaaggaaggttgaagtaagtctggccatagggaggattaacattttcaatcccggcagatatgagattgcccgtgtcggaattcgagtctccaaagttgatgattgccggatattttaggattatggagaaagatgagggcaagaacaaggagattaagatgaagagaacaatggagagattgtttacaattggagccattgagttggaaacaaacaataaagccactatgagattgtttatctactcgctaaaatgagtatcaaactgaaaaaagcaaaatataaagtgtctacaacaaccatgacaaactttcattagtaattaatctaaaaactagtataaaacaagcaagcgaaaagaaaactgattacgtatcaaatggagaccactctcagattgtttttttggtcactaaaacaaactaaagaaaataatatttaatttataaatatatagtaaaaatactattagactactatttaatcaatataattagcttaataccacgtacctagctattaaatagatttactgtaattgtaattctacaattctaagaattcatttaatagaaacatacaaaaatatacaaacttagtaatcggattaataattattttctcaattacaatcacatatttgtaattgtttgcactattaaaaccgcattttgttatatttagaacatgaatttttaattgaacggagatatatcagactcagaaatgtatgaaataatgttgcttcgagaatgctccgaggttgcttcgtgaggaatatttatcgagattatttttttctttaaagggatgattagtttggttccgaacgaagaaaacccgttagtgtccttgcgctttcaattttaatgagagttatgattttttttatttttttttcatgttaatgttttggggattgcaatttctatgataaatatcatgtaattaacaaaaattaaatatcaattcatgtagcaacggacgaaaaatacaacgaggcggtatatagcagtgcgaaaaggttggttgcagctatagacggtcaaccagatcccgggggtccaaccgtaaaggattaagaattagatattatctttaactataaaaaatcgaattcaaaataatctaggattgatatgttctattctatctagccttctatttttggtcggctctatttagctttcaatatttagtaaactcaatatgtatctattgattatataaaagagtgtgtttcaatagattgtagatgaataaaatagttagtgaacattattagtgtaagaagataatagaaattgaacaaaaaaaaacttacttagaaaatctataacaagacgtccatcgcagaatctttgggatgaagttttgaaggaattttgtccgttaggaaggtctagacgaatgccaaggccagcaacaagatcaccggtatcagaattggaatctccgaaattaaaagcagacggataattgaaatcgatggagtttgaaatctgtaaagaactgataaaaaataggatcacatagaagagtttcatcttagttatattcatgaactctcgctatgttgtttaaatttgcttttgagatttataatttctgtttttcgatgtctttttaaatgtggtgatgctttaaattgtggaaagaggaaaacactatacaagcaagattgttgctttgaatctcgcttgcaagtcttactatctctgtgtatttttatatgatgactcacataaacacatttgatacttaaaatggtttttccacccttatattaacctttgatgatttgcccgagtgagattttctttcttgataaatgtacatatgcaacatcttgaaagcataggaaacgacaacgtctatcgtccgctaaggttatttgctctattattaaggctattaattatggactttaggaggggactgaaagaatatcgcttatgatttccatgtgattggggtgtggaacaggaagagaaataaaagaaaaagtggaaatttgaaagagaagtgaacattagggaaataaaaagaatcatggctcaaagtttataagtgtagaaagaaaaaaagtgtttatgtgtttatcaccgagaattctctcaatcttttttttgtgaatcagatttttctcaccttttttttttgtttttttcttttctttctgtctgatgaagagaaaagagttaaatatatagagtccaacggttccggcgtacatttgcaacattacatttaataaattaaccataatctcaatagttgcaatggttagagagtaaccgcttataacacttaaatctccaacatgttttgcttgcagtttgtggcactaattgttataagagttagctctctcagtagcaccaaactggtaagtgagtttctgatacaagtgttgttatataaaaatccaatgtgattgatcgttggggatgatttaacaaagagaatgatcagttctgagaagagcatttaaactttccgttaagtggagtgatgaagatgatttattggtgtaaagacaaatgttacgttgctatctattttggggaataatgtaactttttttaccgtgctatctttactatgtagacgtatataatttctgtcaaacatcttacttcgattttccataactctgttgttacactttcaagagatcatctataactctttcaagagatctaccaagttattcaaaggtaggaaatgcctacaatgtgaaacttaaaaatttaacatattccctcttatttagaggtctagttttgattttcatgtgaggagaacgatttagtgtataatggttttaacttactctgtgttagttaacacatatttatgagtaaattaaatatcaaatgttggaagttgctaagcatattggcctcatttactttgctagaaagttaatactctacatgttttcactataaacccttatcatcatgcatattgctgacaatgttattttagtttttatgaaattaaaataatatgtgaaatagtgaattctgtcaactaaaaattatttcagtcaaaaaataaaaattataaataaaaattaattcgaaaaacaaatatgagcatattattaatgtaatttttagcctaaatggcaaatttttccctacacaaattagctcattatttttcttaacattaaaattatttgtctaaaacctgcattcttctaatagagtgaaacggttttgggtttaagacatgtgagattgaacaaacaagacgttgacttgtgagtagaaggaacatgtgaacttatatggaccatgtgaccttcaactacaatcattggaatgttaaactactgtcttctcttatttggcatctaaattttgtttttattactctctaaacaaaaacgaattaacaagatttctgcacaaaaatgtatgcattttgttttacgtacaatcatctaattcgaaacatatggggtgaaattttttactttttaaagacaacaaaccaatcaatcacacgtgaatattgccagaagagatatacacttggagaggataatgaaccattaggtgtccccaagtactaaactagacctctacggtgccaaagaaaggttccggagttatgagtggtcacctctcctacctctttgaaagacatgtatatcgctttaactccttaattattgattcttgtgtgtaagggcaggcaacctatgcaaatagacaaattcatatttttcatcgtgatcatagtaaatactacaattttttttttttttttttttttggtaaaatattacaaatttagcaaaagacatgcaaagattaaagacgctatgataagaaagaaaactaatcggatatataactaaaaagacgttgaaaatggcaaatatcaatcatcaatccaaataatattcatatacctttcatctatgaactaaggttttttaactaatatatatatatatataccgtatgattacactgtcaaactaaagtataaaatgcaacaatagaaaatatgagaaataaaataaaatatattaattatttgcttttcaactactttaatatcttaatttaccatgagaaagaaatgaaaatatgagtcgaaataaaaaaagaaaagaataagtagtttgagaacaattttttaaaaaagggtaaaagactagaacatatagtcaattgatcatctacacatgttgttgttagaagaaaaaaaccaaaagaccaaaaatccaaaaaggaatttctcttcacattatgtgtatggccataaataaaaacttatctatctatctcgcgggaggaaaacaaactgctcgtgttggtgcttttgtaattcgtcttttcttatgtattatctttaagaaaagtcttttgcattgtgcacctacacaacattccgttttactaaaagttaatataccaaattgcaaataattcagctccagtttactcttgtttatttagtttgattttgggtgcatttgatatctttttcatcgaacttatgtaaattttctctaataatcgtaaactttttctaataatcgtaaatttattatcgtcaaatattccaatttgttattgaaatgttttcgtaatatacctcaatttcaaatttaaatattttattttaattttaaaattgcgtaaccgtaattttaattttaaacttgctcaccctaagatgggttttattttctcccgaatttaatatttaatttactaaaaatgatatgataagcctttatgtatgtaaactttttttcttaccattttttttaatacttccattgctctttttttctgacgtcttctttaatttattctactctatacatatctgccatatatgtgtatatagagagaaatatacttcaattcgtttccaaacctatactctcctctctcacaaaaatgaacaacaccaaaatggaaaacaaaagccatagcaaccaccaccggtaccatcatctatcatcccggagccacgagcaaaaccagcgtggcctaatttcgataaatgccataatcatcattggcatctccattatctccatattcataatccttgcaattctcctaataatcattttacttcatcgacttaaatccgcaagagtcaaagcacaagaattatcttgcaaagaaagcttcaacaacatgaacaatggtggagcttccaccaactacagctacacttctagccctggtaaaacacctaaacattcattccataattttgtaaagaatcataagtttttaattcaaaatcaatcagcaatgagtggagattctcatatctttatatcagtattgaattacttccacatccaatgtgtatttcttattcgaactttaatgttcttgttagatgacatcaagagagattgtctatactcaagaaacccaacatcgttcagacaattacccccacagacaaaaagttgtaggagaagccgagccgaaggagtagaagtgtacacatacaaggaattagagattgcaacaaataatttcagcgaggagaagaaaatcggaaatggagatgtgtacaaaggagtactaagtgatggaactgttgcggccattaaaaagcttcatatgtttaatgataatgctagtaaccaaaagcatgaagaacggtcctttaggcttgaggttagtcgtgcccacttcatttattgtccattttttcttatctactcttggtgtgcttatttattgtttccatgttatcaacacatgaatttaatatattagtcataaagaatatctaaattgaaattttgaataaaataccgttgcattgaaacttttgaaactttgaaatgtattatagttagttactccatgtaggtgactcacgagacaccggattagacatacctctcctctacaattataaatatgatcacttgtgatattttagtaaaacaatttctacaaagaaaaatccttcaaatgatattttcaagtttatgttcaatttgcaaaaatattgtatgtttaatccacaatataattagccgccactacattaagtttgttaaattatgataaatcatatattaaattaaaaaaattgtgacgaggagtacccatttgcttttaaaattttaaaactctaatgtctgtgactgtaatgttttaaaaaaaaaatacatatgagtattatattacagataaaattctgttttacagatttgattatttttgtaattttgatgtaaactttaattcggatataaatatatatatttaatagacaatggagtagtttgtgttttgaaaaacatatcttaaaagtgttagctcaaaatacatttatcctttcttgggattatacaatatatatgttgaccaatagaattgtttttgaagattcctctaattgacatgcccctttcagaatgtgctgggatttttttttctttggcattcatgtgctaaaatttataaaaatctaatcattgcacacatattttggtccgtgtttgtttctgtatatattttagtagagaaaaagaaagcaacctttgccaaaaaaaaaaaaaaaagtaccaacggcaacaaaaaaaaaaaagtaccaaactaagtggatttgtttattaattatttaattagtagtaactaaaaagtctatcatgaatacgctatcatgaatacatattagtattcatgaatacatactacatactagtataagtattcatgattgactttttcgttttttttcttctctttatttatcattaagaaacgaaaaagtcaattatgaatacactagtatttgtttctcataagtacagtaaatacatacaatcttttgcacatcattttgtgtgataccattaagtttgtccatacataagcgaatataatcttttaatgtgcaggttgatcttcttagtcgattacaatgcccatatttggtggaattacttggatattgtgcagatcaaaaccataggatcctgatatatgaatttatgcctaatggtactgtggaacatcatctccacgatcataattttaagaatctaaaggatcgacctcaaccattagattggggagctcggcttaggatcgcccttgattgcgccagagccctagagtttcttcatgagaatacaatctctactgttatccaccggaacttcaagtgtaccaacattttgttggatcaaaataatcgagctaaagtttcagatttcggattagccaaaaccggatccgataaactaaacggtgagatttcaacaagggttattggcaccacaggatatcttgctccagagtaagtaacacttcacataattgtttcatatttttgcaaaacaattttttttacaaaatattagcaaagtgtgttgatccattagtggttgttgactatcaatagtgtgtcacttttgaatttaaaagatggattatgatcagtcaattgctcttaacataaccatttaaaaacttattgggattgagataggtatgcctctactggaaagcttactacaaaatcagatgtttatagttatggtattgtgttactacaactcttaacgggtcgcacaccgatcgattcaagacgtccacggggacaagatgtccttgtctcttgggtaagtataccgtaatttattttcagtaacatattatcaatttgaactactcaataaacctccacgagaacatgtgcacttgtctacacttgtttagaagtacttatatagctagtaattaattgtcaaactgtggtataaattttcaggctcttccaagactaaccaatagagagaaaattagtgaaatggtggatccaaccatgaaaggtcaatactcacaaaaagatcttattcaggtctgacttcattacttctttctatctttcctttgcaatgtggagtgttgggttttcccttagtacattcctatatgacaaagaaagaagcgtttaatgtggttaacttggaaacatagtggatgtggcttcgcaaccaatagactatctacctttgttgtttgatccaccacaacatttatataaccattgaactactaatgtgtggatgacatacgctatcgagaggaaatttgtatatgggcaagagttgtgaatatattttatgaaacaggtagcagccatagcagcagtgtgtgtgcaaccagaagcaagttatagaccgttgatgacggatgttgttcactcgctcattccccttgttaaagctttcaacaaaagtactgattcttctcggtttcctagccgtagagaaagcttgtcatttgatgatattatgccatgacactcttttgtttaatatgtattaatttctctcttttaagttgagattctcgttgttattgtatatttgtataggtaaatgaatccatttatcttgtactataacttatattagtgttgtttaattgcctagaagtcactcattctaagtccaccaatattcgtataaaatattcacaagacttaatgtcttcatccttcaatatatcgagaagtccatgaatctcagactactaggccaattcgttgtgggcctcgtggcccagtaataataattattaaaaaagtataaagggagctaagctaaaatgatttttttaatagattcgaaaatagaaagtaagcattaccttttaaaaaccttctcctacgaaacgccatctgtcttctaactcctttttattaagtttcttaaagaaggttaaagaaaaaccctataaaataaatatcccaacgaaggcgataaaacccagattttccagatcttaaattctctcctcccccaattccatcttcgcaaattctccagattcttccgtcaatctttgaggtaatcaattttctcttaaatttcccaacattttttctgggtttatttcataatcaaagcttttgtcttcaatttatttgttatcgagggctaaaaaaactttgatttatgatcgtttctcttgttttgatgaaatgtatttttattttgttaatttcactacttttgcattcttttgtctgatttttatcttgtctgattattgttttgtctgatttttatcttgtctgattattgttaatgtgtttaagttgtgttttttttttgttttcaatatgaaacttataaattcattagtgtttttgatgatagaattaaaattaaaaactttgaaaaatgtttctcttagtttggtagagaaatggatcaacaaggacaatcatcagctatgaactatggttcaaacccatatcaaaccaacgccatgaccactacaccaaccggttcagaccatccagcttaccatcagatccaccagcaacaacaacaacagctcactcaacagcttcaatctttctgggagactcaattcaaagagattgagaaaaccactgatttcaagaaccatagccttccattggcaagaatcaagaaaatcatgaaagctgatgaagatgtgcgtatgatctcggccgaggcgcctgttgtgttcgccagggcctgcgagatgtttattctggagcttacgttaaggtcttggaaccatactgaggagaacaagagaaggacgttgcagaagaatgatatcgcggctgcggtgactagaactgatatttttgattttcttgtggatattgttcctcgggaggatcttcgtgatgaagtcttgggtggtgttggtgctgaagctgctacagctgcgggttatccgtatggatacttgcctcctggaacagctccaattgggaacccgggaatggttatgggtaacccgggcgcgtatccgccgaacccgtatatgggtcagccaatgtggcaacaaccaggacctgagcagcaggatcctgacaattagcttggcctaataaactgtgagttcttggtttagatttgtgctttatcgttacatggacacaaaacttgatttgattgttcttgtttgttttccgcagagccgtctaattcgaagctctccccggtggatctactcaagaagaagaatgttaatagaaaactattgcgacataaaaagtttggtgtagtagaataatttctgttttatgatccatggatttatctattgttattcagtttggtttatcttgtcatcaaactgttttcggtcaatgtaacaaattcataaactgagaattgaacttacaaaaggctagattactacttataaagttcaaagctacagtgatattgtaaactaaccagtccttacacatagttttcaaaatggcttagctcgagtttaaatagtccgtacttatccctacccataaccaaaaccaaaaaccgacgcttcctatatcactaccaaacgtttacacagtttgtttctgcaagtttttcattacgactccttcaagaattccatctgttccaaagttgccagaaaactcgtgtggatggacaggaccggggaggcggaacgagacagaaaagttaccgggagggcagagactccgcgtttgcatttcaaacacatgagaataccgtttaactcgcttcccgcctgttgtagtgactcctctaactagtaccttcccattgtcttctacttcacagctaaaatatcctgcaatatctcacactcatcaaatcaagaaactggtttagtgggatgagagatcttctagataaagcaaaaagtaactcactttcatctcttttcacaccaggaagcgatacacggaagagataagcgtcatcacattcaccaatgtccatcagtcccaccattagtccaccatgagcttcagatttcacctcaggttttgcagcaacatcactttcttcaccgctagtgcaagtacccgcattatcctctttcacaggttccacgctctcatcaatctcaaccttaacctcattagctgcaacaacgccgttacttttagttacatcaacactaaggctcaaagcaaagctatccaatcccgtaagccgcttaaaccgcgcaacacattcttctctcatacaagaagtatctggatcattaatgaacacaatgctccggataaacttaaacttatgcctaacatgggtttcagggtgcaattttcgcggaaaaagatccacgaaaagagggtaatccctgttcgaatcattgcgtttcgcattgaaatattcacgtaactttttcggcttcatgactagagacggatcaacatttctaataatgtgataatacacacgttctagctcagctctcttcataagtgagccacttaactcatctaccacaacattcttcaacgcttgaatctgaaaagctgattgctttggacgatgatgttgttttcttaaatctggtccaaagtaagttcctatgatgaaatgtaagagaaacaacttgtcttcttcaatatccaatgaaattaacacactttcttcttgttcttgagagttttcagctactaaaggagacacgatctcaggcattgtatcactcatatcctaaacacacaacacaacatcaaaagtttgattctttatgagtgtttatacaaaaagattgaaactttaatagaaaatttgaaaaatactggacatgcaataagaaattataaccaaattggataaaaattggacacatttcgtatcaaaatgggtgggaaaaaacgaaactttttaaggagatttaagaaattgaagcaaatagaaacataatttgttgataaataaacgaaattgagataaaatgttactaaccaggagtgtaaatttagggttgctgcttagtgaatttcgttgtctctcatcagagaaacagaaagcgacttgggaaaaaaactcaagacatggcaagaagagggtaaaaatggtattctttcggcactgatttgtccacgtggcgattataccaaatgtacatcttaaagaaaattaagagaaaaaaaaaaaaaaatcaacaaagcttctcggagatttttgccggcgacttctgaaacatcgtctccgatgaggtaaagtaactaatttttctcaaaaattcgtcagttttgtttctactcttgctcttatataacccaagtttgtgtattttcgtttgattctgtgaaagatttaatttttctttatgggttttgtacattttcactgattgaaattaggttacttttggctaaaagtctgaaactttgatgaaatacttgtgtgccaaacttattttcaggtttaaaacttaaacttatgtctaagatagtataatattcattacttggctaaacccttgcttacaaaattgggtcagactcatgtgtgtatctaacattgttgtgtaagaccttttcgataacataaaagaggacaaatgatgaatgttgcctcttcgtttgtctaatttgtggtcatgaaagtataagaagtttccgtttgtatgaatattcgtaagcattaatagtggttatacatcacaagacttagcttgcttattggatcttaaccaatatagttcaatctcttgctctcttactgattctagaatctagctacctctatagccttataatgtttcaaagattaagcctttttagtccgctgctgttttaaagaatcgttgtagtttcgtgagtgattctgttatatagcgaatctgagtcaagtgtatgataaaaggaattgttgtgcttcaggtcttcaagtggtctaaatgggatgagggaaaacaacagttttccggataacacaaggaacccacaaattcttgaagtgactccattgaacagtatgccttacattggtccagtaactcatgcatccatgtcgagtaacaggatgaatgatagtgtagagaaagtaggagggcctgcgatgatatttctgccttctgactcaagttcagagttttctaaccttatcagtcaaacgaaaaccggagttgctctcacgggaagtgctgcaatggggaagattggactaacgattgggttggttgatattgctgaatccgaagactcatattactttcgtgttgcattgcctggtgtttcaagggatgagagtaagtcttaccacctttccatatctttgtgaagtttccaaatgacatgccaaattatcatttctaaagctagttaaagatatttgttcattcagagcaaatattatttgcacatagatttgagaagtttcagccttgtgttataagtgtgtttactcaattatttccttgcacacggtttataagcgtgtttatgaggtgctttgagctttgtttcgtgtgcttttacttgtcttctgctgaatctgacttgttaaatatgcagaggaattcagctgcgaaatagaaccagacggtaagattatgataaagggagcaacaacgacgggggagcagacagtttgcaaacacaatcagatcttcaaaatgctaacacagaacttatgcccaccaggccacttcaccatcaactttcagcttcctggtcctgtgagcaatgaagaatttaacggtaattttgggtcagatggtgtacttgaaggcgtagtgaagaaggtgtactacgaagactgaacagaaacaacaaatggagatggatttgttgagttttaaagtaagctagaatcactgcagcttaagtaggattttctttttgttggaagctacattgtcatcacaaagattgttgattagtttatgttactttgtaaaaacttaactatttgatacttgatatgcctgatgaaaaaagaattggagatgatatggtaagggaattatgataggaaatcaattacctaaaattcaagaactcaaatctttattttgtaaaaatcaacttccacaatacctactacatttgtctactcaattacttaacttctacaagtaatcatatagctaaaaaagcaacaaggaaaatttctatgccttcacaataacactataacttaacttccatacgttattcacctcacctaatattatttatagtttcatgattcaacacatctgtagattaatattctttgaattagtggcataacttatgccctctagggcccttcaccatctgtttccagcttcacttttgttagcaacgaagatgctaggggtaaattcgggtcagatggtataccttagggtatagtgaagaagcttaactatgaagaccgaacagcacaaccgattgagatggatttgttgagttcaatacagtaagctaggatcattgcagcttatgtagtattttcttttttcttgtaagttaagatggtgaaagattgtttattggtttatgctttttcataaaaagttacttgatacgaaatatgcatgaccaaaatattaataattataataaaagtggattattgaaaaaacgttttacgtgatcacagcgtttattctaccataattttgttaaaataactgaatctatagtaacgacttttctgttgaatagtatataatattctataaataaaaacaataaagaaataaagagagacgagagaatttgagtgaaataaacttcacttatttgacttatatcttacaatgagcaaacgaacgtatttatagtagaaatttacgtggaaacaagtcgtaattggataaggagataaacactaaattatttggggaataagtaataatggataatcaccaaaagtattatctactctaatattttcctatttattggtgagttgtttccacatctctatattttaaaaatatattcatataaacttgcggtcattatgatcatgatgtaaaatgtgtaaattcatagacatctcgtcacaaataccataaggtcatcaatcaactattcaaattcgatcatgaatacagtttcatatctctagaggattgaaatacataaaatatgacttaaaacttacattcactcccaaaccataatcagatttttttttttaattttggattattataactaatgtcttctacgtcccacactaacttctgttgtacttcttaatttagttatgatgtgttttttttactattcgttaaaaacaaagggtaaaagatacaaaagagtcttcacacaaaaacacaacaatcactagctcagaagagcacaaggcaactaaacaacaaccccattagccctaaaccagccattactctcacagacgtcgccttgccagcagcaacaccagctgtaaagcttccacctggagtacttgtcgtcaatacaaccaccatccactctttctccgacccaacaccagccccgacatacctcgaatcattaagataccgagcataaccagtttgggtgtaattagttaaagccaaagtcgggatccggttagggatacagacaggtaagatcaatccgtcacgggtagtgtttgggtcgattttgcattcagagagaatgtcctggtagttcgtcagccgtggaggtaccgagccaggagtaaccgtgctcgctgtggtgtggtttgtgcatggctgatcttcgagcttgtcggcgatctcatcagccacacaatcagccttctcattcttggcaaatggaggaactctttgagcagttcggtagctgtttaggccttgaagaagattatcctcggcctctacaacattcaaaacacaaaaataatgatctatgaatgagaaaaattccatctacacgatttaaatgaacatgcatggggatgacattgtaaattccaatattatgagcttaaaagtaattaccaaagacctgaataaatgttattatacatatatttacaaaacgatcatcttgtaatcctttttttccggtgaaaccatcttgtaatctcaaaacacgtattacatatgtaaatatttattcaagaacgagttgtacaaatacataatgtaaatacactaagaaagagatagatagccaatacgtacggttggagacaacacaagtggaaatcaaggagaaaatgagaagatgaatgatgtagaaagagagagacatcttagtaatcaagaccattcttcttcacccaatttctgattcttatatattcttgctttctctggtaataaaagcagaattaagcgataggcaaaggcaaagagaatgtaattttgttggtcctgtactctatttgtttatagtatcttaaaggtctagaattagcttctcttgataagaatttgctaaagtgacaaacacttggcaccgaggaggtttcgttttgccaaaagacgacgtgtattaatgcacatcctcttcacgtgtcatgcatgcacaacaacaaattcgagttaaaatatatatgtatatatacatataaggtatagtttttttttattttcatataaggtatagttatccgattatatagtaaaattaaattttaattaataaatcttcttaacgaagaaatttgtcagtgtgtgaaggagacattgtgtttgtccatgtcatacggatcaccacaaatctggccacgtttaccaacacgtgtatcctcctccgaccatgtcatgttcctcaacctgccacatgtcagatcctatgttgagatatattgctacttcaatgtagcatgttgtatatatggccatgaatgtgttgtgtcgagtgttcacttcgtcaagagtcttatcatcaaacgttacgttctcgttttctcaaattccaaacaataccaagaaacctctacttgaaaagagaagattatcgccgcgtgtgtgcctaagagcgatggcgtctgagaaacaaaaacaacatgcacaacctggcaaagaacatgtcatggaatcaagcccacaattctctagctcagattaccaaccttccaacaagctt

SEQ ID NO: 93 - DNA, 87967 bp, Arabidopsis thaliana
aagcttgctgaggcattggtccgacgaagcgagaaagtgtgaaattgaattgggttttatattcttgtgatgcttgcagtctctgcaacttaatatccgaggtatcctagtagatgccaccgctttccagtctgttagattctccttgccagaaactctcaaagctctaaggttacagccacttcttgagtctgaggcaattcttctcatgaacagattcaaagtgactggaacttatttatctcagcctgattataatagtgccttgctatctccttcaccttcttttactttgcaaagcctgtctcttgtcctggacttgatatctgacaggcttatcatagctatcacaggttctcttcctcaacttgtcaaactggaccttgaagatcgtcctgaaaaagagccatttcccgacaatgacttgacttacactgggcttcaggctctcggtttttgtcagcaactcacaagcctctctctggttcgaacttgttacaaccgcaagatatcattcaagagaataaacgatatgggtatatttcttctctccgaggcttgcaagggtttagagtctgtgagactcggtgggttcccaaaagtcagcgacgctggttttgcgtcgctccttcactcatgtcggaacttgaaaaagtttgaagttcgaggtgccttcctgttgtctgatttggcatttcatgatgtcacagggtcttcctgttctcttcaagaggtcagactctcgacgtgccctctcataacaagtgaagctgtgaagaaactggggttgtgtggcaatcttgaggtgctcgacttgggcagctgcaaaagtatatcagattcttgcctcaactctgtttcagccctcagaaagttaacttctctgaatctcgctggagctgatgtaaccgatagtggcatgcttgcacttggtaagtcagatgttcccatcacgcaactgtctctccgcggctgtaggagagtcagtgacagaggaatatcctatctgttgaacaatgaaggaacaatcagcaaaacattgtcaacacttgatctcggtcatatgccaggaatctcagacagagccatccacacaatcacacactgttgcaaggctttaacagagctgagtatcaggagttgctttcacgtaacagattcttcgatagagtccctggctacatgggaaagacaagcagagggaggaagcaaacaattgaggaagctcaatgtccataactgtgtgagcttaactactggagcactgagatggttaagcaagccgtcttttgcgggtctgcattggctcggaatgggacaaacacgattcgcgggtcgaaaagagacggttacagctatgatttgtggacagaggccgtggctcacgttgtgcttcgatggatgtgagcttggatgctctgatggttgggaattccacacgccacaacgccactgaagaactcattgtctcactagttcatgtattgtataaaatcgttcagaaacatgattcagtaggatgtgtaattttatttaaaccttttaaaaaatttgattgtaaacttgtaaaagttaaactaattccaagaaatgtattattatctttacttgcattagtaacaagcataaagcaccaaaaccatgtgattcataatagttattaagttttaaccaaaacaattagtaaaggatatgaacgattaaagtgcctatatatattagcctgagcagatggcaacatacacttaaaatctggagcaaaaccaagccaactgctgaagattaatttgaattgtgattggttaagtggtcacattgattagttagttaattatgaataacaagatacccatttatttttatttattcacatacttacacattaacgacaaatgttacctgaattaacatcacgtgtcggtttcacaaaccaaacacccgaaaaccagagtcttgtcttctcctttacatatcttatggagttcctattaaaacattaattttctgttagttcgttacaatataattatagtcatctatattttttttctagcaattttctagtgtccttcaatatatacttggtccagtcacatctcttgaatattctacgaaaagtaaattaaaaaattcttatagtttgtatagtcaccttctttgtattgtatgttaagtaatcgaaaaggttgtagcagagagattcagtgtaatttgatgtaaacaactatataaccagaatatttagcaaagaaaattatttatatgatcacaaactttggatagtataaaaagagcaaaagtaaaaaaagtcaagaaaaaatagattgagattgatggatggaagtaaatagagagtgggtgtgtcgaagagagcatgagggattgcttctgtcagtaagcatatgaagtatttatatttcacctaaaaccctaaatccattttcttttcttttcttctaaattttattttttcagaaagtatattatccataaggccatggatgcttttctaaaataaaaaacttcttatatataaatttttttattcagatacaaacttaatttgttgggtgaagtttaggtttctatctacacgcaaaattgtctttcagcttatgacaacgtacgtcatcttcttcccatctttgttacatatttcaccgtcttgtcataagtaattatttgatgtttgatattcgagtgttattttgaatggtattatcgaccccctaatataatattatcactaatgtcttctcctatatcagcatatagttgactttatggatactaaatatgttgacaaaaaaaaaaaactgatataattttctcaacgaagtattttataattcataatgaagattaggagatacattggaacaagaattagtaaaatgagaagaaaaaaaacgaataaatatatagatgatacatgcaagttcacaattcatttaccatatgttatatatacagatgtatcgtggtgcatatatatggttgatcatgagaaggatcggatctaaatctgatcattgctttttgaattcagacataactagacgcgtgtatatgtgtaggtgtatagatatgtgtgcaatgttttaatcgtatgtgttaataaatcaataaatgtgttagggcaaagagtgaacagaagggtatgaaaaaagggtagatacgggaggcagcgagacacgagagacgagagagatacctatgaaccacgacttgtgtgtttgtgtttcattaataaaaaattactaacataactatatagtatcaagatcaaatagatcaacctttttcatttgttaaaatatactcctataacataagtctaaataagcacacccttttgttttatttttgacaactttgatgcttttgtttcatccgacaaatcggcaccttttagggttttcattacctgtttcttccccaaagacaaatcccttttttaccccattaatttactaactctcgatataattattaatcactttgattataaataaggtaatcgatcagtacctttcttggaactaacgaaaacccatcattttttaactcgacaatgaaaaagaattttcgggaaacaagaggaaaccagtggtggttgtttgattattcctctctaagattttatctgtcgacactaaccctaattatcaattaaattaacaaatgttttatttctcatttggcatccaaattgggtcatcttagatggtaaatcaactttatatatatatgatactaatgtttttaatttaatttggtcagacgcttttataggaattatgtacgtatatacagagaaaaagtctaagataattttcttttagttttgtaaaatatatattatgtttacttatatgattttttttcttactaagaaacagctaaatctaaaaacttaagaactaatttcctaaaatctttgtaagaaaatttaaccattattatttattaaatatgatgctgatgactgatgagtattgggttaacataagaatatgcaaataatataaaatataaacatccacagatgaaagtctggagagaaacaagaatttgtccaatgatcgcagagatcatcctctaaaccttagactagttagtgtatagctaaatacaaactcctattttaccatatcaatgaaaatcatcattgatataatttgacaataaatgaataacgtcttataaatcatctactcttagatacgtacggctcagtctttttggaatgtgattgtggcaaacgtaatgtacccaaccccaacattattactataagatttcttccaacatttgtgactcttgcctcttggttagggagttgtttccggacgatcttcatgatactatagcccataacatatctaacgattaatgtcaactcaaaaccaaacagctgatatacatatttggtttagagttttttggggacggatacggaataatgagtaaaacctcaattagacatgagtgaatagataaatttctttacttttcatatagtagtgttgacttattttgtttcatttgtcgaatcttaacacataatatccctcttgcacagcaaaacaaaacaaagatatcattttttccacattcatctcgaattgactttcattttttcatatttgacgagggaacttcacaatatttttttatcatctggattttgactaaatggcttgtaaaagctacaatgttccattttaatcgaaaactttataaaagaaaactaaagtataggcttgtgagacaaagaggacggtcacatatatattatcaccaagattacatatatataaattactaaaatatatagaaaaataaaagagcatgagaaagtggaatctctcaaaagatcgaagagacagattaacaactctctcgtgcaaattatattattaagccgcttgggtccaaaataaggccatttccacaaattttatggtctctttaaatttataactatgacgtgactaatttaaatcggacgatttcaatcaatttagttaataaaactcacctaacatcaaaacttatcatatcgtgtatcttaaaatacatttgaatcagatcagtggatgcatatatagaatatcaaatctgaaaatgtatctgatatagtagtggatcgactacttgaatcaaataaaataataaaagagacagaatgggattatatatgtcaaaacgatacacctaagattgagtttgacaaaaaaaatatagatattagtaaatattagtaggttaaaaacacaaaagattaggttgtctctttgtttgagcttcccaagaaacaaaaagacacacatcccaagaatccgccggcgtcgacaatcttcgccggagccatcgtcctcttccatcatctgcttaatcattttttgccctaacaccaaaaattatcgatctttttttttgtctactatatacctagatatataggtttttttgtccttctctttggatcatttccacgacgaaacggagaagaggggacgattttgccagccaagaaacaaagaattgttaaggaactgaagattataaccttctgaaggataatgaagtctaagaagaagcttagcttgagacaaagcaaagcttccaataggaacgttaacgaaaccaaacctcttcatcatctcttcccaaatctcaaacctccgatgtctttgctttctctccgtctcttccgccgccacaacatccaaaatctccttaccgaaccaccgttgctctagggttagtctctctcggctatttggcggcaacgtcgcttccaacgaatcaaagatcgccatgtaatgatccactgcctcagagaatctattcaagaacgagtgatctccatgattagcttctctctctgccattgtaacgattctagagtttaagctcttgatcgctgacaagaagtgaccgatcatatctccatcgtcgttaaatattttgtggaggaagtgaacacaattgacggcaatggtctctccttgtacggctgagagagctaacaatcggatctgtagcaaaagtccggcgagatcttcttctacgatcactagcgtgtgaaactggaattggagacctaaagagtcagcgaaccgggttaaccggtctccagttcggtttaatccggttacatctcgaccgcatccggttatgcggagagatggaggtggactgctagggtttgatgacctctctgctagggcttgcatcaatggaggccattgaagtccttgtgatatatctaaatcaagtatatgtagagctccgttatcgtttgtctccgtcgcgtcgaggatagcttggttcgccgttaaatgaccgaaccgaataaacggcgttagttggtttagccaaagatagtaacaagactcgaagtcagaattgttgttcttggttcgaaacaagaactgttctttgcatacactgctcgtgaacaccgtggagttactcatcgtcatttcgttcgtcgtccacgtggcaaccgtttcagccgtctgatcttgttgctgacggttgattcgtacggacaaggctttagtgaagaggtgtacaagtcgctcggtggagtcgccgtgaggagaagagttaagggagaggattgagagtaagttttgagcggcggtgaagtttgactgggagacgaaattcgcagcggtgaaaagaagacgacggaggtgatgtgaggcggaggttgcggccgaggaggaggcgatgcacaaaggaggaggattctcggtggtggtagcggtggcatcttcggaggaggagctagaggatttgaaggaagtaagcatttgaaaagatagaaaaagatgcttttggttcaaatgattctttttctctctcgatcaaatgagtctttttcaatggcaataataaatattattttcctttacctgaaggtatattgcttgtattattataatattatagataatccacactagctatagcatgtgtacacacatatatatataacatagttttatggatagagatgaagttggaccgaccaagcaattgaagggtccatgagaatcctcaagctggtttagggttaattatttttaaaagaaaagtttactataatcccacgtagcttaataacttttactgtcaaattctttttttttcataatctatctaatttttctaaatatttgaaatgattttagaaaagtgaatcattacattatattctaacaaattaaggcttaattatgtagtttaataatttatcattattatgtatttatgttgtaacgttacactctaaaaactaatgctattttggtttaaagtcggtaaatcctcgtgaattgatatcttagcagccaaggaatctttcatttacccatcgacgtgcaaatgatactaattaaataaaaattcactacaaaaatatacattaaaacagttctacatcagtcgtataatctatatttctgcattcacacgtcttcgtcgacaggatattatatataaatatatttgtgcggtggatcgtggagatggcccactttgctaattgattatggcatttgcaggaattatgcttataggttccaatattagatgcgtaaaatgggaattctcgttgagattctgatgccgaggatgccaatttacgagattaaagagaaacttaaagaatgagattttgcttactaagtaaaaaaaatagacaagtagtataatagatgaaggaatctgatcaaaatctcgggatgtacaaaaagaaaagagaagtagctttgcttgcaaaatcgaaaagctaagccccaaattgctaattattacactttttcacttattgaatttaccaaaatggtaatgctgcaaaaagatctctccttgacccttcaagtgaaaggattctctctatcactatatgtatgtatgtatgggagtgcctacaattagagagcatctataattggattggagcctttattgctcagtttctcgtctcttcttggactataaatacgaagcatcttatcgcatgataaatgcatttacatacctttttaatataaaatctttcatacatacttccatcaacgagaaagatgctttcaaatttcaagacttaaaccgtttggtggatctttgtttttggttaatgtaaccgtttggtgagttgttcaataagtagtaaaagtgtccctgaattatccattgataaattttgtttatagctatactcaaattcgaatccaaataccaaaacaatttttgtttaacgctagtgcgatcgaaagctagatatttagtgaaatttgcagtgcccttgctataaaggatttataattttctttttttgtcgtttacaaccggcaaaatagtatcattttaaaactcgatttataacacaagatccattcttaatttgtttgtgtggattgaattggcagagagattattttaaaagagatgagaaatcgtctgaagttggattcaaatcaaatcaacttaataaaaagactacacatatataagtaataaaaagaaaagagagtctacattaaatgaattataattaggagccggtagaagagtagtcgtcaataaggacaaaggagatggatgtgccttttagcctggataacacatagcgatcccatacgtattcgtttgcactaaaaattaagcactttactttgacaagtcctttcgattatgatatttataatttgacttaacattagcatcaatcatccacgtgaatcaatatagttgttgtttaacctttaacgtaacaagtaccatatatagaactttaactctaacaaaaataacatgtaccatagtccatagatgctttataaatttttctttttgggattttgctccaaatctagtttagtaatttttaagattttcagctgttaaacaaaattgtagtcaccaaaataaagttttatgaaatttaatacgtgttttcgatgaatatgactactactactactagtagataaagtaaaaatacatatgtttcaacttttaagtaagaaaaacaaagaattcaaatttactgctataatttagcatcaatattatacgaacactgatttttttatgagtaaacatcaaattgatttatcaaacaatcattaaaaggtaaaatgtaagaaaaaaaaagaataaaagaaagaaaggaagaatcaaaagaagcacgcaatgaaataaatgaaggaagggagaggcaggaagtttaacccaaaagattggacgaaaggctgacacacttttgcctttctcactttcgttttttttttcttttttcaaaacgattttttttgttgtgtgtgttataaataacatatttcgtgtttatttcactgccacgttggataggacatattggaatgtgacttttccttcctaccctcctcctcctctgccatttctataattattatcactcgtacgaacattctttctgttcctaatttttcaacttaaaacaaaaaaaaaagattaggttttatgttttgagaaagatacttgtagtttagattttatgcattgagaaagacacttgtagtttacatttcctttatttctcaacaaaacattcctaaccatttcattaataaaatcaactatactatactaaagaatatttgtaaggcaaaaactttgaacatcaatgagtttacaaatttatcattcaattaaaaaggtaaatgttggctagcgagccgtgaaaaaggaaacgaagaaagctttttttttttttttttttaccgtttcacataaatctgtgtagcacacgacaggcacgtgcacgtcaagatccttgtcagctctactcataagtctcaactctcacatatcaatattgtccctaacctatttggctatttgcatatagtttcccgtcaaattatttgatcatttctttttaaagcagatcacgctattgggtttatatccatttatttcgtaaacgattaatcttctgcaattcatgtatatatgattgaacattgtagtgtactatagtgtgaatatgatatcatacggtttcagctgttattggctatattttgtgatcatactttaagcctaatcgcagccctattttttccggcccatcaattattcatttagtacaaaatttatcttttcacacaccatttttttccccagttactaaactattttggtttcaataacatgcaatacatgagtttgaatttggattgtgatacaatcacaaactattgactatatgctcttatcaattatggttaatatcgtgaactaaaaaaatatcactaaattttgttcaaatcttatttaatttcaatccatttgaacagtaatattttggttgcaataattgtctttatatgtctcactccgataagaacctacgttttcgattatgtttcaatacttttaaattgtttaaaagagttggactgaagtttttttttttctctcgttatatctcatgcaattttggttttcaagaaatatcaaactttgataagttcttgtatctaatatttttacgctttatatgttttatgcatctaggtattcgccttgtacattgggtatttacagtaatatctcagatattgtaatcatctaattaattatgaaatgagttttcgttttgtccaaaagaaacatagagtatataattggtatcatgacaatttttgtaatgaattggaaattataaattacttggtacgacaagaaagaaaacgaatgcggtaaagttaaagaaaaaagtacacttcattaggtggcaaaacaaatatcattttctgcttatttcaaaagttgaaaaattgaaatataagactaaattacataagatttattaaaataaagtagaggaacgtagaaaaatgaattcaactaacaaggattagctgattcatcgtttagaagaagaagaagaaaaactcaaggaataaacatacatacatttcagttcatgtacatatgaataacaatatcgttttaagtcaaattaataacttgaatgaaataattaaaagacccaaaaaaacataatccgttcggttccaaattggtctcaacaaaagaaaaaccaaactctttttttttttttgtgataaataatttcaaagaaagcaaattaagctccggcataagggttaaccttaggcttgcccttgacaagaccacattgaaggcttgtctccggcatgttgtattcgtcccggagagatttttctggtgacaagacgcttgcgtacagttgctgtcccaagtagcgtctttctgcgttctccgacctaatgttccacattccacagttgtcgaatgtgagcaagattgcagcccaacacttggggtagacctggactgtgtgtcggctcactgcatctagaaggttgtagttcttcctcttctctggtgtccatgtccctggctcaacccttttgtacgatgaaagataattaaaattagggtttagagattggttactttttgtacaagcaaaatgatgtaaagtgtgttacttacgctacagcgaagaaggaatagccgtccaaatgccaagactggacactcctctcgtggttctcgaacacgacttcaatgaaggtgcggtgagtgatgttaagaacattgggttcgatcttgatgttcttgatctgatcaggatttgggttgtccgagatggtgtcgtacttgaaaaccttatcagcaacgccgaagtactcagcaagcttgagaggtgtctcagggtcggtgtgggagaccccgctcaacgcgtacctaagcttgccatcgacctttccctgagtgttcacgagcttgatggtgcgagtgatattaatttttccgtagtggtacgagccttgtgggttaggtctagcggcgctggctgtcaagttccacctgaaagatcggtactgattcaaagaccaagcccaaccaacgggggccgcaggtagctgagaagacgcaggacctttgcctccctcgtagcggagcaatcctgtggttgtcagaggtttcttcaagaaccttgtggaagcaatcatgtagtaatctttaggttcttggtctgccgtgacgattacaccaaaacactgaccgacatggacatcaagcgagtcatagtcgttttgtagaacatgtgagccttccatctcgacaagcttcattttgtggttctgaatcctgaagttaagagatgccttgagacccacgttacagatacgaactctgtatgttttccctggcttcaaagtgaaaagaggtttgtcagagccatcagttttcccggatttaccgttgatgagaatgccatcaggacgaccaatagtacgaccactgtcgaggaacttcttgagctgagtatggcttttggtgtaccagtcgttgataaggatagtgtagtcatcttcagggtcagcgtaaggaaccgggatcaatagacggctgttcacacgaaggccaccaaagccaccagcggcacgatgcatggctgtggtcgggtagtagaagtagctaccgatttgatcctttggctggaaatggtatgtaaagttctgacccggagggatcggacacattgttccagctgttccatcttgccagcagttcttcctgtgctggattccggccctatttataaattttccaaataaaaccccaattagaaaatattggtaccgttggacataatttcatatccaaccatatatggttgctcgtataaaattttaagaatggtcgtggaatatatcagatatgcgtaccaggtgatgaggaaaggctcgtcgaggttgttgaagacattaacgatgacgttgttgttagaagtcgagttgatgttaggaccagggaattgaccgttgatgaggatgacttgttgtggaacgccgagaggagatgcggttccgtacgtcacgttccacacgtggtggaagtaagggtcctccgcttggaccatcatgacggtcgccgtggccacgcaaaggcacacggccaaaagtttaacccctcccttcattaatagtaaactttattattagtaaagtttatgatttttcttttcaagtgttggaaaaaatgttttttttttctttttgttttattatgtgtttttttttgtttgaatttcgatttttttcttcaaatgttaaatgacattttatagcttaatcgaataaacagtttcctgatttttctcgtttctttaggtccctttcatcacgctcttcctgtcgtccatattaggaatattcaatttgacctctcgctatttttggtgaaactttttttctaaaaaaaaaatttctaagttttttttgagaattttgctaattttggagaatagttgttgagtctagtcatatattatacatgattcatgatactaactcgaacgactaaactttattttttcttatataaaccaatttggttatgatttgatctcatatcaaataattgacttgtacatcaaatgacttatagtagcacgatagtcaaatgatagaataaaaataaaatgatgggcttggaagattaatgacgtttcagtttttctataaatatttctgactcgtccattataacaacttcttttgcaaacatgaaaacatgagatatgtagaataataaaaagaaataacagataaaaacgtttaaagtgataccattgcgtatgcaataaagtttaagcgtttaaagatgatgcaattttcaattatatgcactcgaaaatagttatacaattgagtgacttattaaatttgacatgagaaagtacggaaattttagactaaaaattactacaaataaaccaagctatcgagacaaagaataatctcagaattagaatactccatcgcaaaatataattatcacaactatttctatattgggttagcatgtcaaagctaattcttatgacgtgagaaattcatttatcgagtttagagatactttttatttggtcatagttttgtcatgacatttattttcgggaaacattcttttgacgtagaaaccacatattaacatctttagtgacatttccaatattagaatacgatgtgagttgtattcattcaaagttctggaatcttaaaaccataaagagatacaggtagaaatctatttgttgtcaccatttttcttatatagaaaatgaattagagatgaagcgtaaaaattggtgacgttaccttatagaagaagttatgttttaccctaaataaatacttcaaatcacaaaggattcattaagagcaaaaactagttttgctttccttttttttttgtaggaaagggttaattatacgtaacacagaaacaaaaacaattctctttttcctctagaaaaagagattaaaaaaaaaatggaggggaggttattgacggtgttggtctgcctcgtctctacggtggcgatcgtgaacgccggtgatccttacttcttccatacatggaacgtgacttacggaactgcctcacctctcggtgttcctcaaaaggtgattctcatcaacggtcaattccctggtcctaaccttaactcaacctctaacaacaacgtcgtcatcaatgtcttcaaccacctagacgaacctttcctcttgacctggtactaatcaacattctttatttatattatgatcatctgttaaaaagcttgttgtcatggggtagtccggtctgtgatcctcattcttaagcttgagccagtcaattatttgtgctcaagccatagttggtccgcggttaatcttttatcggacttttcccatccggtccagctttgacgggattcaaggcaaagggttttccgcggaccgactttctagggtccgaccaggccaatctagctaggactttttttaaacccaagttaacattcttatgtgatatatgagtagtattaataagggattgtggatgcaggagtgggattcagcataggaagaactgctggcaagatggtgtggctggaacttcatgccccatcccagctggacagaactttacttaccatttccaacctaaggaccagattggttcctacttctattacccaaccacttctctccaccgctttgctggtggttttggtggtctccgtgtcaacagccgtctcctaattcccgttccttatgctgatcctgaagatgactacactgtccttctcggtgactggtacacagctggccacactgctctcaagaacttccttgacagtggacgcacccttggattgcctaacggtgttttgatcaatggaaagtctggaaaggttggaggaaagaacgagcctttgttcacaatgaagcctggaaagacttacaagtacaggctctgcaatgttgggttcaagtctacacttaacttcaggattcagaaccacaagatgaagctcgtggagatggaaggatcccatgttattcagaacgactatgactctctcgatgtccatgttggccagtgcttttcagttcttgtgactgctaaccaagcagctaaggattactacatggttgcatcgactaggttcctcaagaaggagttgagcaccgtgggtgtgatccggtatgagggaagcaacgttcaggcttcaactgagctacccaaggctcctgttggatgggcttggtctttgaaccagttcaggtctttcaggtggaaccttacctctaacgctgcaaggcctaacccccaaggctcataccattacggaaagatcaacattacccgtagcatcaagcttgtcaactctaaaagtgtggttgacggtaaagtccggtttggtttcaatggtgtatcacacgttgacaccgagactcctttgaagcttgctgagtacttccaaatgtcagagaaggttttcaagtacaatgtgatcaaggacgagcctgcagccaaaatcacagcattgactgtacaacctaatgttctcaacatcactttccgtacctttgtagagatcattttcgagaaccacgagaagaccatgcagtcatttcatttggatggctactccttcttcgctgtcgcgtaagctccttggtcctgtctctttctttctttcctttagcattctatcttctaacttttgtgttaatgttccatggactttgccagttctgagccagggaggtggacacctgaaaagagagagaactacaacttgctcgatgcggttagcagacacaccgtgcaagtctaccccaagtcttggtcagctatccttttgacattcgacaacgccggtatgtggaacatcaggtctgagaacttggagaggaaatacctaggcgagcaattgtatgtcagtgttctatcaccggagaaatcgctaagggacgagtacaacatccccctcaacacaaacctctgtggcatcgtcaagggcttgccattacctgcacactactcctaaatcaatattcaattaactactactctacaaagtggggtgcaatattaaattaactaattaaccctttcctaaattttaagtgtaatttgtaaaccccttctttcatatactatcattaaaccataatcatataccaagttttgctttcattacaacgtggatttgttggtaagggaagtaacacaaagtcacaaacaaacatttttaacaattaaattgcatagaattatctacagagatcccaagtagctgcatataattgagatataaagttatgaagatattgaggattgaagtgaaacaaaccagaacaaaagcaaaagagcacagagcacttcttgaccaataatctcatgaaaatgctcaagacctgacgatggaatgatgcagagaacctgtcagaaccggccattcatgtattcataaatcttaaaccctgaagacatatatagtagacatgccaacaaagcaatcaagaattaagtaggaagatgacattctaagttacatcagatattccataaactgtctctaaccttatttatccaataataaagaagattcacttctggaggggctgtgaccagatatacaaagccagtttcaacagattatggaatttcaggttagtgttctctccatcagagagttgatgtcacctaaagataaagaaacgacaagtggataaacagagagattattctaatgcatcaaccaaaaaaacaaacagacacgactaccacatttaaacccttgatgcttctggcatctgaaaatgaaaatctaagagatttctatgaaaacttaacaaatttgaaaatgatacatctctctcttcagaaccccttaacgttaaattaacagaagaatccaaattcaaatgcatatgtgaacagaggacaaaaagagctgacagcttcaaaaagcgctttcttctcttaattatcagagcaaaaaacctgaaaacaagaataaaagagtaatccatacgtaacaaccgcaaattgaggaattaaggaaattaaggtttatagagaagaagacgaacaatatggtagtgaatagctaacaaaagtccacaccggttactacacagtcaacttcgctctctccttatctcaccaaattgatgtttttaggttttactgctccatctgtctctttgcattttagtcttcgataggttttgttgccctatctttatgtgggggaacaactacggaaaactaattactcttcttgggcctatattaagctaattacataaaaattacagtggactatataagccccaaattgagtacagtatcttctctgaaaggatgatgatacgtattttgcattcaaatcaactttttaataattataaaacatatgtaacggagaccaattttctctaaaatgtcatgttaacattttgtttataacaaaaaaaaaaagacatgacaggtttaaacaaaactataattggattctactccaaaactgaatcattaaacactaaacaaaactaagttttattcaaaaagaatccatacttaatttctattgaaaaaaactaaacttgcatcttttggggatcacgatgacgaattggatctgttaatgtctttactttgttaacccgttgaagaagtcattaccaaagcccacatccataaaccctaatcccagaagaatacggaagcataaagcctgaagtttctgcatgaacgttggaccttttcctgcaacaacaacagaaaaagacagaatcttagaaaagcgtttgcgtttgtaaaaacatttcacgccagaacacaaacgtttacctctttctcccaaggtttcttgtgctctaagcaatggtggagctgcaccctcggcgaccgccaaacctcttggtttaagtgatcgatccaaacccaattccggtaacagctgtttgagatccggttcgcattctaacaacgggatcgtggctggtgaatctcgctcccaatccgcactgtaattattgactccaaaccattcattgtctatgtgctggctaaatccatcgttttctaaaattggaggataacgagactcatcatcatcctcatagccaggaattgggaatctggacaaaatctgatcctcttcttcagcagaacagagacattgcagctcaaacagttttttaagcatcagtgtagggttaaccactgtctcatttgttttagtctcttctataccttccagttcatttccagtgatcttctccgttgtaaaactctgtgttggtgacttctccaacgatctgtttaggttttctaggaaatgagtcgcaggaagttgagtcttgtcaagcacgtaactcctgttttcagattgcgaacgaagccaactgttaatccttgaaaactctgttccacctattttctgcatcacatctttctcgaagttactgatgttggagcgggactttgtcgcagaaccaggccccatctgcagcggttttggcttgtgttcagacactaccaacttaatgtcacattcagatatgtcctgactatacaccgttgcatcatctgctgtattttgacgcataatgctagtcgatttcgaaacgctcctgtctgatgagtcacatgcagaatcaaatctgttcttcttcttcttcaccggaagacacgcagattcagctcggacagatatcattgagttccttctagacttgaagcttgaagaattaggggttacgctaaaatctgctcctgataatcttctgttgctgctagctgttggtctcatgaagctaggaaaaacatctgaagcacgtcttgatttgtttcttggtttctttggagtcacatgaatcacttctctaaccacatccttttcttcttcttcaataacatgaggcttaccagtgagtttctccaacgtctcgtttagatttctcatctttcttaacgacatctcacgctcttgttcaatcttttccatcatcttctgcagattcatcatcacagcctcctttttcgcttgttcttcctaaacgtcaaaagaatctttaacccatcagaaagtgtaacacttttaagaaagttgatgagagtactatgcaagttagtaattccattaccgttgattcgtcctgccctaaatgaatattctttgccctcgttgcaaagtttaaagaacatatggtttcacatagatcatcctctttagggctgatatgaacaagcatcaacgtttttgagtcttgccctgaaacatcaataaccaaactttaataaagagaaacgtttttcaattaacaccaagatattcttacttaccgagagagtcttttagaacctgtgtgagcttgctgttcctgaagcacataaaaagaactcgaaagtgtcagagattgagatctatatcaagagttacaaaaagattgatatgtttacctgtaaggaatgtgagagttcttgcgttgaagagagttgatgacatctccaagagcagataaagagagattaatggctttgccttcatcaaaacgccgaccagtggctcttgttttcaacacgcgctcgcttcctccaagatccactagccaaatcttgtttgtttcacgccgtctctcaggagctccaagactagtgaccgatacacggatcatactgtttcatgattttcatgcatacatgagagatcaaagaacattatgtaatagaaaaagagatcaaaatatttgatttcttttaccagtgtgatctgctggaaacagagttagagttagtggaggcagttgctctgctacgacaacctactttgtataaccttaagatttcattaaagtcatccactttaagtttcaccaagttctcaatatctatctctccatttgggtctgtgtgaatagaaagactgaaacagagaaacaaaaactcattgagttatatagttcaaccgtttcaatgaagatctctgcacatgttatgacttatgagctagaattatatcattataccttggaggtattggagaaatgggtttagttgcttcagaaagaagcaagtctttaagatttcccatgtaaatctcaagcatactaaagtggattgtaaacatatgattactttcctcgacttgtttgaacaatcccttgatcgctcgaggaacgatacctggagagttcggaagaccctcctgcaaaaattgtacatccagtattgatatatagacttaaaagaaacaacaatgaaaccaaagagatgttttgattgattcttcttaccattgtataagtttttccagtaccggtttgcccgtatgcgaaaatgcaagcgttgtagccatcgataactgacttgattactggttcgatctctaagaaaacatcatctgcaagattttgaatactaatcaagaacactttcatgtatgcatgaccaatatgagaaactgtgtatcaacagagaaaatcaaagtcataccttgggatgaatcaggttggaaaactctgtcgaagttgtaggtttttctcttggtttctgataacttgatgatcacatttcttgtatccgaagcaaccggtggtctcaacttttcggtggctcccaagggtttgactcgacaaaacacacgaatgttccctgccaaatttgccaatctataaaattagactcttgaatataaatttacattagaaatcatagttttttttctaatgtattactaacctttaaggtccaagaactcattaagaatttgtcttctcagtttgttctgatcgttgacttgaacagttagtgcagagagctgatctgcaaaccaataacaagagaatcagagcaagaccaataagccacagagcataaataaatagcaataaataatttgtgaaactttttagtcaacattatctgaacagacatagattctcatatttaattctatattataatcctactgaaatcttgactacagataccttttcgaattaaatgttttctgtaatgcaactaatttaagtgcaaaaccaaaaaaattaagttaaacttatctgaataaagtgtttttttaacagaaacagagtgattttttcataaaagacaacatagagtagcaaaaactttcaaagagctgactacagtattgaacccacacatataaacgaataaccaaaccagccgttagatgactgacacgtcactcatacagtaccagaatagataatctaacggtcagtatgatttgcatgtagtaggtaatctccaccaaaggattttaattgtacacaagaagacaagaattttttatgcagaagaaaaaaagaaaatttatgaacaaacatccaaagaaatagaaaaatcttagaaaaaaaaaagagaattctcaaaggaaaagtgtacctctaatgctctgtaaatcgacagaaacaaagtcgtcttcttctttctttgacgttgaagaagtattcttggcgatgttgcatacagatttaacccaatcagaagtcatatgagatttcaaaccgagcaaagaatggattgtctcgggtagattccgaaccggtttcgatcttgttctctccatttatgctccgtcaaaaccaaatcttgaaatcttggttaaaaaacagagaaaacctcccaggaaacagagcaaatcactgaacttttgccgagaaagtgaggggaaagtggtgagattggggtcagagctcatcaatgacgagtttagagattaggttttttagagaggacagaaaaaactgaagagaatgttcttcaagatcaaaatctctgcaggtgcatagaactatagaatagaccctttatatacaaattttaaccttgaaggagagataattgtagctgattttaacacttgtcaatatcaccaaatgggaaactttttttttcaaattactataagttaaagaaattaattagtattcaccattttttagtgaaaacaatattgagaaaaaataatacttagtctgtgattggtaaaatgtttatatgatttttttctaaaatgattattttagagctaaatttagagattatgtaaatttaaacttttagacttaatatatataactttattcaaacagaaaattacaaaattagagatatcatatttttttctattttatagtttaccatatacaataatattaatagcgaagaccgaatattagtctgtattagcttacaaaagttattattaaaaggaaaagtgcgttactgataactgataccaaattttactctgtattagtttacaaaagttattatttaaaaaaaaaaagtacgttactatataaaacatatagatgtaaacaatatccctcggaattggttcttttaaattttaattaattttggttgacaaaaatacaataaaaataaaagatataaattattagtttgtattacaatctacaaaaaattattaaaaaagaaatgtatgttattagtatcaaatactgattattagtcaatgttgtaacttgcattaattattaaaacactatataggctgtcaaatgtgaattctagttcaatattgaagaaaaacgtttatgtcctactttctaattatcaatagtgtgacgactttttggagaaaaaatgtttgcatagaaattatcaaagtgaggttgaactagtggtttaacccacattaactgaaaacctaaacattcaaagaggcatgagttcgagtctctttgaaatcaataatttataaaaggttattacgactctaaaaaaatacgagcctaggtcatgaactttgtatttaaatacgagcctagattaaccaaaacataataattcaaatccaaataatgtcatagaccataacatgtagcatgatgcttttgtatttatattgttgtttcgtcactatccaaatttaaacacgcatttatttaatgaacgaatgttgttagaagaaaaatcatccagatatactttaacaaaagtagtggagttataattggttccaaagccaacgtctatcaaaagaagattgtaaactccaaaatgaaaaaaggagagagtactgatccaacgagaacgagtgacatattttaatttcagatttcattttccttacttttgttatcaatacaaaagaatcaatcaaatgtaacactcgtgataaaactcccatgtgacaacaacatgaagcataacacttcatgatgataatatataatacattgtcttatacatttttaagaattattagaaattacgaattagcatgttctctgcttttgaaatctcgcttaaaaatttacaaaataattttcttgatagttattttaacatgcaacatttggaaaatctacatgatcattggaaatgattaacattcatccaaaacgtatttaaatgttattgaatatattagttagagaaataatctaaatgttattgatttggatgtaaaacattttgctacctactataaaaaatgcctacgctacgcaatcaagtgatatcacaacatgttttcaaatactgaatactttggggttaaattaaatcgtataaatgcaatgagggttcacctgtcacgatggatccatcaaggataacgcaatctcacttgctatatcgtctgtggttagagtaaaagtctcttcaatgtctctttctcacaatctatcaaattttcatcagaaaacaaaaagaaaagtaagaaatagattttaaaacatgaaataaagaaaagataaaaagaaaaatcttcataaagaagaaaagataatgttaaatcaatattatcatgttttggagaaatacgccaacatagaccaatggatgaacagaagatttgttattttttcccaatataggtttgacccaaacatctatgtgactagtaatgtcaaataatttttatttcgcatggatagttgaacattgaatagtgtcactttccatatatatacataaatattcggaaagtacatttcgtaacattttatccaagaaattaaggatctcagttaaacaattgaaacaattacatgtttttggtaatatatatatccaaccaagtaccaaggtgaattttcatatacaagaagaaaattagaaaggtttcttccctaacagactttgaatttaaattcagcagctcttgcaaaaaaaagggttctgactggttatggaagttaaaactattagatgtttgtttcgaaaatatttttaaaattctatcagaagaaaatgaaatgggtgtgctgtgtgcatgaaggctatatattccacaagttgacactgaaaaaatatattttctgtttctgttgtttttctttcaaggttacttttgttgatttgtttaaaattaacatgtcagtcattctgggagttgtctctataaatttttctgtgatttgtcgattacttggaaaaccaatcaaaaattcggcacgtgaatatcttgccaacatagtctcacccggaaagacctttcgcagattcttcctcagaattcgacacatgagaattcatcatcaccagaatctcactggtcaagatattcttactccaaaattttagagcatgtatgctttccatagtgagaatttccgtcgtatctttcttattcgatgcatgcatcaacactgcaccaataacatatgactctgatattactcgttgggctggaaacattcaccacaatcttatcagtcagttttaaccttaaaaactcgataaatcaagaacacttgaatcggaaagcaaaaaaaaaaacagaactagaagaaactttcatgtattgttgtttgttttatcaaactcaaatcataatttgaatgtcttttgaatctgaattttgtggaactaaaacgttttagactttgatgcaactagaaaatataacaatgcatgcaaaacacttttacaagtttggtccctccatttgaacaactagaacaaaacttttaaagaaactctagaacacatttgattaatactaacaagcgtgggaagtaagaaactaatttgaggcatttgtacataccatattgtaataactccttagtgttgttatttgtctcactgcctgggattgttgttggtgaggaacagtgttgataatggcccattattaatgggtcgcaacttgcaagacatatgggtcttcactattaagactctgcaacattaaatacatttctcgtggggttcatcctaatatgcatattggtgtatgtatctgtgcctgcatgatttaatgaccagcaaaaaacagtaatggtcaaagtaaataacatgatgggagaaggtgaaaaaagagtttaaacctcggaagagttaatactggtaaaactctgggtctttcttcaacgttctcaattattacaactttacaagtactacaaacattttcgataaagacaacaatacacacacttcttcaagttatgtaacaatccacatttgaaagcaaaccttacaatatgtaacacatcaacgattttcacactataaatataaaactaaacttaccttcaatgtgttaacaaggacaggatccgagttctgatttgaagaaacatctgaagacaataactgtaaacagaagagagtactaagtaaaggagcagtagaaatcacagtagccaatgttcatgacatctaaatattagcaagaaagatgctcttaacgccagttgatttagataaattgaatagtcaactcataatgatacataaactcttacctctctgccaatgaacacgagtgcaacatcaacaggttgctgaagttttttctccgagcactaaacaatggagacaataaaatagatatgagaatgaaaccattgcattgtgtaaaaatatttgcttgcggactcaacgcgaacataccagaaaattagaccaacctcctagagtgaaaacagagtctactagatcctttgcagacatgacttgataatttacatccgtttcaccattagcatacctacaatttcatcaatgtggacatcaatataagcacaattccaacaaaagttctcaaactcttacaccaaaaccagagtacaataaaatttggtaaatttactcacataagccttgaaaatggtgaaaacaaggatcaacaaaaagataaaaagaggcaggcctaactggagatgcggagaccagaggaaagcaggaactgtggaaggtgaagctaatccaaaatccacgagagacgcaaactcaagaactaccaacaactacgccagtagagcagaggtaaaacgtcaccgtttgctataatttacccacaaaaccgatgtaggagaaccggtctgcgtttaacggttggattagctaagagaaccggtctgataatctcttgttaacggtctttgtagaggatgtgaactttatctaagtgtgttcaaaggcttcatattttgagactttatattttgattttcaacttggatacactagctagatgaaaacaatgatgatcctcttctctgccttttacgtgcgctttattattctgtgctagatgcaaagaacaatatcccctagcaatgaatcttttttaggatatacataagacagtacgtattgataataattaatggcaagcttcatcaaacagcaatgaagaaggtactcatccaatgcaaatcttgtcatccttgtatcgtcctttgtaggtgaatcatcattaggctgcagaacactgttttcacagagagcgtgttcagtttgatggactaaaactgaccttatattatatatcaagctcaatctgctggtctcacgaaaaactcgtctctctattgtacttaaacccttaccactaaatcccctgaatgtcttttactatttcttaactcttgaactactggaattcaatttgagctcatttcttattaccatgttcatttggagatacgatagagttagtttatcaactaaacaagatcacacgattgatcaactaaacaagaaatataaaaccaaaaagacaaagaaaaagagttgagatcggaaagaaggagaacgacgatcaagcctcacgatatttatgttccttcgagacctttggtataagcgaatcacatcttgtgcggcagaaatattgtaaatagtctgaatttcaaaataaattactatatatatatcacaatacatgtcggtctggtttagtaaagagaaccggtcgctgaatctggttcagctaaaagaaccggtctggtgtgtcagataagggccaattgggccattaacacattacggcccatataaatttaaattaacaaaccatgaaccgtcgtcggctcatcggaccagtgtggtatcaccggcacttgtaatcagagagactcactctcgagtttcgtcctctctacttcccgctcaaaatccttcggattcagccattgaaacaaccttgagaagagtttgaaagatgagcagagttgagattgaagaagatacggaaggagatcgcatctcaacgaacgattactacttcgagagaatcggcgaacctatcagtatcaaagaagatgatgctcaatacgatctcgaaaaccctccgtcacagcctctcgctatctcagaacgccacgccgtcctctttgtcgcacattcctccggttagttttcgtaatcggcgatggtagaggtttttgctctgtgctgtttatttactgtgaccgttttgtgtggaatattagggttttttgttgggaggactaatgatgtaatttctgcatcgaagaacagtaacgggaacggtgataaggtttttatccaggatttgagcctcgtcgatgttcctgttggggacgttcgtatattgtctctctcagcggatgattcgattctcgctgtcaccgttgctgctgatattcatttcttctctgtggattcacttcttaagaaggtacacgtctcagaagtagcagactagctggattgctttgttgattgatagtttacttacttaatctgttcctttgttgcaggatgcaaaaccttctttttcttattcacctgatgagtcaggcttcgttaaggattttcggtggagaaggaatgataagcattcttatcttgttctttcgaatactgggaagctctttcatggaattgataatgcaccccctagacatgttatggatgctgttgacgccggtttgtttcatctctattgctacttcttcagcaaaaaagcatgtttttggcaattatgtaagatcgactctgtaggaatttacttgtaaactttgttttgtttgtcagttgaatggagttcaaaagggagttatatcgctgtagctcaagataacagccttcggattttttcgtcaaaatttaatgagaagcggtgcatagcactatcatttgactcttggattggtgattccgatgaagactgtttcgtgaaaggtatgttgcaggttttggccttcttctttcttaccagtattttccgttttgtttcaaatttcattgttgttgtaaggtatttgagatcttttcttatggactgagtcatactgtattctggggcttggtcgtgatatatacaaactgatcctgttgaaatttctcgtttcctgctatctcccatcacacttccattacaaaggtcataaatggctctcaagttaagccctctcaatgaatgactgtttactaacaatactctgcaacagttgattctatcagatgggtacgcaacaactgtattcttcttggatgctttcagctgattgaaggcagggaagaaaattaccttgttcaggttatcaggagtccagatgggaagatttctgatgtgagtaacatttctattgcattgattttgctgctgaggcgtagatagttaggcataaccccttttcggatggaataaaacaataggatctgtaactttacttatatttttttaatctgatttgtgagtttttgaacttctttgcagggttcaaccaatctggttgctttatccttctccgatttgtttccatgttctatggatgatcttgtcccggtcggtgttggacctcatttactctttagctacatagaccaatggtacgtcaggctaattttactattctttctattctttttattttgatttctcttttcataaatactccacttttcttgctcgctgctagccatttgtcattctttcccactgtatatggaatcttaaagtttttgtccatacataaactatcttggaagggctgtaaattaccaagaatgttctaacgagaatggttttcaaatacaactaactatgatacgtgttccgcattatatactagaattaaatttgagctcatattatatttatccatttcgtttggagatgcaacaaagtcagtttaattgttcctgacatttcctctttttatattaataaacggactatgtaaactaccactattttcgatgtgaagatggtaaatgttgctgtgttttcacctcaccctacagcaaactggcggtcacagcaaacagaaagagcatagatgagcatattgttttactggattggtcatctggtgatgataaaagtgcagtttccgttgttgatattgatcgtgagacctttttgccaaggattgggctccaaggtatgcagtccatagtttctgtattgtatgtgtacttttcctacaatgacacgttcaatataaagaagataatttgttttttcagaaaacaacgatgacaatacggtcatgggactctgtatcgatagggtttctatagaggggactgttaatgtccgttccggagatgatgaacttaaagaacttcaaccatattttgttcttgtgtgcctcactttggaagggaagctggtcatgtttaatgttgctaggtaggctttatttctctcagtggtttaactcattgctgttgacaacattacttaaaaaacattaatttgttttccccgacagtgttgcaggacggccagcttcatctgatactgatttggcctcttcttctgatatagaagatgcttatacccctttgattgaagatgacctttctaaacaatcttctgaaaaacatcaacagttgaatattgcagtacaaaatgatcagaaacacctcaacacagagaagttctctactgaacaaaggttgccaaatgaaaacatttttagcaaggaattcgagtctgtgaaaagctcagtgtctggggacaacaacaagaagcaagaaccgtatgctgaaaaaccgttacaagttgaagatgctcaacaaagcatgattcctaggttgtccggaacaagttttgggcaactacccatgtccttaggatatgacaccaacaaatttgcaggattcggtcctgctctccctgtttccgaaaagcttcaaaaagacatatttgcgcagtccaattctatgcatttgcaggccaatgtggagtcaaagagtacagcagctttttttggatctcctggcctgcagaacgcaattttgcagtcaccgcaaaatacgtcatctcagccatggtcaagtgggaaaagcgtctcacctccagattttgtatctggtccctttccttctatgagagatactcagcataagcaatctgtacagtctggaactggttatgtaaaccctcctatgagcatcaaagataaatctgtacaagttattgagactggtagagtatcagcgctgagcaatttaagtcctctgctaggccaaaatcaggacactaatgaaggggtagagaaaattgagccaataccttctatccgtgcctctcaattgtcacaacaggtgaaatcttccttcgaaaaatcagccagtcatcagcagcacaaaactccgctcagtactggacctctgagacttgagcataacatgtcaaaccaacccagtaatgtaaggtttactcatgaattcatgatagtaattagtttctcaatgattttttcgtgtggatatgttttttccaggagagagtcatccgacactcatgctttcacaatcatgccttgctgtagtattttacttactggactgataccattagcgtaactgactcttccttttttgcaccagataaatgagatggcccgagaaatggatacacttttacagtccattgaaggaccgggtggtttcaaggattcttgcgcgtttatactgaaaagcaatgttgaagaactggagcaaggacttgaaagtcttgctggcaagtgccaaacgtggaaggtaatatgtaaaagttcacgtattttgttattggttcatattatttttggattccctcttttaatatctgaccaaaccaccttccaataaaaaaaatactgttggtgattctggtccttctaaattgctaactcatttggtgtggtggtcttcagagcacaattcacgagcagcaagcagagatccaacatcttcttgacaaaacaattcaaggtgatctatttattttaccatccccatatgtagcgcaaaaacattgttagtaggtagaattgtgttttacttgaaaaggtattctaaagccgcgaggcccgtaaaaggcaaactaggattgttgtaaatttatattacttctaagcactgtcagtgatatctagaaattgaggcaagtttaactttcatccccattacatcattaacccgccagacttcaactctcaacctaaattgagaagtttagaagaagggaacgaatcctgatacatgcacattagtctcatatctgatatttgtatatgatggtgataaagcgtgagctccagtatgatagtcagcataagcgtgtgctttagatgaggttcttgcatttttacacatgtttctctggaagtccctagactaaagtttgttctcgttcttttggtcttccctattatattcagtatcgttttcatatcttacactggaatctaagctgcaaattagcaggttgttattatgttttcttattattgtttcatgtggggatttcagttttggcaaaaaagacatacatggaaggtatgtataagcaaactgctgataaccagtactggcaactttggaaccgccagaagttgaatcctgagcttgaggccaagcggcagcatataatgaaactaaataaggttttttacgtgttgatatatctccctcatccatctgttactacttttagctcgctgttgtcatttatcttctatttttctcattctaggatttgactcatcaactgattgaactagagagatattttaatcggcttgaactcgatcgctacaatgaggatggtggacatcctgtggcacgaagaggcgtgccaaataggtctgctccttcaaggtattctattggatcagttgtgaaaattttaaggaagaaaacaccatcacaagaaatactataagttggtcaaaacgtcccctttttttgcaactcatattgggttgattctttttgcagacgtgtgcaatcccttcacagccttcataacacaatgagttcccaattggctgctgctgagcaactctctgagtgtctctcaaaacaaatgacatatttgaaaatcgattcacctgtaaaaaagaatgtgaagcaggagttgttcgagacaattgggatcccttacgatgcttctttcagctcaccagatgcggtaaaagctaaaaatgcatcttcagcaaaaaacctattactctcttctatccccgcaagtataaatcaacagtcaagacaacgtcagtcatctgctatgaaaaattctgaccctgaaactgctaggaggagaagagaatcactagacagggtaatttttgtatgaaatctttgactcagtactagccctcacggtatatgcacatattctctagtatattaaactgtgaagaatttatatgcactcctttatttatggtgtatcctgacgtgtggctctactttttgtgatctatttacagaattgggctgcttttgagcctccaaaaacaactgtcaaaaggatgcttctgcaggagcaacagaagacgggtatgaaccaacagactgtcttgagtgagagactacggtctgcgaataatacacaagatcgatcactgcttcacgtgaaagatcatgcatcacctgtagtctcctcgaataagggtgagctaagatatactgcagagtgcattaatttgatctcgaagaatgtttttgtgtttcatttgttttttatatctactatattgcttctctggtttgattgtgtaacactttgagcaggtattatggaatcattccaacaagacacatctgaagctcaatcaaccccattcaaaacgaggccacctatgccacaatctaacagtccctttaccatctctccaatctctgcgtcaaaaccaagtttcaattggtctggaaataagtctagcaatacaacttcttatgctgaggaatctgccccatcgcagattaaggatacaaggacagtttcacaaccagggggatcaagttttcttccgaaacgaccagtggcctcgactgtacttgaacagacagaaaagaaggctggagaattcaaattttccgaagctaaggccaatgcgtttgttgaaacagctgctggaagtgtgcagcggctttctaccacatcatcaggatctgattttgaatctagcaaaggttttggtgctcaattttcaaccatgtcgtctggtgcaccagcatctagtttttcttcaaaatcgttgtttggtttcaattccagtagcagtatccctggtgataaatttacttttcctgctgtaacggcacctttgtctggtactccgcttgattccacttccaccttatttacagcatcatcagctccagtgtcatcctcttcccaagatccaggtatgtttacgttgatctctgtgtatttcgtttgattcacataatagtcaactataggcactttaatatctggtcaatgacactggtcaactttaatatgaatttcagttccagcatctatacccattagctcagcaccagtcccgcaaacgttttcagtcacatctacatccactgtttcagctacggggttcaatgttccatttggtaaacctttgaccagtgtcaaagtagatctcaatcaagcagctccgtcaacaccttctccatcacctggtcccacagctggtttcacttttaatttaccagctttgtctccatcatcccctgagatggtctcatcctcaacaggccagtcttcattatttccaccatctgctccaacatcgcaagtgtcatctgatcaggcctctgcaaccagttccctaacagatagtagtcgtttgttctcatcaacttccttatcttcgactccccctattactcctcctgatgcgtttcagtcacctcaagtttccaccccgtcatctgctgtccccattacagagccagtctcagaacctaaaaaaccagaggctcaaagttcgtcaattctaagtacgcaaagtactgtagattctgtagcaaatgcaacaaaaacacagaatgagccactgccggtgaaaagtgaaatttcaaacccagggactacagtaacccctgtcagttcatctgggttcctgtctggattttcatcaggaacacagtctagtcttgcaagcatggcggctccttcattcagttggccagggagttctcagccacaacagctatcttctacacctgcccctttccctgcatcctcaccaacttcagcaagtccatttggtgagaaaaaagatattgtagatacacaggaagatgaaatggacgaagaagctccagaggctagtcagacaactgaacttagtatgggaagttttggaggtttcgggcttgggtcaactccaaacccgggtgcccccaaaacaaatccatttggtggtccctttggtaatgctacaacaacaacaagtaatccattcaatatgacagttcctagtggcgagctattcaaacctgcctcgttcaattttcaaaatcctcaaccatctcaaccagcaggttttggttcgttctctgtaacaccttctcagacacctgctcagagtggatttggccaaccgtcacagattggtgggggacagcaagctctagggtcggttcttggctcctttgggcagtcgagacagattggtgctgggctcccaggagctacgtttggttctcctacaggatttggtggctctaacccaggaagtggtctgccaaatgcaccagcatctggtggttttgctgctgctggttctagtgccactggtggctttgcggccatggcttcagctggtagaggctttgctggtgcttcttctactcccactggtggcttcgctgcgttagcctcaggtagtggaggctttgctggtgctgctccaggaggaggaggcggtggatttggtggacttggttcaggcaccggaggtttcggaggctttgctcctcagggtagtagtggaggtttcgcgggagcagcaggaggtaatattacaatctaaacatcgattgacctatacattatagatacaaggtcatgctcatacagattgaccattgtcatgtttgtgattgtattattattattatacaggtggcggttttggtggtttcggcggacaagcgcaaggccaagcgggtggtggtggattctcagcctttggtggcaactcgggagcaacaggaaagccctcggaactcttcacacagatgagaaaatgaaaccaaaatgtttggtcaaatatcttctacttagacttgcactcgtctcttgaaattttggtcttacctacctagaccataaccaataaccattagtctataatttaaatatattgtgtgtgtttgtttgttttcgtgctctttaaaatttgattaaagtcaactaacctccaaaatgtttagtaaattgatgacttaactctctcacgtggcttatgccctgatggtcacacactcgagcttcttttcatcccttttcagaagaaagccagtttggtttcattattattacacaacctacatataataagagaagatattttcttatctaatccataatttttatatttcccatttgcttttaaaaaaaaaaaccaagaagtgattttcaatttcgagtgttgttataaaaaggagtggccaagttggaaagagcagagacagctatgaatgtaggcagcggacaaagcggtaatttgtctgcggtttaatccattttatttttggggcgaacaataaaccgctgcgtaccaaatttatttgtatgtaaaaacagtccgcagatggtccgcagcggtttttttctatttttttagtccggaccactgcagactataattgatgaatggtaaattcgctcaaccgccgtaaccattcaaacccacagtttttgatatattttttaataattatttcgttagagaatttttaatttcaccggagaaatatatttatgattaatttggcctcaatcttggattcgatgtgatcccgccaaacaaactcttactcttcccctcctcacgaaattctccaccgtcgaataattcttcgtcgttctcttactcttctccctccgttgatctgtgatgtgtcgccggaaaatttagacattagaagaagcttcgtgaatcatttgtcttttatgaagggacatcggagctgccacgagatttatgatgctttgtggttctttacgagatcgaattcatccttggcttcgcgattatgttaaactccaatctctcgccgtcttccttatttatgctcaggttttttctctctctttctcagtaattgattcaaatctgttggggtcttctagggttcatcgattctctgaattcgtctcatcgttgtggcaaacgcgtttttctgaattagatttttttccggtgatttcagattgggtgcgcgctaatcggatcactaggagcattatacaatggagttttgttgataaatttggcgattgctttgttcgcgcttgttgctatcgagagtaatagccaaagtctcggccgcacctatgcggttcttcttttctgcgctcttcttcttgatatctcatggttcatacttttcaccgaagagatttggtattgctctttaacccttcaaaaccttgcttatgaatctggaactttatgagatttatgacattggttgatcattttaagttttccttccatttttgtaccattcgattatcggaaacattgttcatgtgatgcacttttactgacaaaacctttccattgttgatgcaggagcatttcagctgagacgtatggaacgtttttcatattttcagtgaaacttacaatggcgatggaaatgattggtttctttgtgaggctatcatcctcgcttttatggtttcagatttataggctgggggctgctatcgtggacacttcacttcctcgtgaaacagattcggatttacgaaatagcttcttgaatccaccaactcctgctatagctagacaatgttcaggtgctgaagaaatcttgggaggttctatctacgaccctgcctactacacctctctatttgaagaaagccaaaccaatataaattcacccaaagctactcaggttttttctagtttctactctctttgctttccacttatttgcagtttatattttgttaattcgggtttttgtgattttatcactgagactgtatttcgacatgcctgtttactctaccaagccttccatttagaaagagtttgttaattcttgttttaaactatttgagctgtagtgaatgcaatgcaatatactgagtctaggataaactagctagaaggaaactgtgatgatccttctctatctttcagctcttcatttttacgtggttgatgcaaagaacaagatcccctagcaatgatattttacgactttaggatgtacataagacagtacgtagtgatcataatgttgtaattaacgacatggaggaagttactcacccaatgcaaattttgtcacccttgtgtcctttgtaggtaaatcattattcagctgggaacaatggatcaccatctgctgcagaggcctctcatattaagtctcccatattcagatccttgcattcaattgatgttagtctccattgcttgaacattgtttttggtcgtattgcactatatcttgttactgttgtgttatcacaaataataagaaaaatctggtttcaatttttatgtaggaagagaagggtttgaagaaaccggttagtctccattgattccacatatgttcttggtcgtatttgcagtatatctttatcactgttaattcacacataataagataaatcttgttttgaatatcttttgtaggaagaaatgtgtttgaagcaaacggggatggcttcaatatgattcaagaagggtagtgtgaccatttgtgcatctaagcaaacgagttgtctgttgaggtttagttatcggattttgaagccgataaaaatgctattcatcagtgttccataagcgagggagaattatgaagagtcgtcgtgtccatacaaagcagagcaagaagattacataacacctacaaaaacatgagattctatatgttgaggacaagtaagcactgtttctactttgctatttcattatttgttttgtctgaaaatatgttatttttggggatatatggtttagaatagagtcggaatctacttgatgcatcatccatcatataaaattctttccgagttttttcttgcgtgtaaatggaatggagatactttctttttatgtttttggtttgcaagtggagatagtaaattaaaagatttcggcgttgatatgtgtcgtccttgttatagagtaaaacgatcaggacatgtaaccaaatgggattgtagtaataccgtcactacatcacgagccgttcatgaaattccggtagtagaattcatccgtaatttcaacaaaactccatatattttggatgatctagagagagcacctttgtggacaatgttattttttggtggtaatcataaataagaaacttcctatccaataatttaacatcaaaaaggcccatctaataaaagtatacttaaaagcccacaaaaagaatccaagtacacgtgttgatgtttgtagaaaagtctactggaattaatgagctgattaaaaaaaaggagcagctaattaagaataagacccacagagagaaaagaaatgagaaacccagaaggatctggaagaagaggaggatccttttcattttttctttcttggataaactctctcctatctttttttttttcttttcttcttctacttttctaatttcttacgacaattctcctcctttcgtacataaaacaaagaaaccctctctttttctcatcttcttcaattttcaaaactcaaaatccttcttcatcgtcgctacatttttctgtgcttctcggtttctgctatcgaacaacaagactcaaaaggtttgctaatttctgttacttttatcgtttctttaaaacggctgatttatggttagggtttcaagatggaacgcagattcttctttcgattttgaatccgaccaaacaaaagctcatatctttgaatcgatgactttgttgtaaacttttacgatttcgtctactttgataaatgttctggtttgcgattgacgatttcaaaacccttttcatttctcttctataaagtcattttcttttattgacattttgatattattgggtttttcagtgtcttgatgattgggttttattctacgctttgatgttccttattcgctcttaggggttcgatgaacttcattagctgacagatgtatattagtctcttcaacgagatttactcatttagctacaagttcttattctgtgttattttattttttttaattattctttgtggttatttctaggtagaaagaatcggacatggaagaagcagttgtaacgaggtattggtgtcatatgtgttctcaaactgtgaatccagtcatggaagctgagatcaaatgtcccttttgtcaaagtgggtttgttgaagaaatggaagatgacgacgatcatgattcttctgatccggctgatgttagagcaaacaactctctttgggcgcctatcttgatggaacttatgaatgatcctgtgcgtcgtaggagaaaccagagtgttgagtctgttgaagataatcaaaacgaggtacagaccgagaacaatgaagacgatggagaaaatgatttggattggcagcttcaagagattctcaggagaaggagaagacattccgctgctgttttgcagttgcttcaggggatacgagcagggttgtctgtagaatctgagagtactggtaatggaggtaataatccgggacgggtgatcttgatcaatacctccaatcagactatcacggttcaaaactctgctgatatggattctgtacctgctggttctttaggtgactatttcattggtcctggatttgaaatgttgcttcaacgtctagctgagaatgatcccaacagatatggaacacctcctgctaaaaaagaagctgtcgaggctttggctactgtgaaaatcgaagagactctgcaatgttcggtttgtttagatgattttgagattggaactgaggcaaagctgatgccctgtacgcacaagtttcatagtgactgcttgttaccatggcttgagcttcacagttcatgcccggtttgcagatatcagttacctgcagatgaagccaagactgattcagtaacaacaacgagcgataacaatggaagcagtagtgcttctgctacaaccagccatggagctgagaacagcgatggaaaccggcgccaagaagaagaagaagaagaagaagaggaggaggaggaggagaacgagaacaatgacggaagcggattctcgatcccgtggccgtttagcaccttgttctcctcgtcgcaagatagcaatgcaccaacggattctagttaagacatgttccctgagcaacataagctttttggtgtgatcatgaaatctcggttctacctaaatctgatcttttgtctgtacataagtttctcagatttggttgaatgctacatctttggaaaacaaatatctttcagtttgtgtttttttaattgtttttgagcaaatcttttgccggattctgtaagtcgcttgtgtgttttttgttgtcaaccaaagccacttttgcaacttagtttgttaaattaatgccttaatggtaaaataacaagattggtggctgtagtacgaattgtgttggtaataaattataaatttaaacataaaaagtaatttaacattcatcacctttgttgtatgaaatggaattgtataatattgtatgcctaattacttagaccgactcgtttaatatgtcgtcatccaaaacaaaatatgatgtcttttactaaacttaatgaagtgatgctttttccttgtgttaatccatgattgcattaccatgtaatcttttgtttacgcgtaaacattaattagaatttataaaagctagagttcacatgtgtaaaatgcgaccaaagttaccaactttatgcgctattaacgaaccttttgacattaacgaacttaactttgatatagtatatatactaatatattaacgtttcaccaaatctccttgtatatatataagtattgtagtatcaacttattacattatctctcagattagtcataatccaaaagaagaagtaatgaatcgtcaggttttatccctaatcactttgattattctcttggtctccgcgtacaacacgactatgggccgaactctgccgagtaagtgaccgtctttgatcatacaaatacaatcacgcataaacaaaactcatattcagttcttaatctctttttttattattattataaattaaggggaaggaaatggagcacaacaatttgataatctaaaagctggtgtcagacgaagtgaatcggcacgtactcgtcagaaaggacccggacactgatgagtgatgatctctaacaagttttagttggcaccttcatgcaataattgataatctactgctttgtaataagtccgtcgttgtggcgattcatagtctctactcgattcatatttgtgaacgtgtcttgagttatagtcttacatatagatccaacaaaaaaacgtatgctaacacattctgtaatagaacacgtggcagacaaagagtggacggttccctaaaattccagtaaagaccgtaacattaaaatctaataagctgaattcccataattaccctcatccgacaaagagaggcaagggtagtttaggaaagtatatagaggtaataacgtgtccttaagctccacagatccaaagcgcagatcacaaatctcatccccagagagagaacccagagagcgatattgaaaatcaaaactctctcctttatatataatcccaatttacaaatctctttccctctctaaaaatttcttatctttgtataaaaagccttctcctttttcaaatcattcaccttcctttcgccttttcgggggaatttcttccaatctgttgggtttacgaaaccctagatttcgaaattccggattgctaactagcgaaaggtctgattttgtttcgtaccctttgttcctaatggattcaattccacggattttatctgaattgagtttcttcgtagttgcttgttacgaattggatctcatgttctgaagttgtgtgtttcatagcttttcgttgtttgattgtgaaacaatgtttctagatttcaattatcaaaactggtttttagataaccagatttggtcaatgaaattgtaaagcttgaaaacaattttgtttcgtggatgcttgttggtttggatcgacatgagtttctgttttgccctatttaagacgagatttatagctgatgtgtgtgtgtttacgttgattcttatgttagagaatggctgatcaaggaacggaagggagccagccagttgaccttactaaacatccttcagggattgttcctactcttcagtgagttctctcttttgtgtctctgttttaagattctgagtttgtgcttttgtgaatcacaagatcttacctttttcttttttggtttgtttcagaaatattgtctcaacagtgaacttagactgcaagcttgatcttaaagccatagctttgcaagctaggaatgctgaatataaccccaaggttttgctttctttgtgatattcgtgttttagtaatcgatcattttgtttggtctccaccactttggtttgtattttcggatttggttttaatctgtgttttatgttccagcgtttcgctgctgtaatcatgaggatcagagagccaaagaccacagcgttaatttttgcttctgggaaaatggtatgttttcctttgtcactttttctcttatggcctaatcttccatgtccttgttttgacgtggcatctatgctgtccaatattaggtgtgtaccggagctaaaagtgaacatctttcaaagcttgctgcaagaaaggtaaactagctcatctcaatactgtctgatgttcttcttctagcatcactgtagttagaaacttgttacagctctagtaggtatttgttctctgttatattaaagaattcctttttgttgttcagtatgctcggattgttcaaaagcttggctttcctgcaaagttcaaggtactcatatgtctctctctggtcctgatccagcacacactgtgttattcatttttatctcaatcaacaattcgtgtgtatttttatcggaaggaaaaattacgtataaagtctagtaataaaattgctgattacattttgcaggattttaagatacagaacattgtaggctcatgtgatgtcaaattccccattaggcttgaaggtcttgcatactctcatagtgctttctcaagtgtaagtgatctcaagcattgtgatcatatatacttgtaacatgggtgttaatcggtctgatgattcatacctctctcatcattgatgccagtacgagcctgagctatttccaggattgatatataggatgaaacttccaaagattgtactgcttatttttgtgtcaggaaagattgttataactggagccaaggtaataattgaacttctctcaaatgattaaaattgtttccatgaaaatgcttctgtcatcttatgaaatcccgaatcagatgagagaagagacttataccgcatttgagaatatctacccagttcttagagaattcaggaaggtccagcaataatagtatgtaagttcaactttctttatctccatttacattttataccccttaatcaatcaacagtttgattatgactatttcgattcgaaagcagagcctaccatattgaaggcaaaaaccatgttcacgtttggattgccatgaactagagatctcgggtgttggcaggcgcttggtggggttatattccttggacaagaacttgaaatgattcagattcaaaaccagaaattgtaaatagagaatggagatgccaataaatctcttttctttttgttctaaaaatgtcttccaagtaatcttgtttcatgttctgtttgtttcagtgaacaatacccaatcattaaagagttacttagttctttgctaactgttctgtaataagacaccaagtctgtttgccctttaatatactctttcaagcaatttgccgctctggtttgtcaaatgtttggatcataagctttcatctttcagtagataataatcttcgtacacattaagtgagatagtcctattataacatgttttcgttatcttgaaattcattaaagttaatcggtagtgttacattagacgaattgataacaaagacatgcgattacattagtcctagtgtaaacagtaaactacagatagtacggctagtaattcacagtcgatttgattgcatccaatatctgcatcaagcaagaacacatgatatgttagaaactgcgttttgggtcggaatagaggaatgataagagaagaggaacttgccttgttcttggtgggcatgtagaatggttcaaacacaagaggaaatggagtatccagaccacaaactctgcttactggagcttctaactgcattttaaatgacagttaagaaacggagaaccaataaagagtagtcacttgtaacggtgatgatttgagctttctttttactaaccttcaaaaagcaacgttccagaattgttgcagagatctctgctccaaaacctcctgttacaggagcttcatggcttatctgcaaccccaagcacaagcaaaagcaatctataagatcgaccagacaaatcaaaatccgaagttgtcaatcaagattgcttaaatcttacaagaagtctgccagtctttttaactgaagcctcaacggtttctttgtcccaaggaagcagtgtcttgagatctatcagttcacatgatattccttcctgcatcaactcaagaccttagttaatattactgcgaaccattcatcattgagttgaaagataaagctataaaccttttccgcgtccagacaagcttgttccataacggtaagctgagctccccatccaaccagtgtaatgtcattgccttctcttataacctgctcataactcctaatagtgagattctcgtctccgaaaatagacggccaaaaatgaacttatgatacctctgcttctgataaaggtatcatatagtcatgctcagggacttcttctactgcttgacgatacagccactgaaggaaatatcaacgtttcaagacttaagaagaggtgctaagaagctgatttggttggtaaaaaagaaatggaagtacctttggttcgaagaaaacaacgggatttggatcacggatacatgacaacaacagtccctttgcttctcgtggactccgagggataacaaccttaataccagggacatggcaaaagaaagcttcaggggattgtgaatggtaatgtccaccatgaccaactgctccatatggtgctcttatcgtaagtcctatcaagatccatataaaccataatgagtaaaatagattactaataacaaatcaagaaaaagcgtaatgatgaaagatttacctccacagttgaattggttaccacttcggtatctgaactttgcagcttcattaacaatctataaatcacaaaaccgttcagaaatatggcgacggaaagcatatgcttgtttaaagagagaacatttacctgatcaaaagcaggatatatataatctgcaaactgaatctctacaattgctcgattaccctgtcaaaatggaacaccaaactgaatctcacaactgtacagttcaaaacatgaacacaaacaagaactcaccattgctgctagaccaatgccaaatccaacaatgccctgaatccagtcaaaacttaaatgaatgactcatcaagaaacactaccttaagaagtgaaaacagaagcaggtcaaagaatgatacctgctcacaaagaggagtattgaagacacggtttttcccgaatcgttcagctaaacctgttgtacagcgaaagactccaccaaagccaacgtcttccccaaagacataagacctcccacaacaaaaacttaaagtcagactctaaaacgacatcatacatatttgaagcaactatatgtgtatactaattaactaaattccccacattttttttatctttctccacagaatgtattagatgtctattaacctaaggatcaaatgtctagtgtaagcttaccgaggatcggtgtccaaagcgatgtgaagcgcttgattaatagcagagtatagattcaatggttttccagtttccgtcgataccctcctagctccgtgactcaagctcggaaaactcagtttccggcaggatctgcctaaaagagccgccatttacacaaacccaccaacaatcaatctgaaaaatataggattgcgacaaaagcaagctctattttggcaactttcacccaactggtaagatttttaggtggcaaaggtttgctacttttggtgggtgaagaaagaaacagattctaagttaatcacgtaattacgagatagatgatagatactcctgccacgtcaaatccgacacgaatcaatatctctctcgcaagtttttttttttttcgcggtaattttttggatggtgtcgcagacttggtgttacattagggcccaaaaggctaaagcctaaaagaaatccatattgaaatgcaaagacatcatctagatgttttagccatatggtttgccaaactcatactcatccaaaataataataaaatcagatgaatttaaatgcagatgattcttacaaaaattgtaattgtctaaaatatactcatttaccctcatactttaaatgatgtagtaaaacctgtataaattaatatggttgttaacatatataaactcattgttcatattttaagaaattatgcatatagattcaacgatttcctagtttccgtccataccctcctagctccgtgactcaagctccgatactcctgtcactgtggatccgacacgaatcgatatctttctcttgcaagttgcaactaactcattttatgcgagtttcacacaaaaattaatggtctaactacaaaggtttatagagtattaacaaaaacataacattttaattggatgtgttatccttgtccaatcagccttttaggttttgaaaacttggaaacagaggagaaatggagaaggaaagaagatactaaattttcagattgaaagcaaaatctagaagaaattaagaaaagactcaacagagtcatgtccgaaccagaaaccaaagaaaaatgaaaatctgtctaagctaaaacgaaaacaaacccaaccctgattttatctttcactacttcttcatcttcccaccgtatgcagggatctttatacgcattttacatggtagaatcaacagttcctggtttctcatcattggtttttccttcccagacctgttaaagatatatgggtgcatttcaatactagagagtagagaggacaaatgtaaatgcatctgcttatatctatggaattaaccgttttcttctcttgcctgcttctgggattgttgctgcttagctttcttctccaaaatagtcttttgtcgagcctcgtagaacgagaaatcatccaaaatgcatgtcttgctgttatgctccttgaaaatctttacaaccttcaaaccctgctccaacttaacctacatacatgatcacatggaaagagtttgaacattgaaaagtggaaaatattgctggtagatcagaaacatatagatcgagaagatataaacacttacctcttgtgtgtctctactgttagtaacaggtttattctcattgtactctagagtaatatgcttaagcaaactgttgggaacatccttcagaatatgccacttgaggggaaatgagccagtccatttatcctgttgccagtactcaatatttttgttgaaatcaactggtcctttcatttccgcaaggccaataaattgtccactcgcgttgacctggagacaattggggtatatactcagcatcgggaaacaaaacgaatacacaatatgaaataaactaagaattaggtacaaaccgagaagaagagaaacacagggcagccactagatttctgctgagcctcttgatatgcagcatcaagcttcttgtttccatttggggtgctagcccatacattatatttgatgctcttatgcacatcatcttcactgtacgacttgatgataaagaacttagcatctttatactcaactggaaaatcgtctctgttgcactcttctctatctggaagaacgcatgttacagtctcctcagtatttgattcatcaaacgtctgctttttcacctcctctgagctaacctcttctgtggccttcgtgcccttggctctagggcccctgtttagttcattcaagccatcaatgttctcatttccatagaagtaactgttaccccttccccggcttctatatttgttgtctgtattgagccatcctctttcatttgttcttgaaccatatccagaagaaccataacccataccagacctcaccgtgctaccatactgaccatatgacttgtttggagacactctgtcgtagtaaccctgagctgcataacctgtcatggatgcaggctggtacatactctgccaagaatagaatgaggctatcagatacagggattcagatagagaagaagacttatcatacaaaactgacttccatatcataccgtgtaatgcgaattggagctagagttttgattcctagtcgcaggtacattgttgttagccttagaatatgaggatgcaactccactgccagaaacagacctctgcacatctgagaagttagagccatcgtgccatgacacaggagtgtaaaacccatcatagctatacctggggtcctgataaccagcagcaagaccacctccaagagcactgtttccatacagtgcactctgattcaatggtttaacaggagctgatccattcattcctttagggataccagcagatgcagagttggctgctttgtttgtagagagcttgctctgagtagaggcaggaacagacgaagcgaaaggcccactactggctgtgagaggaaaaggatactggtactgctgagcaccatacaactgtccatcaccaccaagttgtggagcagggcttgttgctggtgagtaaggaaaggcagcatacccgtatccctgcggataaacaagagatgcattctctccgtaagctccctggagtgattaccaaatgactaagtagggcaaaaggtaaaagagaggctaaatagtctggacacgagttgcttataagaaaatattaacgcacgtactgatgtcatatcaacactctcggaattggtataacctgtgtagtcactcccataacctgaaagattatacaaacggttgtgttatagatattacaataattctagacagtagaaggctgaagatatataaatgaaacttaattatcaccataatagtagggctgctgatacacattaggaacatagaaaacagaaggatccaaggcatcactgggtagcataggtgacaaagatcgatcaaaagaaggaacttgaccattcgaatccatagctccatactggtaaacacccgtctgcaaagataatgatgctatgagaactctgcttggagtaacaaaatgtgcagagacattaaaagatgtaactttaccttcttagtaggctcagggatctccaaagtcctagactttgaatctaaagacagtttcttcaatacatcagcagcttctgaaaaaacaatgtaagtgaaggaaacaaataggtttctatcttcagcaagactaaaaaattgatttttctaatcaatttattcactttgctagctacaggaacagtcaaattcatcgagctaaaacaaacagaacaaatggaaatgacatcatttcactatatgaatcgaattacgatgaagcaactagattcatgaacgtagatcacaaaagaaatgaaggagaaaagaaacaaaggcaaaggatacgatcagcaggaggagcaacagtagacatgagaacagagttggcagcgaagactgataatagatccttgtcggatattgaacaataagagtttgagacaaacacaaatatcagagcaaaaaagaactcagaaggaatctagggtttaagagattgaatcgtagccgcaagagaagagagaagaagaggaagaggcaaaagtggttttgttcgttcacctcgatttgattcaaatacctccaagatcccttttttatatttttctattatttttgtttacctttttctccatcgttttttttttaaaatacttcctttattccagccacattaatattatactagtcactacgaaatatctcacaaaataatactataaatattatttcctcgaaaatttcgcaattaatcgggaaaaaatcaatttttaaaataaatatcactgattccaattccattgttaggaattaaggagcaagaataaaggcccaaataggcccaatataaatctgatccaggatccgaagagttgaatccaacggccaagattaactcaaagcttgaaagaggtaagggaacgttaaaagcaccttccaagcgagagtaaggagataaacctacttcctttccttgcttcagctccccttttcttatccggaaaccaaaaacttccggtgataaaacctccttcgtcatctctctacttctgttagtttcttaatccttactcttggaatagtttatcctctgcattttttagtgccacagtttatgtgtgtatgttttgtttggataagaatttgttgtaagcttttgaaaacttgtattagttcattacttccatgattttgggtgttttgtaataaaatttatggattagtgtttcttcagattgtcaattgtgttcttattgagctctgctttcgaaggtgtcgcctttcttctggtttgttgtgaaaatttattactttagcttactgggttgttgtttctttctgttatattgattgtgttaaccgtatatagatgaaaagaagagtcttttttatatctttgaaatcttatctaagtgctgaattttgtctgtctttgaagtggataaaatggcgtcaactttcactgccacatcttctattggttcaatggttgctccgaatggtcacaaatctgataagaaacttatcagcaagttgtcttcaagctcatttggaaggagacaaagtgtgtgtcctagacccagaagatccagttctgcaattgtgtgcgcagcaaaggaattacatttcaacaaagatgggactaccattaggagacttcaagtaagtatcttttttaaaaaaagttaatggaaacttcattcccaaaccggagctaaaggtttacattttctgtggtttctaattttgtgttgtactaggctggtgtcaacaagctcgcagatcttgttggtgttacacttggacccaaaggacgaaatgttgttcttgagagcaagtatggatcaccacgaattgttaatgatggtgtgactgttgcaagagaggtatggaattattacccctctgataatgatttttgttctcattcaactgagtcttagagtttcaaactttctcctgtaggttgagttggaagacccggttgagaacattggcgctaagcttgtgaggcaagcggctgccaaaaccaatgacttggctggtgacggtacaacaacatctgttgttcttgcacaaggttttatcgctgagggtgtcaaggtctgtgtaacattcttctttcagctttctctatgtgaaacttcaaaaacttttgtactaattttaagattatcttattcaggtggtagctgctggtgcaaaccctgttttgatcaccagaggtattgagaagacagcaaaggctttggttaccgagctcaagaaaatgtctaaggaggtttcaaatttatagaactctctttcttttaatatgttaagagtctttttcaaaaggttctgaatgtaagtcatgtcgatgtaggttgaagacagtgaacttgcagatgttgcagctgttagtgcgggtaacaacgacgaaattggaaatatgattgctgaagcaatgagcaaagtgggcaggaaaggtgtggtgacccttgaggagggtaaaagtgccgagaacaacctctacgtcgtagaaggaatgcaatttgaccgtggttatatctctccttactttgtgacagacagcgagaaaatgtccgtcgagttcgacaattgcaaggtagatgtttcttgaatctgagtagaagatgaattttgttggcagactatttagccactaaagatatttatatatgagtataacaacgatctttaatgttttggtatgattgcagttacttctcgttgacaagaaaattaccaatgcaagggatcttgttggtgttttggaggatgcaattagaggcggatacccaatattaattattgctgaagacattgaacaagaagctttagcgactcttgttgtaaacaagcttagaggtacactgaagatagcagctctcagagctccagggtttggagagcgcaagagccaataccttgatgatattgccattctaactggaggtaagttctgtctgcattgatgagccctatgtttacgcatatatttgtagtttttatcttgtcctaattttctatcttcgcttgcagcaactgtgatccgtgaggaagttggtctttcacttgacaaagctggaaaagaggttcttggtaatgcttcaaaggttgtcctcacaaaggagacctcgaccatagtgggtgatggaagcacacaggatgcagtgaaaaagcgtgttacacagattaaaaatcttattgaggtatagtaaaagagtatagcatatatgggacctcttttactttttgtggatagtgtagttacattgcaatggtaattggtttgtgcagcaagcggagcaagattacgagaaggagaaactcaatgagagaattgcaaagctctctggtggagttgctgtgattcaggtaaactaaaaactatttaagtttcctttgtctgattaagatgtgtttcagagatattaagttaagctcgttatgtattggttaaaggttggagcacaaactgagacagaactcaaagagaagaagttgagagttgaagatgctcttaatgcaacaaaggtgattttgtatttctgaggcttgagaagcgtgttatttgcatactcgtgaactataactaatcaggattttaattcttcaggccgctgtcgaggaaggtattgttgttggtggtggttgcactctgcttcgtcttgcttccaaggttgatgccattaaagccacgcttgataatgatgaagaaaaggtaaatcaatcaagtcttcagattttaactcatgaaccttcggtttctctaactttgctgatgattccctttaggttggagcggatatagttaaaagagcactaagttaccccctaaaactaatcgccaagaatgctggtgttaatggaagtgtagttagcgagaaggtaataacaacagataacataattcccacttttttatctctagatttcaagtcagatgcttgaagagatgtctctattcattggcaggtgctttccaacgataacgtgaaattcggttacaatgctgcaaccggcaagtacgaggatttgatggctgcaggaatcatcgatccaacaaaggtaagttttctgtgcatatacagaaactgtctttgctagctaaattggtcatcaaagatccatgaacctgagtggctttatcttgattttaggttgtgagatgttgcttggaacacgcagcttcggttgcaaagactttcttgatgtcggactgcgttgttgttgagatcaaggaacctgaaccagttcccgtcggcaacccaatggacaactcaggtttgttcagaatttcaaatacttgagtctttggtaaagatcccccgcattcaatattcatgtttcattgctgaatcttgttggcctctcttatttcaggatatggatactaagaggagataggctaatattgaaacggattactttagcttgcgagtgtaatgattttgaacaagagaatgtgtaatgtgaaactgaaattttgaattaatcatcatatgaataaatcatgattccctcaatgcttcgaaatatctcgaaatcgccaaatatgaaacttttgatccaaagatttgaagatttattatcacttcatatgaaatggtatacgtaaactgaatgaaatggttaaaagaatttcttaagaaaaaaagaacacatttatgatcgaataaaattcctcacaagtatgtatagagccaagaagagaagagaagctatgaacagatcacatcaaaagacacaaactttaggtgaactatttcttgttaaagccaaacaaggatttgatggcgttaatggcactctcattgatgaaagattcgtcgaattgcttcagaagtggatcgaaatccttcgacttcctgagagtttccagatctggatcacttctgattctctgcaaacaaaacaaataacacagcttcaacaaacaagtccatccttctctctgtctcaattgaaacattacaactccttggacttaccttaaaatcttcatatcctgacttcaatgcttcttccagagccgagagaccagcttgaacctatcaaaataactctatcaacactgcaagtcaaaatgcaatatctgaaaagattcaaaagctttttacctgattaagctttgagtagcaacaagcaacattgtaacttgcaactgatgcttcttctggtgttggtttagaacctaacaccgactcaaacctctccaatgcttcctcatacttaccattcctatatcaaattacacacatgtcaatgctcactttccggtttccataaacccctttggtatactcactaagtatttacttggaaaattgcagcccttcacgaagatccttctcccgttgagctttctgttctttcttcttcaaatagttttgcatctacaattataaaaacaaaaacaaagctcactcacaagccaaagttcattacttttgatgtcacataatcaaaacttttgagctcacctgaatctctctcaatctactgctaatgtatccggcatttctctcagctcttatgatctccttctctgttaactcaccagtatcttcagccttacctgcaagagaagaagacacaacacattttaaacataaccaaacccaataatgagttttgcagagagaatagataaaataaaacagagctagaatatgggaaattcaacaaaccatttctcttctccatttgcataagcaagggaccaattctctgacgaattgtgtacattgtcctaccgtactcagctgcaggccaaatctctgttccaaatactgcactgcattctcaattttcaaagttccaagtcaaaactttcacagtctctcaagctaatcacattggaacatgaaggagaaagaacaaaccttgtggcaataactctatcgccaacagtgaactttccggttttgtcagctgatccacctggtaagatagcatcaatgtaagtgccaccatctcttcctttcctgaatttcaaaccataaggctgctccacttcaatttcatatgtttcatacttctcttcttcttctccgtctcctcctgcttcagctttagctgaagactctgtctccgacgccttcaaagctaaattccggcgtttggcaacatgggtattgcataaagaagccgaattgctcgaaaggaagagacttttggcggaaatgaaactggattgagtgatcaaactagggttttgcttggtttgctgggttcttggcagtgaaggcgaagaatacagagatggataactgctcggagctaaagacatggtgagattctttttctttaagttcgagctcagacacaagccagagccagagagacagatgatgattagttggattttgttagttgaagaagacgattatgtgacgttggttggtttttcgcaaaagcttcaaagtttcggattacacaagtttgcatgattttagtggctatgcttcagtcttggtgtttcgccacgtgtcatattgtaatggtacctttagtttgatcctttttttcttcttcataaattcgcatctcccttcagttggattcgtttattacacaaacaattgagttttgactcaatatgaccagttctacaagaagacaaggcaacatgacagaagtggtaacgttcagagcaagtgtcattggctctctaaagaaacagaggagattctagtttcatgattcttatgtcgcccgcaaacaataactcaggaaagatactgagatccaaatcaagaatgaatcacctcttgctcctaacagattgagcggtgagttttggaacagatgagtcttaaaccagttcttgggtgctacaaacttctttcaattacatacttgtggaccacagatctattcacattcttgatggaattcactgagcctctggtaaagtggaagaaattgaaaacagaagtgctccaaagcctaagccttgagatatagtctgcactatcaaacttgctgtttttgcacccaaatataatagtgataacatttgattcgagtttgacagaattatgctaacacaccaagagcaatatctatacagaaattcttactataaatgtaaacaatggctgcgtgaaagacaacaagcaatagttttctctcaaattgaagtaagctgtcacttagacattgatcaaacacactgatatcaaagtcatttgaactaaatcgcagaactagatatcgatgcatagcaattgttatatttgaaacttgctccacaatctgaatgagaaagaacttcattaaatgattgaagcaacgaatgaagttaaagacctatactttaaacacttctaaagaagaagaaaaagaatgcttccgtgttaaatcaggaatcatcatcatatggcttcaagcgtgcaaacttaagaatggctatagaacacaaatgcagattctatatgtacctccatgtatatggaatttaatgctgaagccaccaactttgtcttttgccttaaatctcccagttaaacttaagtggacggatcacaggataatacaaacacaggttttgcctcgatcagaatcaatatcatcttcatcactgcaaaaatgaaagaatcacatcattctccacaaaacaagtacttatgaaaacttaaagaactcattcttaatgaaaagaaaccaaaacaaatctgatgccatcagaaaaaatccttatgaccaaactcattcttatattctcaacaatagaagaccaacctaggttcaaattctcgaatctcagcaagttccttcccaatcacatccacccattgtaccttcttcttctccctcttctcagcttctgttgaatttgaatcaacctttcgaagactacttttgagagtgagagtgtccccaacaatttgaccttcttcttcctttgcatctacttcttctctatcctcagcattcgtaagaccatccacatgttcgagaatctcttcatgatcatcatcatcatcactagtggctgaaacaacagttttcaacttcagctaacttgccacatataaatggcttccagatgaaacagaaaaaagggacactggatcttacaaagcaaaacactcatcaaaacatgtattgagtcttttaaacagttgatcatcaattggagaatttgcttacacctctttgaataaaacttaaaactttgagcgcagagagctagttttaattctggattagaagaaggaaacaaacgcagacaaaaccccagaaaaagggcttcaacagaatcaagtataaaatcctctttaagagaatcgaagaaccaaagatgaggaaacggacaatgttaatgcttattgaaaaagtagagattccttttaagaacaatcagcgatgaaaaagcaaagatcgaaggggaatgaattttaaaaaaggcagatacttttctgatttgagagggacaacgagagagagagtacgaattcaaaaaccctggatttccctgagaataaggaaatagatgaagaacaaattgatcaagccgtggacttgtagactcctactgttgttaaatatttctcccttttttctctgtttgtttatttgggatttaggattttgacaaccaagtcaagaaccaaccaagctttatataacagtggaccaaccggaaagaagaaaaaaaaaaaggtttgctttttcagtgcctacctaaaggaattgctttttaaagacttgtggatttgcctcctagtcctgcccaattaattagttgccactgtttttgttgtttgcagtctcctacatttattatgagaacagtggtcgatacttggtcaagttttctcctacctaaaacccaagttttttcctattttaaacccaaattttcttatttgtgagagataagtttcaagacttaatacttggtcagccaaattcttgtccaaagaaggtaaagaggttcttataaaatctatagcacaagcccttccgacatatgttatgttgtgcattctattttttaaggctatttgctcaaagttgaatagtgttattgcaaatttctggtaaaaaactaatgaaaatagtaatggtatccactggattgtatgagataagctttgtaatccacactttgagggcgatcttgactttagaacgctagaagaatttaatctagctcttttagctaaataacggtagcgtcttatctgggtaccaaactctctcttgagtagggtcttgagggggagatactttcgatatagtgatccattacatataggagcctcaaatcgtccgtctgttggatggagaagcatcatagctgccaaacctcttcttgtctcgggacttcggaggaccataggttcgggaatgctgacccgtgtatgagaagatccatggattcccaccatccttgtgcggtccgcgacgagcattcttaacataagagatcccctactctatgtaaatgtttaatcgaccaaaacacaaaatttgtggaaactagaccgtctccaagcattgatcgaccccgttgatatttcacctcatttcagagattcgtccaaacggtatctacttgagtgatggttatagctggtcttatactaaatccggtaattgtactgttaagtcaggatattgggccgcacgtgacatgtctcgtcctacttgtgaccccccttttcagggaccaggtgtttcagcacttcaagcacaagtatggaagcttaaaactacgcggaaacttatgcatttcgcgtggcaatgtatctctggttgtttagccacttgtcaaagattgacatatcgtcacaagggtacatataaaggttgcccccgatgcagattaaacagaagagactatcaaccatctccagtttcattgtccaccctcgagacagatttgagcattatcgcatattcctacctcacagaatatttttcctagaaagtcccttttctataatttcgatttcttttttggcgtggccgggaatttggaatcggagaagaagtgttggaactctttccatggatactttggtatatctgaaaaagtagaaatcgcttctagaactttagaaaacctcttgttgaaactttaactttggctcttcaagaggcagatgtttggaaacaagcaactctagcagaagatgcacccatacgctcaattcctcccctaagttcttctcaaatcccgctaacccagctccctgaatgtcaacttgatgctacttggcatgttggatgagtccttgttggacaagacttactcctccatcttggcatcaagagtactcatcgaagcttatcaccgtttcatgcagaatttgactttttgctatgggcaatagatgcatgatctctattagcaatacttctggtacttttgcttcagattgttcagacctaatttctatcattgacaaccaagacgattagccgacattcgcagcggaattggcttcctatcgatctttagtttgtttttttcttcttttcatattagatttcttcttcgtagttttactgttcgagatgattgtttagctaaaaaagctcgggatcgaaaaagtcttttctcccatgaaagcacatcggttcctgaatggctttctctagcggagagtttattaccgattacttaaataaaatagtgtttgtgggggggaaaaaaaattagtctcctacatttattgaaatttctttacttaattagatcgccaaatttatgaacttgtttaggtcaataatttcgatggtaaaaactaaaatcataagacaaaagaaactcaaacctttttatatgatttaacttatagaataacttgttacatatgatatgtttgtatgaaagaaagaaaagagaaccgagaaaaataagagaatgaaaagatgaaagaacagagaacaatttcaaagatatcttatatagtagagaagttaatggataacttggttttattaaaatgtcgaatgcaacatttctaatattctagttaggctgcctatgtgtttaacttcatgcctttcatgacatttcatctcagtacttggagtttactattcaagcttcgtttgcaaacgcacattcaaaacatcataagatttctcgaagatactacacagtagccatacataaaacaattcgttctacaaaccagatcgaataacatgtgtgaaatagattcatctgcagtacctttttaacgcggctagctatcaggaaacagagtgcttcacttgtatataaaaaaaagaggttcaagcagaaatacaaggcatcgtaaaacccgatatggtctaaaagatataactaagcaagtttgcatatgtcctcgtactcaatggacttgatgactcttccatcatagacacctttctcgatctgcactttagcacagaacttctctgtatccacacccaacaaccttgcattcgaaccacgatatgccccattcactatcttcaccatccctccaatttgtggaagcacagtctctagctccttttgatcaactctcaacacatgtttagaatcaagcattttgatctccccaacataattatcaatcactttcttcacaacacctttttgcttataataccctttctctgccaaagccttactcatcaccttcacaatgatcccttcgaacaaccagtaatctttccgattcatcctctccttcttcttctcttcctccttcatcaactcatccaaagctgatctcctctccttctcgctcctcccggagtccccacttctcttcctcttctcccctctctcaaccttgtcattctcttcatccccaaacaaaagtttcgagctttcccctctctctttacccgtagcaacctgtttaacacctccaccaagagcaaatccaaccttgaccccactcttcaacctcaagtcttcatctttcttcctctcatcatcaccatcatccacaacttcatcattaccactggtttcaccttcaccaccaccaccattcaatttctcagcagctctctcaatctgtctctgaatctccctctcttgcttctcctcctcagctaaatcactcttaactctcttattcttcaacctctccttaaacaaagtctcagaatctctatctatataagtaataaaccaacctttaggagtttcttcaaccttacacttaccagttttcccaagatgcttgataaactccgtcaacgtcgcccactccgtcgaattcatgtgaacatgatgtctatcgttaatatactcattgtagacaacagtggcagcgatacgagagaaacggtggctccgcctcatcagatcgagaaacgtctgctcgaattcttcagagtaaccatcgacaacacgagtcggattctgcccaaaaacttgcatctgcctctggtgagattcgctcatacaatgacacttgaatccattctcgtctcggcattgtttctgacacatctgacaataccatcgaagcttttgaagtcctttggctttaattcgattcgcaatcgcctttggggttagaaaatcgttcttacccatcgaatcttcttgggtttgtcgaacaaaattaaggtgttgggaattgaaatctagggtttctcaggtaacaaccactgatcgagaatgatgaagattcaatcggcgaagattagctaatatattgattgatgataaaccgaaactcataccaaatataattgtttatcctgaataccgaatacgacccatcaattaaagcccatacaatactgggcctataagaaaagaaatgtaaattgtggggaaaaaaaaaggtaaatttacaactttataatatatgcctcaaataattttaacagcttgtttggtcttatatcttgtgatctttgactttcagtctttcacaatggaaattattgaatcttgcatttttattgaattaatttcctatttgtaacagaatactattattagagatatattgattgagaatcgtaaaagataatgtagttgtgtgacaagtgagattcaagaaaagtcaactatatacaacgagagtagcaaaaaagaaataaattcaaatgatttggaaaattgaagaggggaccaattcttgggggtaaggagtagactcgtcgccagagctgactttgaaaacttgacttggtctcattcttctcatctactgcaaaaaccacaatcagtatataacaacaacacatgagtgacttaattctcatagaccaatacagagatacaaagcaatagaacaacaagaacaagaaaacagagaaaaaaacaatggctgccttgtcggataagttagcggatgcttaccagaacgcaaggccgagatatccgatcgattggttcacgaaacttgctgctcgaaccggtcagcacaaatcagcttgggatgttggtactggcaacggtcaagcagctattggtgtaagcttcttccatcttgttccaaaagtttccactttcttatgtactctgcttcacttagatctctcaaacgatgtcgttttaatccctctagaagaacacaattatggatttattagctttagttgagaggagagaagaagatgaatggcttctttctaatgagtttatgatttaattagagcatagatttatctcaatcgatactattaacgtctaatgttagtgatgattatgaatgaagtaccaattattaacattttcacattttgagaacatgatttctcttgttttattttgagaaaataaaagttactaatctacctcatttataattattaaacaaaaaatttgtttggttcaaatttgtaatggtatttgtcattgtactattcacctaaaatgttaatcaacatttaccatggtttaatttaattgcagcttgcagagtatttcgagaaagttacagcaaccgacataaacgaagcacagttaaaacgagcggtaaaacacgaaagaatcagttaccatcacactcccacaacaatgtccgaagaccaaatggttgctctagtcggcggagataactccgttgatctaatcgtggcagcacaagccgttcactacttcgatctcgcaccattctacaacgtagcaaaacgtgttcttcgcaaagaaggaggattaatcgcagtttttgtctacaacgacataatcatctctcctgaagttgattccatcatgaaacgtcttgtggactccacgttcccgtttagaactcctgtaatgaatcttgctttcgacggttataaaacgttgccgtttccgtttgaaagtatagggatgggatcagaagggaagcctataatgcttgacattcctcataagctatcgcttaaagggtttatcggtttcttgagatcgtggcagcccgcaatgaaagctaaagaacgtggagttgagcttgtgactgaagatttgatctccaaatttgaagatgcttggggtgatgatgatgatgttaaagatattttctacaaagctcatatgattgttggaaaactttcggtaaataattcatttacttaattaatatctatatagttttggtataaatgaatcattcgttatttatatataatgcaggcttcagatatagagcggcatcgaaagagatttgatacgaactgcgtagttacaacactaaaggatcataacaactcggctgttattgcttcaggtttgttttctgaaatcttttcattgtttttatctccaatttaaacaatgtcaatcgaattaaccaaattgggttgtgttgtgttgttaaattatagtgactgctgctgcatttgctggagtggcggcttactgtgcttactctgcaaggaagaacagttagatcctttgaaggacaaagaaacggttttctgaatctagtgaatgaaatcttttttattttacatgttgacatgttgtcatgtatttatttatgtcattgatatgagatggttaagtaatatctaaagatttaagagtcacccaacactcttacattcatgactcaaggggataaaataaaagtacaagcatccacataataaagaaaatagattctcacaagtgttcttttgtttttcgctgagtacgcgcataaatagatgctcacacgttcttgggttttaagaaattatatattaagcccaacttgtacggctcaaaactctgtaatatagtcaaggacatgatcaatttcttataattagcatatgggcaacttacatctgggccatttgttgatacgtttcgcctaataccaaaacaactctaaactcaaattaaaagtcaaacctatgattagaatttagaagccttttgaaatttgatctaacgagtgaccaaaatttttagtgcttctaaattaaatctaggatttatgttacagagacttgattattggaggtaagttcaacggagatctccaaacattggtaaaattgtttgtcgtggtctcgtatattagggaatatagtaccttttatgaatggcatagatttttgtattgcgccattttatggaatatacgtacttttaaaatatactagatgagtacccgcactacgtgcgggtttatgtattactatttacaaattattttatataatgtctgttcatataaaataaagttgaatgcatcggttttaaaacataaatatgatttgtaattgtttttgaaaagtccaactatattagttcatctgaaaaacgaatgtgcttgagttgttttttattgttatcctagattctcagtttttttttaaaatttatatatccctatttttttgttatatgtttagattgtgagacggtgaaattttagaaaatatatttcttaaactaaaaatataacatgactttattaaccatgtctctgtatcttcaatctaatcatgtaggtgaattttaaaaaattattacaaatttgagttaaatagataacaaaatgtgaagttggaaagattggcgagtaagattccgaaaaagaagacgaaggggatgaattggaatttggaaggagacgaaagaggtaaaactgaaatgtcattaattgattcattatataaaagtttgagcaaattacgtttaattacttttaatgatttttttgtaaatatatgaaaatatgtgctgatgtgtcaactgctggattgctgaggtgtcatgttgtgggagagagttagacttctttcatatatatgatttatttggtatttatgttagtctctgggcgagcgagatgaaacatgtgtctaggcctctagggtctttttttcttactacaaaaaggtccccaacatttacatttctttagaaataggccccaaaattcatatttttttgaaaattagattttaagtttttaattaatcttgcctaatttctaaagtcccttcaattacgtaggattcatataatcgtgcttagtttacctggaagcctgaactagttttgtcttctctcagatccagctggattaagagagagagaacaagaatcttgagtagttgactttatattggaactggtcttttaactctctgggcagatcttttaaaaggacaaatgcgagaccagaacgatatatgagttgaaaaccttttacattacttacattctctctcatttgcttcttcattcattccaaagaaacacatatggtgtattctagaactaaacccccatgtcgtgtgtctgatccggctcagccccacaatctttgcagacgacgacggccttctccactttctatctgctttacatgcaaaggcaagaatttaacgtgcagaaagtactattactactgtgcaacttgcaatttagagttccacagaggttgtcacctctttccgccgaatctaagacacccttttcattcctctcaccctctcaccctcatctcttcaaacacacgcaacggttggtgggatggctcctccggttcagaaggatcaacagatgatgatgatagtgatgatgatgatcgtgatggtgatggtgatggtgatggtgatggcagcgttgatattgatggtgatgatgatgcgtatggcagcgttgatattgatggtgatgctgatgctgatgttaatgttgatgcctctttatccgatggaaatcacaggagctgccgatgttgtaacaaacctttggacaagacatattatcattgttctatctgcaagttcaatctcaacttgccctgctcgatgatgctaccacttctcactatctcacacatgaaaagtcatgagcacacgctcaccctcttctgtacacgactccctatgtcatgtgatgcttgtggcttgtctctaagcacacgcagcactctcctttacacgtgtctcccttgcagccacacagtccacataaaatgtatctatctacctcgtgtcattcagatcacccgacacacacaccgactctctttcactttgtcccttcaacctggtgacttctcttgcggagtttgtcgcaaaaccgtcgacgttaactatgggcaatattcttgtattaagggatgtcattatgctgtccattcgcattgtgcaacgaggaatgacgtgtgggatggagaagatcttgaaggagtgcctgaagaacctgatgaagatatcgagccatttgtgaggattgatgtggagacaattcatcatttcagtcatgaacattatctgaagctccaagaaaagaaaaccatttgcgagaaagacaagtattgtgttgcatgcacgattccaattataatctctcggagattttatggttgtatggagtgtgattttgtactcgacgaagcatgtgcttctcttcctcgcaaaaaatacctcccaatacataaacacccacttaccctccaccccttcccgattggtgggatctccaggttcgattttaatacagttgctgccaaagacatattcaaatgtaaagcttgctaccgattaagttgtggtttcgtgtacaaatgcggtgaggaatattgtgagtttcaaatagacgtcagatgcgcttcccttccagatcctttaattcatggctgtcatccacatgatctcttcttcaacttgacccatggttattgcattgggtgtagaccacgaaccgacttgaccaaggcacgtatgctcagctcacatgggccgggcctttgttcatcctatgcagtagaatgtattaagtgcgacgactcctttttgggtatgacatgtgctagttttccttgtgaggcctactacaagcacgataggcatctactcacactttgctacggtgacgaaaaagatacaacaagtggtcaatattggtgtgagatatgtgaatcagaattaaatgcagatgactggttttatacatgtgactcttgtatgatcactttacatatcgattgtttacttggaaaagatatgtacatgaagcccggccatatattcgaaataggtgatgatggtgatgaagttgaaattgttcacaatgatggtaactctcggctgatttgctctgaatgtaatcttcattgtgcacaggcttgggcattcaagatgatacgtggatacaaatggtattgcactcttaattgtatgggaaaaggtcttggccttggacgtctcaattgaaggtagccaagacattgtgatcagcgcatcttatgtgtttcagggctttcgtcgaatacacgtttcttagggtttaatcttttggtgttaaattttatttttgttttcttttttttcttttgtgttgatgaaaatgaaaatgataaaattctgttctcgttttggttttggagtctatcaagatcactttgctgttattatatctttaggtgttatataagtagagtccttatagagacgttgtcattcattcttgctttttccacaccacatactttactatagtccaagtcatggcggatgtgataaagttgtgggagacatttgtgagggagagtcggatagattctcgaaattaacgggagaagttaatgtaacgtataacagttctcaactatgtgataagtacacaaaaaattattcatattggttgactattatgatcatatatcaactaaattaaacagctgtaaatgtacacaaatagccacgaagtagtgaggctaatgcagggatcaagttttgtctactttaaaaaacaataataataatccgattgtttaatcatctatatatccaaatgaatcggtttcttatacaactgtttgtcttattaaaacaatcctcattagttagcagctctgattatggtttaatgcatgctattgataaaaaaaaatataaattcacctttttttttttgtagacatttttaaaaaattcaccttatgatggcttgagtttacatttttttttctttgtcgtacttgagtttacattttacaaattaaaattttcgttaatttcctctatggtcaagaagaaaaggtaaaaaaaaaaaagactaagatatttataaattttgcatcaaggaagtgctgtagaaaataagaattccttttgtggaaaaaaattgcaaactttttttaatctatatattgtcgtttttttttcttctttggctttctatatattttttgtttttttttttgtattccaacttaaaaagttgtttatcagttaggctaattctaatattggctagtttattgtataaacataaaaaggaaagttttggtctttgttttattttagtgttagtctttgtttttctttttttgaggcgttggtctttgtctttcgtctatatatgatttactaagaaaacaacatgttcttaattaactgcacagctggacctagattgtcacattctattaagaaagtaattagaaaaaaaaagaggagagttagtcttattaaccgctagttgattaattagatatagtagctaacaaatgcttgtggttcttctggcttaacaaaatttaataataaccaatcatttataattcttaaagttcctttaattatgtaggattcataatcgtgcttaggttatggctggctcgaagcctgaactagttttttattcactacagctggactaaggtcatcatctccattggtgagatatttcaaaagtttctaaaaaaaaaaaaatgatattttattatgatttagcttctgtccaattataaacacacatatacacatagtctctcaatcattactctaaagtttttctgcagaaaaactattctcaatctctcttctatctctcacctactttattattattttatattttttagttaatgagaaactatatgagagactactgatagagatgctaagagagatagatagagagagagaacaagagacttgaatagttgactttatacattggaactggtctttaactctgggcagatgttataaaaggacatatttgggagcagacagatgtatgagctaaaacctgatttttactatctgatttgcttcttctttcattccaaagaaacccgatatggaaccacaccctctttattttgtgccacctccttatttaactagaactaaacctccatgtcgtctgtccgatccggctcagccccacaagctttgccgacggcgacaaccaactcatcctccactttctatctgctttacgtgcaaaggcaaacacttgaagcgcagtaagtattattactactgtgctacttgcaatttggaatttcacagaggctgtcacgtctttctgccggagatcagaagcgcttttcatccctctcaccccctcaccttcaccgccttagatcctgaatttaatgcttctatcatacaccaaaattggagggacagctccgcttcagaggaatcttccgaagagttgataaacgaagttgttgactatgatcatgaagacgctggtgatgatgctgttgctaatgaagacgatgatgaagatgctgttcctaatgatgacgataatggcggtggcggtggcgatatttatgctgtcgcttataatgatggtgcctctttgtcctatggaaatcacctgaaatgcaaatgttgtgcttctcctttagaaaagctatattatcattgttctacctgcaagttcaatcttaacttgacttgctcgatgagaccaccacctaccactatctcacacttgaaatttcatgagcacaccctcaccctcttccttgtgcgaatcacttggccatgcgatgtttgtggctttcttctaaacaaagacaccgacgatctcgtttacgcttgtctaccttgcagccttatggtccacagatcatgtatctatctacctcgtgtcattaagatcacccgacacccacatcgtctctctctcacttcctcccttcaacctggtgatttctcttgtggactttgtcgccatactgttgacgttaactgcgggcaatactcttgtgataagggatgccaatatgctatccattcgaaatgtgcaacatggagagacgtgtgggatggaatagatcttgatggagtgcctgaagaacccgaggagtatatcgaaccgccattcctgaagattgatgaggacacaattcaacatttcagtcatcatgagcattatatgaagctccatgtaaagaaaaccattaccgagaaagacaagttttgtgaggcatgcacccttccagtaatgatctctcagagattttatggatgtatggagtgtgattttgtactcgacgaagcatgtgcttctcttcctcgcaaaatatacaacccactacataaacacccacttaccctccacgtcgtccctactattgacacctacacggacccgaatatgcctattaccaaagtcatattcaattgtataggttgcctccgatatggttgtggtttccactacagatgccatgaaaaaggttgtgaagaatttctactagacgtcaggtgcgcttcccttccagatcctctaattcatggttgtcatgcacatgatctcttcttcaactttaccggaggtatttgcatggggtgtggtactagtgagtgttcatccttttttctcgaatgcattaaatgcaaatcctttttgggtattaaatgtgctactttgccttctgaggcacactacagacacgataggcatccactcactctttgctaccgtgactatatgacaagtcatcattggtgtgagatatgtgaatcaaaattatctacatattattggttttatacatgtgactcttgtaaaatcactctccatgtcacctgtttactggggaaagatatctacgtgaagccccactacaccttcgtttcagattcaagtcatgatgatcaatttgaaattgctcgcaatgaaggtaactctcggcagctttgctctaattgcaatttgcgttgtgcacaaacattggtattcaagaggagaggtgaatacgaaagtttttgtactcttacttgtttgggagattctttggactcataaacttacaaggcctgaagacagagaaacaacgtctgagtctgaatctgcatgatccactgaaaaagcctttcaatttcgtgtaattttatatcttgagagttaaatctatgaaacatattttgtacttatgttatagttttttttagtttaatataatcttccagaaataagatggcatcattcagccttgtatttgatgaaatcaaaatagatactcaaacattttaaccattttatatgcaataatagaatacgagatttagaattcttgttgtttattgttggaaaagagtctatttgataatacttgaatgtctacgtgaacttcttatatggtaatttaatacgtataaaaattgttaactggccatttcacacaaatttaatcgttgatcaggccaaaatccatacgatgttatctaacgataacggccgttaactagtttccgttacttttcaatacaacgtcattttactataatcgaaacagggaaattgtcatttaatatttaactttcaaattgtggtcattttatacatcaacttcacatgtggccattttatacatgacataaacgttgactaccagtttaaaatataaaaatgcattgaccatgctaagaagatatacctctatataagcctaaacattcagatttttgtataggctcgttcgagtttattctgccaaaattgttcaatttttcaattttaataaatatttcaattttaaaaaaggacttgaaaatagctgatcgaattcacgaagagactatagaaatttttgtttggaaacaagagacaaattgtaactacaaaaagaataaataaaaaaaaaactacagaatttaagggtgtgagtagtactttttctagaagaaacttttttcctcgattttttctagatccacaaaagaaaaaaatgttatcaaaaataaaagttcatccactaaaacaagagaaaaacaattccactcagttcttctacgtttttgtacattttttcacaccagttggagccttagatacttttctcaaatccaagtcatgatctgtaattactttttcgacaaaagtaaatgtaacatattctcaccttttatatagggaaaattacatttttagttcataaaatattatcgggtaacatttcaaacctcgaaagaattccattagtactataaaccagtaaaataaatttattaacactttaaacctttaaactaacttttcggtttgcaccgccataaaaaatgacggaacaattaatttttgtttatttaataaaaattaataatttttatttattggaattaataaaaatcctttaaaaaaaagacaaaactcatattctttgtttattcactatccgaccatgaaaaccaagcattctttaaaattagtttaaaggtttaaagtgttagtaaaattatattggtggtttataatgttatataatataattcttttgtggtttaaaatattactcaatgtcatttcaaatatataacaatataagattatatatcatgattccaaaatcaatttatattgattgtttgccacattttcatcaagttgatttgttttgttttttttgaactttttcttcataagatggtttgccaaaacattattgttttcacgatcaaatatattatagtttgattgcattttaaactttttgaaatcaacgtactaaactacagtactaatatttaactgcaaacggccaatgtaataaagttatgggaaacattttgtgaaggaaagattcccgaaaatagcgtgcgaagttaatgtagcgtaaaacaattctcaagtctcaactacgtgataactacaattttcttatgatcatatatcaactatgttttttttataccatacgtcaactaaattaaacagcttttgacaaaaaaaaaaaaagaagtaaattaacagctataaactgtacacaaatagccacgaagtagtcagactaatgcagggatcaagttttgtcttctctctctctttttagtttttttttaattaacctgattgttaattacatatgcaaatgaatcggtttcctatacaactgtttgtcctttgtcaattataatcaaacttgacattaaaacaatcctcattagttagcagctctgattgtggtttaatgcgattgacatttgacagaaccttttcaaaatagttaacagtacgatggtttgagtttgcattttacaaactaaaactttcgcggtgtacaaaaaaaaaaaaaaagcaaattaaaactttcgttattatcctttttggtcaagaaattgctgaaaaaaattgcgaactttttttcttcttagtctatgtattgtctttcattcttatttggtttcctaatttatttttttcttattctaaaaaaattgtttataagttaggctaaatctaatattgttcttatttattttgttgtattaatatcagtgttctaaaatacaagcatatacgatgtacagtaggaagttgtactacaaaatggttatacagttgttaaatacggtgaaagatatacagtttgtatatatagcaattatacgacctatatatcgtgaattccgcatatacagctctctttataaatgctaaaaaaaatatagatatgttattttattgttttcattcttattaattatcattgttatcatttttctattattttcatgcttattagttatgtaaaattttaaaaatattttgtaaaagggaaatttttagtttttttttttgtattcatgcttcatgattatatgttttattgttattaaaaatttgtaactatatatacatatcttcacatattttatatttatatattcttttaacaaaaaaaaatatcaacggtaaaatctcctcataaatagttatatatacgtttatatgctatacagttctttgccgtacgcttagggtaatgtattttagaacagctttggtttttatttcatcaaattattctctttttcttttttgaggtgttggtttttcgtctttgttttactaaaaaatcaaaatgttcttaactgcgcagctaaaactacattttttctttgagaaaaggaaaaaacaaaaaaagtaagaagaaaaaattttaaaagagattttttttctgtcggcaaaggagaattagtcttattaaccgctagttgacttagattagtaggctttacaaatgcttgtaaaaatagttacatttatgtccgaagattttcgattctctcccacaaaagagactcaactaatcccgttgacaatagggaaccacatgcattaattatttacaagcaagcagatacagacttgtcgatttcatgtaaataatgtgcttgcttgtaattattcttacttaacaaaatttaataataatgaatcattcctaatttctaaagttccttccattacgcaagattttaatataatcgtgtttagtttagttggaagcctaaactagttttgtcttcactacagctggattaagagagagataacaagaaacttgagtggttgactttatattggaattggtcttttaactctctgggcagatcttataataataggacatattttggagcagaacgatttattatgagttgaaaaacctaataattttactctctcatttgctaaatctttcattccaaagaaacccatatggaaccaccacctcctcatttttctagagctaaacctccatgtcgtctgtccgatccggctcagccccacaagctttgccgacggcgacgaccatcttatcctccactttccatctgctttacgtgcaaaggcaagcaattgaggtccagtgcatactattactattgtgctacttgcaatttggaattccacagaggttgtcacatctttctgccggtgataagaagctcttttcacccctctcaccctctcaccttcttctcctcagatcctaaatttgatgtatctataatacctaaatattggagagacagctccgctacagaagaatcttcagatgaatcgataaaccaactaactattgagtatcttggagacgttagtgatgatgacggcgaggacagccattctgatcacgatcttggtgctagtgaagatgacggcgaggacagccattctgatcacgatcttggtgctagtgacgatgacggcgaggacagccattctgatcacgatcttggtgctagagacgatgatgggaatggcaatggcgctggcgatgttcatgctgatggtgaggcctctttatccgatggaaatcacctaaaatgcaaatgttgtggggttcctttacaaatgacatattatcattgttctatctgcaagttcaatcttaacttggattgctcgatgagacaaccacctcccattatctcacacttgaaaagtcatgagcacaccctaaccctcttccctatacgactccctttgccatgtgatgcttgtggcttgtctctaaacgacaccgaagatctggtttactcttgtctaccttgcagccgtatggtccacagatcatgtatctatcttcctcgtgtcattaagatcacccgacaccaacatcgtctctctcacacttcctcccttcaacctggtgatttctcttgtggagtttgtcgccaaacagttgacgtcaactacgggcaatactcttgtaataaggaatgtcattatgctgtccattccaaatgtgcaacaaggaatgacgtgtgggatggaaaagatcttgatggagtgcctgaagaacccgatgagtttatcgaaccgccattcctgaagattgatgaggagacaattcaacatttcagtcatcaccattatctgaagctccatgaaaagaaaaccatttacaagagagacaagttttgtgaggcatgcacccttccagtaatgatctcccagagattttatggttgtatgcagtgtgattttgttcttgacgaaacgtgtgcttctcttcctcgcaagaaaaaccacccactacataaacacccacttaaccttcacactttgcctcttggtgagtctgccatgatcaataaaggtgctactagcaaagacatattcaaatgtattggttgcggccgaattggctgtggtttctactacaaatgcgatgaaaaaaattgtgatgagtttctcctagacgtcagatgtgcttcccttccagatccttttgttcatgactgtcatccccatgatcatcctctcttctttaacttgaccaaaggtaattgcatggggtgtggttctgatagctgctcatcctatttcttggaatgtattaaatgtaagtcttttttgggaattaaatgtgctactctgccttgtgaggcccattacacacacgataggcatccactcactctttgttacgaagaagaagaagatactacaagtgggcaatattggtgtgagatatgtgaattcaaattggatccaaagacatggttttatacatgcgactactgtatgatcactctccatgtcaactgtttactggggaaagatatctatctgaagccctgccacattttcaaagtaggtcttttttataaggaagttgaaattgctcggaatgatggtaattctcggctgttttgctatatatgtcgacttcgctgtggacagactttggtattcaagtggctaggtagacgcaaaagcttttgtactcttcgatgtatcggaaagtatgtgaaagacacgcgcgggtattatgatgcagttgcaatgggatattttgaatcttatccaacgaatctagttacatccccagaagcttccgattcatcagttattaagagtgcttttgatttcctatttagagattgattctgtttgtcgtgagttgcttaattgcttaaatcttattggattcagttgtttttggattacttaatcgaaacatttaaaagagatcttgataaaccattgtgaaggcctgaaggttattcataaccctaactaatgtagaggagataacgagtgtgacacaaagtctgattgagacactgaaaaaagcaatcaatttcgtgtattttcatatgttcaatatttgatttatgttatatgcatgatttctcctttgatagttaattattttgttttcggtttcaaaataatcttccagaaaaaaaaatagcatatgttcctatagatttgtgttagataaggcggttgtgtaacttttaaagtcttgaaacaagactgtacatctcagttcctgtacacttcttcaaacccttcccttcccgtatcttttcattgaaccggttgtagattttattttatcctactactaaattattgaaagaagccacatgccgtcatccaacaattagtatggaaatttccaactgtcataataatttttagtctgcttcatgatttcatagaaatcattaaagatcatggattatagtagtattaattctaagagttgacaagataaagtgataatttgcaaagacttccatcaatcgtgtttagtttatgtctgcaagcctggaactagtcctaaatatatctggattaagagagaaaacaaaagacttgcctaagttgactttgtaatggaactggtctttaaactctagttacatcttataaataaaaatgacaaatttgggagcagaaaaattcatcatttacgagttgaaaccatttatttgcataccctctcatttgctttctcccttcattccaaagaaacccatatgggactacgtcgtccttctgataatggttttaagccacctccttatttttctacatctgaacctacatgtcgtttgtccgatccggctcaaccccacatgctttgccggcggagaccacgatctcatggtccactttctatctgcttttgcaagcatttggagggcagtatatactattactactgtgctacttgcaatttggaattccacaaaatgtgtcacttctttttgccggagataagacacccttttcacccctcccaccctctcactctcatttccttaaaacctgaccttgatctttataagctagccagccgctcgaattggatttattccttttcagatttggaatatgacgatgagcacaaagacgatgttgctgctgctgatgacgaggatgacgatgctgataataatgatgttgttgctgctgctgctgatgatgacgatgctgctgatgttgacaatgatgctgatgacgacgatgctaatgatgacgatgatgatgatgatgatgatgatgatgatgatgatgatgatgccaatgcctatgcgtctgcctctttatcagatggaactttccctaaatgcaagtgttgtcggaaacgtttagaaagggaattctatcattgttccatctgcaaattcagtcttaacgggaattgctcaatgagaccagtacctcccaatactatctcagagttgaaaagtcatgagcacacgctcaccctcttccctatacgactccctttgccatgtgatgtttgtggcttgtctttaagcgacgctgaagatcttgtttactcttgtctcccttgcagccacatggtccacagatcatgtatctatttacctcgtgtcattcagatcacccgacactctcatcgtctctctctcacatcctcccttccttctggtgatttctcttgcggagtttgtcgccaaaccgttgacatcaactacgggcaatattcttgtaataaagaatgtcattatgctgtccattccaaatgtgcaactagaaacgatgtgtgggacgggagagatcttgaaggagtgcctgaagacccagaagaagatatcgagccatttctgaggattgatgaggagacaattaaacatttcagtcatgagcattatctaaagctccacgaaaagaaaaccatttgcgaaaaagacaagttttgtgaagcatgcacacttccagtaatgatctctcagagattttatggttgtatgcagtgtgattttgctttagacgaagcatgtgcctctcttcctcgcaaaaaatacctcccaatacataaacacccacttaccctccaacccttcgctactggtcagatgcccttgtcgccgtatctgctggtttattgagagaaagaagaaaaacagagtaagagagacatatctcttctcttgtgaagaagacaagaacaaaactttgttttattgaaactgaaacttgttaatctttacatgacgatacaaggtgtttatatagaaaacaaatagacacaacaactcaattagttctgtcacttcatacttgtgtctctttctacttgtgcctcttgagtgaaacaacacaaacttacaacctttaactgaaaactcaattaccgaccaacagtatcaagatatcaacaatatgttcagatgtgatggttgccggcgaagaggtgttggtttcttgtataaatgcagtctaaggtattgcgattttgagctagatgtcaggtgcgcttcgcttccagatcctttaagtcatggttgtcatccacatgatctcttcttcaacttgaccaaaggtgattgcatggggtgtggttatgatgactatatatcctatttcttggaatgtattaagtgcattacctttttgggtattacatgtgctagtttgccttctgaggcacactacagacacgataggcatccactcactctttgctacggggaagaagatacaacaagtggccagtattggtgtgaaaaatgtgaatcaaaattagatgcaacagagtggttttatacatgtgacagttgtaggttcactctccatgtcaactgtttactgggggaagatatctacatgaagccccgccacatcttcaaactaccttctgggcgtgatgttgaaattgctcgcaatgatggtaacagtcggcagttttgcttttcatgtactcttcgttgtgcacagccttatgtattgaagatggcagatggagatgaacatttttgtactcttacatgtatagtacgttctgtttaagatatgagataagtctgaatgagcaactgaaaaggcttttgttttattgttgagaatttgatctaagtctattggttttatcttttatcttttttactataatgttcaagtttgtttttgtctgaaatccttacacaaaaactccaatctctccacttacatgatcaatctcatgtgatttggtatgcggttttgtcatttgcaattaggatcgatcgccattcctattctgaaactgtagcagtgatgctggctacataagggtattgtagaataacaatcttgtgtagtttttctggtttctgacctatgtcaattggaggtggaaaagaaatgtgtagatgccgttcagacaattatacaaaaggtccaaactgatcccagtgaacagtggttgtgcaaaaaacaaaaaaacgggcaacttgcaaaaaaaacaacccaagtctttaccaaacgcacaaaacggttctgagaagaagtcaaaatcataaccaaccaaaaaaagccatcgcccaattcaacgcagccttgagagagagagaatcttggtaatggtgttcaactgattaattgaaaaagtaagagagagaagagaaaatagagaattaggttcttaagaagaaggctttctttcaaaattcaaatgagatgtggtaaaatataattggttattctgtttgtaattaaaaatataaataaatgaaataatatttaaatgattaaaataatagaaataagggactgaatatgtgttttatcattggggctcctgtaagtcctaaaatgtaaaaactacatattaaatcctaaactctagactttaaaacttaaaccctaaattctaagttttatatgtacataatgtataactactatttttggtccatgataatctaaagcacgcttcttaatctgaaagcgtaaaatattattgacatcgatgtgttcatagacaatcatacaatatacactcgtatttatgttttgttaatatgtaatcgtggataaaaaaaatataaacattttcataaataaacttttgtggatatgaccaatagaacttgtttcatcatattttatcaacatcttttacataacgtaacacttgttttatggatagtattatcaaaacgcaatcattttgaattatcaaccgttaacacacatccaccaaactctgaacatgtggtcatttcacttatttcgaattatcgaccatctatgcacatccaccaaactttgaccacgtggtttgcataatagtaatttgcatacaaatgagaaaggcaaaatagtaatttgtatagagatcatcattttcttgaaactctagccgcctatcactctgcttatgatttttttttggtatttcttacgtttttttattattatttgctcatgtattttaatgaaaatagcataagattacctttaaattacaaatttatagtaagaatatatgtttgggttcttaatttcaactctctctctttctttgaggaattttaacaaacacttggtgggcaaatctaagatttgtaaaaagataaaatttgaccaagacaatgatggatacactaagagaagaagaaacctagcaaaaataaaacttttaaccttatgagattaattaaaaatggagaaattgaatcgaaatctggaaaatctttaacttttaagatttaagaagaaaaagaaaaaaattgatctacttgttagtgtttttgatgaaagagaagagagaaaatgtctcaaacgatattttaaaaaaaaaagatatttcaagtgttgtgtttaattttgtaaagagtagagaagaaaatgaatgaagaaagagaaaaagtaatggttgtaaactatggttagtttgaattggttaggttgagtcaaatgtgtagtagtaaaaaaacttaaaaaaatgtatactcctcctaaagtgtttcattgcctaattgagtttcaaaaaagtatctccttgtctaatattctctatgtttaatcatctatatatccaaatgaatcggtttcctatacaactgtttgtcttattaaagccatcctcattagttagcatctctgattatggtttaatgctattgataaaacttttaaaaaatttacattatgatggcttgagtttacattttagaaattaaaaccttcgttaatttcctctttggtcaaaaaaaaaaaaaaaggttaaaaaaaagactaagatatttataaattttgcatcaaggaagtgctgtagaaaataagaatacctttttgtagaaaaattgcaaacttttttttaatctatatatattatattgtcttcttttttttttatcttctttggcttcctatatttttttttttatagtattccaacttaaaaagttgtttatcagttaggctaattctaatattggttagtttattgtataaacataaaaaggaaagttttggtctttgttttatttaagtgatagtctttgtttttttctttttttgaggcgttggtctttcgtctatgatttactaagaaaacaacatgttttaaattaactgcgcagctggaactagactgtccccttctattagaatactttaaaatgagagttagtcttattaactgctagttgactaattagatatagtagcttacaaatgcttgtaattcttctggcttaacaaaatttattaataattaatcatttataattatgttggattcataatcgtgcttaggttatggctggctccaagcctgaactagttttttattcactacagctggattaagagagatagagagagagaacaaaagacttgaatagttgactttatacatcggaactgatctttaactctgagcagatgttatcagtattaatattttactaagagtttggttgttaattccaaagttggttcagttatgtacgatttatataagggtaatatttcaaggattgacaaagtgaaaagtggtttcacgttttgtcttttcagctgaaatttgaccattttgcccttgctgctacagctgagaaactgttgaatgtacggtttagttagtcaggtttagttaggtacactgttccggtttagttgaaattatttttgtttcacgttgagggtttggatgtacagttagaagggagattttttccattaaaaacgaaatgacatcaacatttaatggcccaaaaaatttagacgtgattcttgttagaattaatgcaaaatcatcattacatgttataatattataaaattattgataataattgttaagttaaagatgaacccaggaacaaacattaattgcgaacaaacattgatgctcaagaagtgttgatcttgtttatttacgaagtttggagccaagataagcattatcgtgtaagtaataaagttttaaagattttttttgttataacacatatgatcttcattgtgttcgaaatcaactttgttttttatagaaaaacccagaaatattttattttcaattttgttggttgaaaatgataaatgtgtaaatacttatgtttataagtgtgtatatcgaaattctatttgtttttgtatatataatcatgttttcagttgcatttactgggtttctcctgaatttataatgttgttgggtaatggatattcctgtatttattatggtcggtgagtgaagatgcaaagaagaataatgaaaatttaaactaaagaaagacatgtttggtcgatgtgtacgtgttaaggaaaacatgacgtacacggaatttgtacgtacactaagcgaggctttcagtttgaagtccacagagatcaatcccataattagttactggatgccgggagagatgttagtgatgatagatactaaacgccttcctgtctacattgacagtcaagtggggttgaatacgttctttatgattcgtggtaggtatccttctctcaacttgtttgtctctttcattacaaccgtcaagacactcgagaataatgtctctaggactcatggtgacgatgctgaaagtgaccgtgtttcaaatgttgatgaaaataatgaggccgtagatgagcaagacgatgttgaagacgataaaacagatgaggatgaagaggagggggacaacgaagatggtgatgggtatgatgattatcagggtgacgatggatctatggggggaagtaccctcgatcctactattgatggtagtgaaagtaatggcgaagattatgattacaacaagtggaacgatgtaattgttgaagaatatggaataggaaatgttgaggagaacgtcattctcataccaggggaattcagtcgtctgttggcagagtgtacgtacacaagttagcgtgtacctggtggagataacatttcttactcgggtgaccgtacaccagctgtgactccaagaagtatgtgtcaacatggtttgtaccaatgtacgtacactataaattgggaagtgtttttaagaacaggaaaatcatacaacaaacaatgtcttatctcagtcactgccaatattggtttaatattgtatcaataaatttttcttaataatttaattcacaaacaaagatgtacgtatattattacacatgtacatacattaatttaccaacaaaaatatacttacattatttcaccatctatttttattaaattattatgtatgtattgagattattgagatataagaataagtaataaaatagtttgagttattagaaatcgtcccatatacgttccaataaataatttcgtgtaagtacattgtaaattgaatatacgtacacggaaaaaattcgatgaagggtataattgtaattttccagtcatcttcaacctgtgtgtccttttctgcaaacctaattttgcggtcgtctttatcagttttctcaaaatctcatttttttttacgtttggattactatttataaataaatcttgtaaacctaaagtatctttagtctaaaaagttaaagtgtttgaatgtatgagctttttttttgcattttgttcatctctgaaaacaagaaatttgttcctcaattttggagttcaatggagagatgtcgaaatatgaaggagtggataatgaattttcaacttctttctacttctctctcgaatttctccgtctctttctctttttcttcttcttcaatttctttgtttcagtttttttttttttctcaaaactgaaccacataaactaaaccgaaatcaagtgttgtgtggtttggttgctcctattaagaatattttggtctaaagcaactgaaaagacaaacggtgaaaatcatatctcactttaacaaataataaaaacaattcttttttcatccacttatatgaaaatttctttttatataatcttgttttagtttatggctattggctagcgcaagcctggaatagttttgtcctaactacagctggattaaaagagagagaaaaaagagagactcgagtagtttgacttgggctagaaggagcataaaaatttatacattctctctcatttgcttcttccttcattccaaacaaacaaatatgaaaccacctccttatttttctgtatctgaaccccaatgtcgtttgtccgatccggctcagccacacaagctt

SEQ ID NO: 94 - DNA, 109160 bp, Arabidopsis thaliana
gaattcgcgtactcctaacattgatgaagtcatgaagatgtccagaatgtaaatgttggaattgtacctttgattgaaactgcaaaagagagaagaagaatccatgagaagaagaagatgaagaacagagaaagaagcattagcaaaaggaagaagaagacgttgtcgcataagagacgtcgtgaagagaagagtcaaaggaagagaagaaagtcaacaaaccaaatgggtttgtgttttgtgagttgggcccataggtgatgagataagacccatacgaaataaaataagtgttttgtggttgtttagttaaggtccaacaagaagaggttgtaataactaaaagtaaactaaggcctagttagagtctaaaagtgtgaatcaaggaactagtgttccattgtgtagggtggctacttgtcttgtcttgtgtaagagtcatgattaggcctaagtgaaaatgtgtaagtgtgttgcaagtagaaaagtagtagtatatttatgagagtgttgtgttgtgtaagatgatccagtgtagtcattaaaattcttaaaacgtgttcttgtttctcaaagcaaaagagcgagaaagaaagtgaacagagatacaagagagtgagagaatgatggaagaggtcagaattacaacagtaaaacatcgtcctgttgagtaatagtaagccttaaatgccattatgaataattaaacgttaattattcatcacaaaacgacgtcgtgttgagtgtaggtgacgaaacagttgttttcttctcccttccattgttggtctttgaagagaagcagaaagttttgagaagaaaagatggaggaggaatcgcgagatatactgatgacgacgttgattgaatctggggtttcgattcccggagatttcacttccgttagcgaatttactccggaggcgttagtatcgatttgtgctcagctgctcaatctcattgacccatcggcgtcgttttccgatgagctccctgattctctccccgaaaggtttaggatctgcaccgatatcgctcattctgtgaagaatctaggctacatcaacgatatgagttattataaggtaccatttcatataatccctctttggatcgcaaccagaatccaatttccattggttgatagagcgaattgttttgggttaaaggaaataactttagtgtttaatagttctcaaggaacaagcttttatagttcctgagagctgtgatagtcctttggtcttcgttagaatgttctgaagtttactttacgttctggcttgtgtggcttttcttatttgtgtgaaaatcatgctgaaacagattgtatgtgttgcttgcggcagtttctgcatccatctgaagatgattcttataggttggttaggtttctggttgagaggctttcggagattagtgaaggaagaaaaactttgacggctggtgatatagctagcaggccaaagatggagactttcagagatatttcagatgacatgatggtgaatgaggacaaggatgagactttcgatatgcatatacagaaggttgaagctgtcttaaaagatctcacaatgactagtgaaaaatctcattcatctgactctctcgcaaaaaatacctcagccaatgttgacttctcctcccaaaagacagatgatcctgttactgatgtacgttctgatctttctttgagagattcatctagatgtgaagaaaattcttatgaagacccgtttgaggtactatttcttctacttattgtgaccttatctcttttctctgtacatgagcatcagagcatatgtttgaacatttacataggaatagtgattttaaaccagttttataaatgttgaaggcgtataaaccttttatcattttttatggtttgtagacaaattatgagactgttgagttacagaatcaacatgatgtactcttggaggaactggaatctggatcttcacagctatgcagtcttgaaagcgagctggagttgttgcagatggctgcggagaggttattggatgacaaaaagccgggtgggtcatatctcgaacagcttaatcaacaactagtggtcaaaaggtgtaatatcatggatcttaaaaagcaatggtatgaacaatattatatttatttcaagttgaaagcatccatgcattcagtttcatggacaacatcaggacatgatggaagagttatgtatcgcatgataactaagtatatcatgtcttccttcagggacgatgtaaggctgactctggaaactaaaaagctacttctcttggaccaacttcatgtggaggagccagaggctaaagagaaattccataagttgagaaagactgaactggatttacaatctctctcatcagaaattcaaaagaggtaaccagaaactcttactacatggctcttcactgtctgtgactttgactgtgtgctattgattgctactttatctcttttaattgctcttcattttaatgtgttaatcttttccggacagggaagatgaacggtgtaacctttacaatgaacttgagaggcagccaaaagcagcgccgaggaaatcatatatacatgggattaaagaaataacaaaaaatagccgtaaactggacactgatattcagaggatttcaggggagaccagggagctacaattagagaaaaactcaatccaagaacgcctgcaccgatcatatgctgttgtggatgaaatggttacaaggtatgagcttttgctctgacatatttgaatcgtcttgtcagatatacaccaaaagaaacgttgccatgtcgctctggctttagagaacatgcatacccttttataatgtggtgatgaggacggtttctctttctctgcagggaagtgaagaaagacccagcagtacgacaagtctacaagctactgaccagtattcacagtatatttgagcaaatctctgagaaaattctcatgactgatcggtttagaagagaaacagttgattatgaaaagaagttggggtccatcacagctcgaggcatgagtttggagaaattacaagccgatctggatgccataaggaaagaaaacgaaagccttaagaaataactgattatgtggcctggggaaggaggattaaattacacatttttgtagagaatcatctgttcatgtgcttccatatctaattgtttgtttataggaatgtgtaatctttttctcagatacatggaaaatctttctgttctgatcaatctcgactactaaagagagcctaaagctgattcagctaagtcacagcaaatagtttgtaaaaagctaggaatagagagacaaactaggcaggcatatagagagcagtcacagcttcaaaaaacgtttccaaaaggatcttcccaaacattctttatgtattttctgtatagtctcacaacaaaaaataaggtaaaaggtttgctacattgatgcacatctttcttccctcttgtaattgtcaacctaaatttctctggggatgatggttcctaagtatttacacccaaaaatccagacttctacatctcttttacgcatttgatgtgtatctttatagctgcttccccttgacctaatagttgttaacccaattcgttagagcagcttgaggttgctgataagcaatgtgcgggtgtcctatgggttcacccatagccgttgttgtgtgtggcggtggtggtaaggtctgatatgtagttgaagcagctgccatgggctgtgttggttggtgcattcccatgaggccaccatgaccagcctgcacgactggaaaaccaagtggctgaccttggtatgctaggttatacattggattcacctgcaggttgccaaatccctgcccaatccatgcagctgcactttcagtctgcaacaacaacatcatgtacaccaatgttaaactatatagtctacaattatatatcatcgcaaggatagaacagtaaaaaaactgaccaggtgagatgccttttcttcactatggatagaatttaaggtggttgtagatgggatgctgctagcaaccatgggagaagtgtgtaggtaagggtttgtggtgggagggttttcagtgttgtcaactggttttgcatgagaaggtgctgttagagcagctccttgtggaaaataagactgctgagggatcccgtttgggctcaagaactggtgaatgtacggcggtggcatataatacggtgagtaatagccgtaagggaagaaattgggagggtattgctgcctaagaaaatttgtctgttgagtggctgctgctatggagctctgatctggaggatatgatactaatgaaataggtggagagttggaatttccgggctgcaaattagagaaaagcagttatcgaaaaagtagagaatagatacagggattgtttagagtgcatatactgtgacaagatataccacatacctgagtctccgctgcttctgtgttaacgggttggcctattgctgacaacgaggggacaagaccaaacacactgagtggagcttcttgaccataagcaatttgatgagtttctgtgtttgataaagcttcctccttcggtacttcttctacaggtgggacaatgtgatccgagtgcaccacaggctcagctccagttgcagaatttgatatcccataatccttatcttcagaaactgttgatgtttcttctctgcacaagaagttatggtaatgagaatgagatacaaacatgaaaattggagaatacacctctactactatatcacaagacaaaaccttctcatttccaaaattgaacttaaaaatgcatatttttatatttcactcaactgaaaccagacaataactaaagcagacaatatgtagagtgaaagtatctcagtcacgaacctagccgaagcaaccccagtaataccattggtagtgggagaagattccctctcatcatcccctgtcccgtgagaagactcaaaatttgagtcatatcccccactagcaccattgctagaagatacctctttcacaaaattggaatcaaaactgccaaacgtcagaccattttgcagtcctttggcaacctgaaggtggaaagggaatgttacgtgtgactgttcgctaacatctggcttaggaagcgattgatttttgccttgtttggacgcagtctcaatttcaatggctgttaccaaaagaaaacagaagctgaatcaaaactaaaaactacttcaatgaaaaatttgaggcaaactaaaaattcatgaaaaaaagtaaaaataccttgatctgacttgctactgcaacgtgaagcagaaatcaaagaaggatcatcttgagctttatgattgctgacctcactcggaatactagcaggaccagaaaccctgtaaaagttatcctataatacttagcaacctaatagaaggaaaataaaaaagcatccataatcttggagacatagaagaatgatatggaaacatactttgtttcattaggtactgtgatgttgcttgctttgttagtggcaggctgagcagttctagaacctcttgttacatgattagctccattttcccttttaaaagaagcatttcttccactacctatatcggaacgttaacaaagagcttaatacaggaaagagcacgacaattgatatttgaaaggtatcaacaaaagaacacaaactaccttgataagagttacttgaagcaaagttcctccgaccacctctgccacttggttgtgtaactggcactataggctgcagaaagtaatcatatgagataaagataaagaaagctatagacacaaaactgcagataaagaaagtattcataacaaaaaaaaagaacacttgcctccttctttttctcccttttacttctcacctcatgaaatgtatctgcaaaatttcaaaattaacattgtacataagaaaatggctcataaagaccaaagttgagccaaactaaaatacaagagttttcacgaggctgacccaaaatctgaatgttttgacatgtagacacataagacaaatagtacctacttaataatccagatcacgcccaccagaatccttgaaaggtacgaactcatccccaaagtaaagttacaaaaagaaaacaagatctctttcaataattctaagtacctttccagttaaatggtaaggaactatgactttaggcataaaatctgcatattcacacaccaggaaacaaagattcgataaccgaatagctcaaggcaacaaaaagaaactcaaaacagtagcgaaccaaaagcacatcacatgatcttcgaaaacagatacaaaccctatcgtacaattcaaatctaaggagggcaaacccaagagtcacgcaagtcacgctccatcaaaacaaaacaaaccctaagctgagaaagagacatagatgatgattcgtacctaagaagaggagcttctgagcggtctcatgaggatcattgaaggaatccttatagacggcaaagatatcctcatccgagtgctgctttccggtatactctctgattttctgaagggttttgcggagatggtaaggaatcgaaaccctagaggagccgccatcggaggagctcatggttcttgttaagggagagaagcagaagcgggaggagagagaaattgagagagcaattgaaattggaagcgcgagtccctccgtatttatttatttacttaccaagataataataatgtaccgcttcactgtcggtaacttttatacgctcacgtcacttcattgcacaccaaaagactctttaaagttttacattttgtatgacttcaacagtcacccaattatagagagacacgtggacgatgacccaaaaactgtgaatacgttcacactcagtttgttttgatattaccgtatacatatgtgtgaatccgatcataaaagtactacgtataacagttgaaacaaaagaaatcaaaattttcgagggaggcaaggcaagctcgcactctctcactcatcatcggttccaaaatagcggtctccaaactcgcccataccaggaacaactcggaactcgtcgtttaaaccgagttctatctctgaagtcacaatctttatccttgggaactttttgcacaccacatttactccttcaggtgcctataccatacgtaaccatacattcattttgactgtttaggctatgcagataagttggaaaaaggttttggtttgttaaacttataagttgcaaaaaggttttggtttgttaaacttacagatatcaaattgagaaatatgatgttggattcaggcacgcctttacttatgagcagtcttatcgcttgcaccgccgagtttcctgctatacaaaacatgcttttgttatgtttctatgtacatagtcttttactctaccagtatagtacagagttcacaaaacaatgagtcagacctgtcccgaggattggatccagtaaaagcacatgcctttctgaaatgtctgagggtagcttctcgtagataagctggtgagtgccatttgttgttagtaaatagttaggagaagtgatgagcagagaaagaacacaaacctgttgaccattgtcgccttctctatgaatcagaatcttcccaattttgatgcctttgcagcatgctctaagagcgttctccatactctcaccgctatgttcagagacaaaatcattatatagtattgacgttaactattagtgtttaagctgatttctttaccttctgataactgagacaccacacagtttcttacagaagtccacacccgaatacacagatcctacaattacagaaatccaaaaactcaacatgagtttataatattactatgattggagagttcttctccaagattgtagtaaggtataatctttttcattagcttacctgttggagtaaccacttgcttttctgtaaagggaaggtgtccgaggccatgttcaacgacctggcgagagctcattgttagagtcagcaaacatggtgaaataaaacgaacagaaatcaaatcttgcacccaccaaacgtatcaatcgatcggagtagaagataaagtcatgctttgttgttttagagtcgcggattagagtgtgcataccacgtatctgcaagcagcggccaaaggatcagtcttttgggtgactaaacaagaaaatgattgttgttgagtagacgagaaaaggggaataagtaaaacctgaaaagttgattgaataacataaagatttggataaattttacagagatcatgttgaccgagcttcgtatggatgtgttgcacaatcaaatcaatagcaacatggttatcaccacctcggggaattattatatctgcgtatttctttgttgggagtatgaaatcctcaaatgctggcttcacaaactttgagtactgcataagagtttcacacatgaaaacataaataaagaaattatttgcaaaacaagaatatacagccacacaaaacctggtcaagaacagtggcaatatctctgcccttctcaacagtatcgcgttttatccttctcgctagacgcacatcggcatctgcatagataacgccatgatgtaaaataagagaccaatgtgttaccttcatgagtacatatacaagtgcagcgtctcatatatgctacggatttgactacataagtgttaacaggtttggtatgggaaagacctgcgtctacaaatatcttcatgttcatcaaatctcgcacccgagggtcatggaaaatgagtataccttccagaattataacgtcagaaggattcacctgcaaatatatcataaacagagaaatattagtataagcatgattcttatataggctatgatgacaagtttatgtatctgacaaacaagagtgcatgtaattagtatggaatacacaagaaagctaaccacttgatcatgagtttgagcttcagaaattagcagaaaactttaaatgtcagaagtgactaattgacaagtaaagattcttacccttctaggtggaaaaacattgttcttgtaacttttgaagtcataattaggaatatctactgcttgtccttttcttaacttctccatggaagacaataattgctcagtatcgaaagcgtctacaagacaaggaagcatatgacacacaattcgtagattcaaaaggctaagggacacagaacagcgtgcattagatcaaaagacccattagtttttcaaaaacttactaaccaggatggtcaaaattgtaatcatgaactcttacaagctccacttcatttacattatggtagaaagaatcctgcaaacaaagatcaacctcggtgcattatatatcgacttacaagagctttaaaaaaatggtttatattgttgcataatcatatcgaggacaagaatcacctgatttacaacaacagctctctgatcatgcagttgctgcataatcatatcacagacagttgttttcccggatgctgcacctccagcaactcctgaaaacaacattttctatttaacattttctgtttctaaccatctttggtaaactaaaatccaccacgactctcaccgatcacaaaaggttgaccatgttcttcttcctcagccatttgctctggtctatttgaagctaaaccatccatttgatgaaatcctgagaaatgaacctttgaggatgtctctattatattcacatccgactttgaagccattcctacaacacaaatatgcaaatctaaattcacatgaaatatgccaataaggaaagcaaagctacctttgttgtcaccatccaggaacaaaaaggaacactttccagtcaaaaaacaattcctcaaaagaatcaaactttttagtgatattagttagatgccacaagtgccaatgccgtgatacccattttctcaaatccagtataacacacaaaacaatcaaccaatcatgataggccaccagataatagtaacgccaatcctaaacatgaaaccgtaactttttcccgggtaaaaaagggaaagaacaaaaagaaaacagagatcagaagagaagaaagctagatttttttagatcaatacatgcaaaagaattataagaaacgtttcatcatcatataaaccaatataaaccgaatcaacatgaagataaaaactcacgaaaaaagaaagagggattgaataagcttcgagatcaccgattagatatagctaacaaaagagcttccaagttccagataaagaatctaaacatataaagagagagagacacgagcattgcctgttaaactcgatgcacagacaaaaactggacttattaaaaataaaatatattgataacgtatataagtgtatgtatatgcgttgaaagagagaaaagaatgaagggaggatgcagcggcggtgacgggtttttgcggaaaccggaaagtggtttttttggttttacgaaagtacccttcccactgagggacgtggtagtggcaattctcgtaaatgtgagagtgtttgagtccctaaagtagagagtgtgatcaaggatccacgtcagatccgaataggatgtaggacctactatcgaaagctgcagctaaaaacgcagtgatatagatgcgtgtggtcgaatgcaatcttacgttactgcaaaattatttattttatactattttggattacgtctacaataatttgtttattctgtttttatccataacattttaacttcatatgtttcctccaaatctatttacctgaattttgtttttcgaaatatataatttaccaattaatattagttttctcaacatctacactaccaaaggatgctacaatgtaaaatattatacacaggaacaaaattagcatatttacaatttaatctgcacgattgtttgtctataaaatttgaaggatataatcaatttcttcttttagttccgtagatttttttatgattcattaatgaagtttagaccagagattaggatccttaaaaaatttggatgagcagcttagaaccactttaaaaattaattttgtacatccaaaattatcgaaacaaactattacccaaatcaaagatattgcctttacttcaaaaactgattacagttttgggtatgttttagcactataccatcttattcttatcataccatgatcttcttggagaattcatctaatactattttggtcataaatcaacatttcaaaaaatatccacgttacaattgtaaattgttattacttaattatgtcttaagttttttaaccacaccaaaaaaatattaaatcatatacacaaacatttttcgaatgtatttgttatttgatttctcacacaaatgtgaagaagtatgagggtgtttcgatacacttttagagtttgtttgtttttttgtaatttttttctcacaaatgtggggtgatgttattatatttgaaaatttgtggaccttaatgcaaataacgcctctaatagtagattcgtgaagatgataagctgacaaaacgacagcgtctaatatagtttcgagtttcttcgacagtggcaatgttttcatcttcgattaggttaatcgtatctgggttccaccggactcaacccctaaaatcgccggtaaattctccgagcgtcttcatctccgtacctaaattcttcaactctgagtcaaaatcgacgggaactggttcaagatccgtagcaatgagcagcgttgagaaaaccgggtcggattctggagcaatagagaatcgagcgagcaggatgagagagaagcttcaaaaagagctcgaaccagtggagttagtgatcgaagatgtttcgtatcagcacgctggtcacgccggaatgaaaggtagaaccgacgatgagacgcatttcaatgtgaagatcgtttctaaaggattcgagggaatgaatttggtgaagagacacaggttggtctatcatttgctccgggaagagttggatactggattgcacgctctttctatcgtctccaagacgccgtctgagtctccttctaaagactagtgtactggtactgtttaatgtatcttctgtttctgttatcagagtttctcatcaaactctgttcgattcaaagattgaatttttaccatcaaagtgctctgttttggaatttattgcggagccaaagtcttcatttttacatacgcttgaggttgtgtgttggtgtttctggaattgtgtgttggaacaaagacacttgcttttagttcaattcgagttctgtcttttctagcattcaaaactataatggtcatagcttgatgaattgaattaaggctccatttagttgaaagtccaatcaatggtcatgtgtttgaattctcaaaggaagctcgattgtgccgtgtttgttagcttggagccaaaagggttgtttttccatgtttctgtctctttcttcttcagattattctcccattgtcatcaatggcgtttgcgtcttctaatcgctaacgctagaaacaaaacgccttttccaatagtccatgtcaccttcctttagcaacaaatatatgtactttatgggcttaaaccaaatctaatcagtgatcacctttttcttttgtgggtaaagtgaatcgtcatttccattgtctggagaagctaaaccgtccctcttctatacatcaacagagcaagttacgttagtatatgtccgaagataaataaaacgaaaaaaaaacaactttccaaactatcatcattttcactacattggcgatgagggagctctcggagcttaacagagacagagacggtgatgaagaagtgtgggtcaaacactattcatccaagcaccagatacttctcgtaggcgaaggagatttctccttctcttgcagcttagccacttgcttcggctctgcttccaatatctatgcttcctctctcgattcatacggtaacacttggtttacttacattgtaagagttattaaggttttgatttcgttatcacttccatttctgtgatcacttactaagtttttgaacttccggtgaatgatttgattattcaagatttacactgttttactctctgtttatagattataaacctgttaacaaaggttgcagctttaagctcgatttcctcagttgttgcatgtcttttatggtaattaaaccagatgatgtggttagaaaatacaagaatgcaagatcaaatcttgaaacattgaagagacttggagctttccttttacatggagttgatgctaccacactgcattttcatcctgatcttcgttatagaagattcgatcgtgtcatcttcaacttcccgcacaccggtttccacaggaaagagtctgatccctgtcaaatacagtaagttcaacattttgaaattacaaacactttcttctcgcagttgaatgtgtagaccagctgctgcaactttgaggaatttgtttaaagattttttacatggtgcaagccatatgctaagagctgatggagaagttcatgtctctcacaaaaacaaagcacctttttgttattggaatctagaggagcttgctagcagatgctttcttgtgttgattcagcttgaggcgttcgagaagagaaactaccctggttatgagaataagagaggagatgggtctagatgtgaccaacctttccttttgggagagtgcagtactttcaagttcagattctctcgtgtcgccaaggaactttatgcagagaaggtgaaggaagtagaatcaaagtgtccccgagagttatcaactcgggcgatgaataagaaacatgcccgttttgaagacagctcgatacatcttgaactgccaagatgcactaaacggttcaaaagagtttctcttgaaatgcataatggagaattacaacgaatggtgatacggacgaggtttcctcatcactacactaaagaatcatcagaaacacgccgcctactttgtcaagactatgcagtacaagctagccaagaaccgttccctgaacgctctctccgattcagaggagtttctcatggaattcataacgggagagtacgaaaaatgttaatacggaacagcactggagaatcaagaaaactaagaatgaggaggcagaggaaccttaaaatcaggtaaatatatccttgatagttgcttatattatgaaataaacatgctaaatcgatattgaaattttgtaggtgactcatatccaataaacttcaaggagcttctgaggataactttgatggaaagaagatgactgaaacttggactcactaacaaagctgcattctatgttctcttttgtttattaggctgattactgacagctcaaaaccgcaatgctctatatggagataatcttttgttgtaattgtgtgtatttatctggatgttttccttttggagattatgtagttgaaatgattgtgagtctcgcgacttgcattgtggagaaaaatcccataaatctcttgtgatatatccaactaagaccctacgccagaaggtttggtaggacgcattcttaacgtaatacagtattcggagtaacttgaaaatgttattgtaaccaattcttgtagtctgtagactattatatactaagcttaaccactattccgagttacattggaacaactcatagggttttgaatggaggttgggtacaaaacgaactaaaacatgagcggactaaagtatcatatttttggggcgggcactaacacacacaacctatatacagaacgcattagcttaatcaacagaatcaattttgtgatggccttttgttttggtttcgctagatgagaaactgaaccgtctctcttcttaaatacaataacgttacttttgttattttgaaaattgaaaattgaaaataaaaccttccaaagtagcatcctttatcgctgcaatggcgatgagagagctctcgcagcttaacagagacagcgacggtgatgaagaagtatgggtcaaacactattcatccaaccatcagatacttctcgtcggcgaaggagatttctcattctctcacagcttagccactctcttcggctctgcttccaatatctgcgcttcctctctcgattcatacggtaacacttggtttacttacattgtcagagcttttagggtttttttatttcgttttcgcttcagttttctatgttttaggttttagggttttatgtcactattttagcaagatatcatcactctttcagtttgatcaaacttgtctctgagaagaatcgaaatcaatttctagtgcaattgtggagcttccggtgaaagatgtgatttttatactttgtactgattataaacctgtttaaaggttgtagctttaagcttgatttcctctgttgttcatggtgattgaagcagatgttgtggttagaaagtacaagaaggcaagatcaaaccttaaaactttgaagagacttggagctttacttttacatggagttgatgctaccacactgcattttcaccctgaccttcgttatagaagatttgatcgcgtcatcttcaacttccctcacgccggtttccacggcagagagtctgattcctctcttatacggtaaagttcaacgatttggcgttatagattcgtccttcttgctgctgaatgtgtagaccagctgctgcaacttcgaggaatatgtgtgaagagtttgtacatgttctttatttgtttgtttgttgtaggaagcatagagaactggtgtttggatttttcaatggtgcaagccgtttgctaagagctaatggggaagttcatgtctctcacaagaacaaagcacctttttctgagtggaatctcgaggagctcgctagcagatgctttcttgtgttgattcaacgtgtggccttcgagaagaacaattaccctggttatgagaataagagaggagatgggcgtagatgtgaccaacctttccttttgggagagtgcagtactttcaagttcagattctctcgtgtcgctaaggaactttatgcagagaaagtgagatcgagagaagtgaaggaacgagaatcaatgtatccggaagctattttaaacaagcagccagtgtcatttgaccataggtatcgcctccaaacagaatttgaaggtgtaagccaaagaccggttttgtttgatctcagctatcgcggggactataaccttaggcaagtccaagatcctctggttaagtcaagagaaaggacatctccattggatctttgttactaccaagaacgtagatgtttacagctcgaagattcccggtttgctcttggaagaaaccattcccggttcaagacaactcaatagagctggacaagttcagatactctgaaagaagcagcctgctttctcaagactttccttttcaaacaaatcatcatcgtcaagaacagttccatgaaagctctacccgtcgcaccagagtttcgccggatatatatgacgagataatacaaagaatgttgacacggaccagttttcctcatctgtacgctggagagtcgccagagagacatcgcctgctttgtcaagactttccagttcaagctagtcaagaaccactatccgaatactctaaccgctggagtggagtttctcgtgaaatttataactgggaagtacgaagaatgtcaacaagtaccagctttcctcatccgtacactggagaatcacaagaacgaagcttgagtaggcagagtaacctcatcactcaccctccacagcattggtaagttaagttattattctttgcgtgtttatgacaaaatggatatgaaaattttccaggtaacttatcttcgaaagaacttctcaggatacggtgatggaaacaaggtgagtgaagcttggagtgactcaagcatctctaagaatggcgtgatttatgttatattctgtttcttagcatggcagttagttaactactgacaactcaaaactgcgaagatctcgatatggagatgttattttggggtaattttggagaatgttcagtagaaaattgttgtcactgtgagtcttggcttcttgctacttgcattgtcttcaggagataattatctttgtcgctgtacttctggaagatcatttctcagttaatgattcactcgaagacattacatggaccagagggttagataacttacaaatatctgtatgtttttaaaagtaaaatatatcatttcttgtagactaatacaaacgtgtaagcttagtcgacaaggcatcaatcactatcctaaactcttcaatttcaacttctaatcgaagtaattgaaaaatgaaaatgtcaagcaaattgctaggaaagtgatagtgaaaaaaagaagaagaataattatacatagaaactgtttaaatttgtttacgactgagtctatagttccgcgtgaatgtacacgtctatcatataaattataaaaaaataatgatgattgaatttactacgaaacagtttctatcgtttcaattttaaaacttccttgtgttattaaattatgtcaaatctataaagattggaagatcctcttctgtatttatacaatcataagtcaataaagataaacactcaagcaaatcttggtatctctcatcaatcacacacaccgatatcggaatattctctctggtgattattttccggcgatatgacgacgagggtaaatgcagttatttccttctatgtttctttttaaaaatttatattcggtaaaactagtttcttgcaaaacacgaaacttatactctttctttcttcagcaacgcatagttttgaaaatggatatgagtgatgagaaatctatgaagaaagctatgaagatcgcatctgcaaaacctggtaaacatacatctctactctatggctttaatttgtgagccaagttaggtcacacgaatcgtttcatcaactttgtttttttttttacgcgaaggtgtgagatcggtctcgattcagggacagaacgatcagttggttttattgggagaagggattgacttagccgagctaacacgtgagcttaagaagaaagtttgcatgacgactatcatcaccgttcaggctgcgccaccgcagcagccaccgcaacctcatcctatgggccagtacaaccagatgcctccggcgagaagatgtacctgtgagataccgaattcaggtttctgcggattttgtagatctatgagtcaacccaattatcaggtggtaccatcgccgtattatcccccgatgctctattgtcgagatgagaccgatggctgtagaattttgtgatgtgatttttgttgagttttctttattgaaaaaagaaaaaaacattttcttaattttctgatcatatgatattgtaaatagaaaattgttaaattcgtggtgctgtaaatgttttttttttttttagtttttgattaattgttgtaaatgttgtgacagtggatattaagaaaataacataaagtctttggttagtgagaaaagaagaatatattgaatcgttggttttcctattacatttgttgttgtaaatgcaaatatagaaaaggttgtttacgtatagtttgtttatcttaattctttcatataaaaatgtaaggttttttttttttttttggaatgcgatgaagacaagtccccgaccaactaatgtcatatttaaaagactttgctttgttgacatctgcaatttaggactagatcgtggtccgtggatagagatgtccaaattccaaattccaaaaaaaaaaaaaaaaataccacaaaaaattaaataatgtttttaagtaattccttaaactttccgtatattctctgcttcaaacacgggaagcgttaccatgtcacatcgtcaatatatcaaagattctctcattaaaagaaagtcaagaaaatgaatgaaatgaaattgtaataataactaaaaatatgcaactataaataaataattataaggaaaatgtattcttattgaattgaaattgggatttgtagtggttaatacatagtatgtgcagattatcaaatactgtgtttcacaaacataaatgatacaacggcctttttgtagagaattttcaacacaaaattctcttatctgcatcattggtttcaatctaggttcaggactagtaataggcccattagtgataataagcccattatcatactagcccagtcaattgatatttgctttctgttttgcagttgcatatttcccgcttatttttcaagccaattccgttcgtgttgaataactaaaaaaaaacagaattcttcaacaaacaacaaaaatcgcttcttaacttcaaatattgttttggaggtttcattttttcctcaaatataaatgtctccatcataaaccacacaatcatcaatccaaatttcaatcaaatatgaagcaatcagccggagttctcttcctctgcatcgttctcatctccttcgtcaccggaaatgctaattccggtatgatatccgatctctgcaaacactccgacgatccaaacctctgtctctccagcataacttcacgtcccgagtccggcgaattcgcaggcaccagcaaccagatcgagatcatagctatctccgccgcatcagccaacgcctccgccacttcctcctacatcaaacaaaagctcagcaacgaagatttggagccggctattgaggacacgcttgaggactgtcagaaagattaccaagatgccgtggagcagctagatgactcgatctccgccatgctcgcagacgcacacaccgacgtcgatgtctggctgagcgcggcgatcagcgccatcgagtcatgtggaagcgcattgggttcacgcgctgggaatgatgctgagctttcccagaggaacgaagtctttctcaagctgtgcaaaaacgctttgatgattaacaaaatgttaacttgagaatattaatcccctaaatttgaatgtactatattctatacgcttccctctttttttttttttgttaactgcttaatgtttgattaaaaatgagattatcaagtcaaagaaaacaataacaatgagaacttcatcatagcaaaagaaaaaaacaatgagagttttatatcaaataaattttaataatgttgagaaaccggcccaatttgagactgtctattgggtccaaattgttaaagcccgtatataataagcctaacaagagatgctaaatcccaattactaccgattattcaatttttagtcgatatattctgtttaattcaaaacaaaaatcagattaactcggttaatatactaattaaaccgctattttgaataagtctcacgaaaattatgattagacggcgtagaaaattttgtaaaagcaaagcaatggtggaaatctattggattcatcatgcaatttttctagtcaaaattgtttaccgaaactccaacttaatcgttgacctaccatattcataagtcataacgtaaccaatttaatattttgatttctcgaactcaataattgttttttttttcttctaaatattttaaggtgtttagggtattcaagtgccaaactttggtgataatcaagactgatatttttaggaaatgtacggtcacgatcaaatgaaggtcatttcagagtggttgcttgtaagattagtgttggatagattctagattcaatgtcccacaaaatgacaaaacgcagatacctttcttctccacttggaccaattatatatacacacttgttctaagctttcattatttctttgccaataaaatccaatttcgtcctttcattcatctccctcaaaaagtatttcccttataaataccaagttggtatttagaaataagacttaatttggaatgttgtatgtaaaattataacctatgtgaatcaattggaacaatttgcacatcaagatgagatcattagacaaaacttgcactcttgtaaaggaaggaaatcaagattccaccaagaccccaccatttgtttgattttcctcttaacaatgatagaatcttgctttctctttttgaaatatctatactcgggtaccaacttgattatacttatcatactcgggtactaaagtagctaggaggggaatgtaactagagaaaaaattgttctcttttttcaaaaacattaaaagatgttaattcttatggatgataagatttagtttcacttttacaaaacctaaaatcaagtgtggtattagtatatgcatatttatatgtgaaatgtatgggagattcaagttgaagaatccgatgaagttgtaagttggaaaaggagtgggctaataaaccaagttgacatagaatgcacgcaattctatgacaaagctgaaaagaacacttcacattaatctatgtttattcttctttgtcacgcattattatagattactgtacttatatgtataaattaattttaaagtagatttgcctaccttggaagcacacaaatttcaattgcttccatcacactcctatgctttttttttttttttttttttttttgtaaaacccatcacactcctatgctaacttcacaatccattgaattaaagtaaaaacatattgaagaaactctatacttagatttgtaatcagccaagatcttttctaatataacccctagtaaacacgtaacactatcaaattattatgcactaaatatcaacaaaaatggttgtgcatcagatcaatctctagtgtagtaaaaagacagataacgaaaaaaataatacatggggtcaattatgtaattcaaaacccttatctaacccaggaaattttgaagtatctataaacctagaagtctgaaattagtttggagacaagtctagagtgtccaataaatgagacacacgccccatacgactgtccagttagagaaataagccaaggaacataacaccaaacactttaccctctctctctctccctctctccctctctccctctctccctctctccctcaaccaaaagcaaacaaacccttcaaatgacgtaaaagcaaagcactgactttgcttccccgttattaccaatccaagaaaaaaagctaatgattcctatcctccattaaaatattcctctccctaacccaaatctcaaaccttctctgttagcttgcactcgcatatgcatataggtatgtatgtgggagtgtatgcactaatcttcatgtaaaattcacttcaatccaaatcccctttctctacctccctaacctagatcactctcataaattctaaaaccattcgatctataagatcataagggtaaaggaagtgattttgtaaggagaagaaaagggtaaaaaaaaattggtaacttttatatggtaagaagagaagaaaagagcaaacctgggaaaatcaggggagaatttgctggagggtttactggattgtatccatgacatcactgcggctttggcttttgctaggatgactgattctgcttacagagtagacaccatttctagactcgcccaatggcgaatccacaatctttcttcctccacttaccgcaagtccgatcctttcaagatgggtctttggaattggtatgtgtcttcactctcctgtgtttttcacctgatcaattattatccgacataaatgagaatagtggccgcctttttgtagttgatgtgtttggtaaagataatcagatagattttgacaattttggttttaatttgaaggcacttgtctgtggagaaaagcaagatgctattaaatgttaagttgtatccagaggtatcaaaccttaccagagaaaatccaccggttgcttcctttgctcttcgtgttgtctcttctactggtgagagaaaggctctatctcatccaggtagagaagatctcttgactcaatagtttgattatggtttacttttgtttctgttccacaaaagatgaatctttcagaatgctgacactgtttctttaatgattactcgaatgcagaagtaatagataagcggattaagacaaacgaagattttatttggactattgaagttcccttaactgggaaaatcatcatcgacgtcgagtttcttgacttgaaggttttgtctcaagatgtaagtgtctgtctcatcacttagagatattacttatagattgactagccttttctttcttaaattaactattctatgcaacattgaatcagtatgtttggtgaaacatgtgtgctgaactgataaattacctgaattcggcagagtggagaactttactctatctgggccaacggttcaactgagaatcaatcgcaagtaactgcggtaacatcccttggacgtatgttgacagaaagcatttacaccgacataacgatcaatgcctctgatggaagcattggagctcaccgagcagttctcgctgcccgttcacctgttttccgcagcatgtttttacacgacctgaaagagaaagaactatcagaaataaacgtactcgacatgccacttgatgcttgccaagcttttctcagttatatctacggcaatatccaaaacgaagactttcttatacacagattggcactcctccaagcagctgagaaatatgatattgctgatttaaaagaggcgtgccacttgagtcttctagacgatatcgacacaaagaatgtgcttgagaggctacagaatgcttatctctatcaattacctgaactgaaggctagctgcatgagatatcttgtgaagtttggcaaaatatttgagatccgagacgagttcaacatattcatgcaatgcgcagacagagatttgatttctgaaatcttccacgaagtcctcagtacctggaaaggattttaggggaaatcagaaagggtatgtgtgctataattatacaaaatacatttatggacactgattttttgtgcaaaaggatttgttggtctttatgtacagattaaagtattgggggttttaactcaaaacccaagtattgtccttacaaggataagacagcaacatgtaaattcatgatttgattgaatgtgagcttcttagcttgaactttgaattgttaatctataacactaatatagttttctgaacttttaaagtaaaatctacaatcatcttttagcaattttacccgattcatgatactaaagttataccaagctaaaaagctaaacatacatatcctcccatgatctgtaatcttccctagtttattgtaatggtgacagatgttaaaacatatcatgctacaagcaaattcaacaggaatggttcagtagtttcagagaatcaaccaactagtttcttagctaatatgaaaaattcaaaacagaggaatatatacattcttctactctaagactagaatctgtgctacataccaatgtgagtactacatggtttacagaaaccaaatctccggaaaaaaaaaaatcagaaaacaactccctgaaactgaatcaatagctacataagcgatttcagatcgtcttcaatggaaacaaaatcagactctaagacctctgagatccgccacaatgccggaaaactaagaggaaattacatagaaacgaactcgaatcaggaaatctctgtgactgccaaataatcagaaactagaatgtcgcacgaatctgatatatggaatggatggtgttcatgcgtaggaaaaatcaaagtgaaaaagaagaatcagacaagtaaaccgatatgggtctaatagaatcgcaaaatgaaaacgacgaaaacaacaaaatggaatttccttgcagaagaaacttaccttcgacagctacctatcaccaccaccatcgccttcttcatcttcgaatctgagattcgcttcatctcttcctccaattttgaagagagggaatattgttcttcataagatgctggaaaatgaagattttttttcaattattttttcccggcaaacgaactacgtcaataatgggccttattagtggcccaaaatattaaagacgtcgtttcattctgtaataaatagatccctaatcaaaaaaacctcccaaatttcgaactcaaaactctttctacgtctaccttcttcttcttcagccgtcgacatcctctagtaagccagctactcttttcttcttctgtacagtaatcagcttcaattctatagagctttcaaaaaaaatctatcgtttgaagctttatctggtttgtggtctttttttgtcgatgtcaatttagttgataaatgcacaaatatgtatcttttcttcttttctgtgtctatcctcattattgatttatactagagattacagaatttggtacatattgattatagtcgtgagactatcataatttaaggtgttgtatgctattttacaggtttgaatttagtcattgaaggtgttaaagtccatggcagagtctattcaatccgcaactgaaaccgagcctatgacggttaagccattgaactttgaaggctcatgaaatgtctgatgggaaagttcagtttagagaagtagccgttccaccgaaccggtactctcctctcaagaaagcttggtcggatatctacacaccggtctttgatcagatgaaaatcgacataaggatgaatcttacattttgatgcccctaattagttttgactttttgttcattttatcacatgaccaatcataatgggccgtagcagtttaattcgggtcagtaagttgggtcatgattcgggtcggatacttattcccgttctatagtataaacctagattccaatttcgcttgatttccgatgaattgatcgactggaaaacagagaaccaccgtttctacagttggatatggctggtgggcaaatagagaagctagtcaaatacaagagcactgtcaaggatccaggaactcctggatttctcagaattgtatgaagattacacttttcgctcttatttgagttatattatctctcagcttaactgtttcttttgcaaaatcgaaaaatttgcagagagaagggatgttgctcttcgtccctaatgatcccaaatcagattctaagctcaaagtacttactcagaacatcaaaagtattgtttgtaccttttctcattaacattgcttattggataatagatgttgtgttgataaacgatttcagttatgatgatagctgcatagtcattatcaaatttcactgtgtttgttcaatctctcaggtcaaaaatataccaaagaaggatcaaataaacctccttggctcaatctcaccaacaagcaggttttttctgttgacattttttgattaaagctatgatacattatagatatgtgaattttgaagctatatctctgtgttcattgaggtttcctcatccttgattgtaggcaaagagtcatatctttgagtttgaaaattatcccgacatgcatgcttgccgtgatttcatcagtaacctccatgtcccttggtttgcttttattgattgggaaagtatttctcttgttttctttcgtggtgtttctgtaacctcttttttactataaacagctaaggcccttgctaaatgtgaattggagcctaataaatccgttgtctcgacatcttccgagcaactcagtattaaggaattggagctgcgcttcaagcttctgagagaaaataggtatgtaattggaacattaagttgcctttttgggttcaaagtttcattggctcatcaagttccttctaatatgagtaacatacgtgatttaaagtgagctgcagagattgcataagcaatttgtggaaagtaaagtactgactgaagatgaattctgggctacaagaaaggttggttctttgtttgatttttttaaaaattttgttctcttcaatgtcttcatagttaccgactttattctggctgcagaaattacttggtaaagattccatcagaaagtcaaaacagcagctcgggcttaagagcatgatggtttctggcatcaaaccatctactgatgggcgggtatggtatagttatctcaactcctttctggcagttagtacagccaatttagttagcattttcatgtgcctgcttttgtaggaaagaaacaatgcatctatatgaccatacactgatgtgttcgactgaattacattcatatgttgatatatatcatattatcatgtgacatctctgctggtttactaaccactttcttcatttttcttctttcagactaatagagtgacgtttaacttgacacctgagataatttttcaggtgagctctttggttcactatgtttgtcattagtgtaactgctctatcagtttctgaatccctccaaggtcgtcatcataagttttttatatgttatggggttgaagttgcagctagtgatatattgggtcagaaatccattgttaggtgttcaggttgcatcatgtgcttgaacttctagtccaatctgaaactacaaatgaggaatataaacttttttaacagtctttcacccacattctatcttgtgcttgcttagccagtaaatccattgcaagtaacttaaatgttactttcgtaactgctacagtccttttcttacttatgttttcttcattacgctttcagatttttgctgagaagccagctgttcggcaggcattcatcaattatgttccgagtaaggtaacaaagaccagctcactgtgaccatctttgtttataaggttaaccctcaaatacgacgaatcttaactggctttggtagttattttcctacgccagatgacagaaaaagacttctggacaaaatattttagagcagaatatctttacagcaccaaaaatacagcagtagctgcagcagaagctgctgaggacgaggaactcgctgtctttctgaagcctgatgagatattggctcgggaaactcgtcacaaggttaggtttcttctatggtttaatcatttatcatatattttgtttgaaaagaaaatatttgtggcatatccatctgatttaaatgtcatctctgtagattagacgggttgatccaactcttgacatggaggctgaccagggagacgactacactcatcttatggtaagtcaactaccactgcatgtgaaaggtttggataatttccaaattgcgcaacaatggttgttgaaaggaaagttcaatgctcagttaacactgtacagattcacacatagaataagtctttcatcgaggtttgtagtgttgatgtttacgtattgtctatccctagtagaaatagtatgggaagaactgggataatactaacggtgttaagaatcaaacctgtaccaatgtgtgtcacttgtttctttcttctagaattctcagcgaacctaatttgaattgttaaatcaggaatttagtttctttcaaataactctgaattagtgcttttgctttttcacaagaccactactttaatattagcatgtgtgagaaggagctcaaaactgatatctagaaaatattaatcttaacattgacattgtgctctttgtatgcggttgaaacgttattttcaatacactttatcgtacttaatataactttcccataacacaggaccacgggatccagcgtgatggcaccatggatgttgttgaaccacaaaatgatcagtttaaacgatcacttttgcaagatcttaatcgtcatgctgctgttgtattggaaggcagaagcattggtaaacacctctaagaacctcatttgaatctttttatctgaatattttataacagtagatagttcaggaagtgtaaacatttatgttggccttttgactttagttcttggtggtaaatatacaataatattcctgtaattggaaagcagatgttgagtcagaagatacaaggattgttgcagaggctctcacacgggttaaacaaggtatgatgtttcattctgctaaacaatgccacgctttttattcatctgaccttgctatccatctctattttacacccctgttagtaagcaaagctgatggtgaaaccaccaaggacgctaatcaggagagattggaaagaatgtcccgggtagcaggaatggaggatcttcaagcaccacaaaatttcccattggcgccgctttctatcaaggtttggctttctgccaatataaggttttcacaattgatgatggatgctgcgttaatccgcttaccctttcttctttggaatcaggatcctcgtgattactttgaatctcaacaaggaaacgtcctcaatgtacccagaggagcaaagggcttgaagagaaatgtccatgaagcttatggattactaaaggaatccattttagagattagagctacaggattaagtgatccgttgattaagcctgaagtttctttcgaggtgctattctgtcacataataaaaagtgtgctgacaaaagaaatcattacttattgctttgttgcctgagctaaaaattgctaaccctattcaggttttcagttcgttaacccgaaccattgcaactgctaaaaatattaatgggaagaacccacgagagagctttctggacagattaccaaagtccactaaggatgaagttctacacgtaagtccgacattttccagtgtcctaagtgacaagaagctctatatgtactagttagtgaagattaggtagtaatgcatatggataagaggacttttcttctttcatctacagcattggacatcaatacaagaattactgaaacatttttggtcatcttatccgataacaaccacatatcttcataccaaggtaatgttattgcaattttcaaatctcccagtcccagaaattgctatatatattgattcctaggctttcacgggaaatttaatcttattatacaccaagagcaagttattataccaaatatttttcgtcgattcttgtgatgttatattattatcatgcaggttggtaaactgaaggatgcaatgtccaatacatattcaaaacttgaggtaagctttgaaattcttcatctttctgacagaataagcaactgatagtaaatctgctatgttaaaacagtagttcctaatcataccaatgcgtttacgaaaatgaaatttttgggtaaataaaattgatgcagtattgtagtcgaatcttatttgcatatatatggtcaactgtacggtttccttgatattaaactccatgtaactcaggcaatgaaagagtcggtgcaatctgatctccggcatcaggtttctctactggttcgtccaatgcaacaggttagcttcttccaatatctacggaagagttttatacttttattacatcatgtctcggttaagtctatattttccactcatattgcatctatatccagtttctacagccttgcattgtaatccggtttgaaaattgatcttaatcggttttctctgctaggctcttgacgctgcgttccatcactacgaagtggatctgcagagaagaacagctaagagcggcgaaagaccaaacggctacgtatagaggacaaaaaaactaaaactaaaaagctttgcaagatctttgaattgtttcatcagccttggttggtgtttttgaaaatcttcatttgtccctttttgtccgaccattgagatacaaaaatgcgtttatattgtagtaatattttcttttcttttttttgttaattaggcgttatattgttaactgcgagagacaacaaagagattttctcgatctgaacatttttaagtttgcaatgtattagtaaattctctacaggctttgaggacgttactacagctccaagaaagctctcagtgccataattgtttggttatttggttactggtgaatatttataataatgggacaataatagagaaaatgcttcgatggcgtagtagatttcaatgtttgaatcgcatcaaacaacaatccaaattagaaatatataaaattcaacataaaactttttttgacatagcattcatggataacttttgatttgaatgattaatttactcattgtgaggaaaaaaataaaaacagataaagttactcattgcttgtcatattgacatgacatacaaaattcaagctccataagtaaagctataaagaaaaagaaaagggggactctccacttttaggtttcatataaactcgttaactagagattgggttttgattaagcacgatataatatatatggccgaaaaagccttttggttagtttacttggctcacgttttcgtcttcatattttcctgtggacttgtcttctccttctagataacttgcatattcttctcttgacatattcgattttgttttctcctctaaacattggtgagtttaggttttctttgtgttgaagttacttatttccagacacagccacagaggtatcgatatttacttggttcataagttgatcgatatttacttggttcataagttgttgcattggtaatagatgtgtgacctttatttgagaacaaaccgtccaatggtcgtgcatatggtgggccttgtaccagagagatctgcgccgctctattaatgatcactgacataccactagtagatcttttcgcatgcaaatatattttatattattttctttgttaaaagatttttcctagtattatcatatgagtaattaatgtttgtcctttagctttcactataaaaacgcatattattatcgatagtaaacatcccaaatgttcggttcatagcattttcgattttcatatttgaaaggtagagaatcttttatatttaacaaattacaactttacaagcattgtagtgaggttatatttatacatggtgcatcaaatagatataggaggattagtttgcgatttcaatgattaaacccaaaaaagaacgacaagaataaagtaaacttaaacatcatattcgaaatgaatcatatccgtctatgaataattatgtcaactattcagcatttacaatcacgccaaacaattgacacgttattctctaatcataatattggttacaagaaatagaaattcaccgaattacctttccaaattttgttcaaataaatgtacgtatcttattatactaattttattttgcattttcgtgtccgctagatatgaacacgtcatcgataacgttctataaatatcattcctcttgtccaactaattaactcactctcgagagtagcgtgagtcttgaggtttcattattatttttttgttttccctacaaggaagtaacaatgaccgttggtgccggaatcagcgtcaccgactcagatttggtggtgctaggtcaccgtgttcttcacggcgttccggagaatgtcttagttaccccagcttcgggaaacgccttaatcgacggcgcgttcatcggcgtcacgtcagatcaaaccggaagccaccgtgtcttctcccttggcaaactcgagtactgttcaaaatccctttcctacacttttgttgttagatgtcacataatttgttgaattacttgaggcttagggtataaatgttttttttttccttggcagagacctaaggtttatgtgtgtcttccggtttaaattatggtggatgactcaaagaatggggactaatgggaaagagattccttgtgagactcagtttctaatcgtagaagcaaaccaaggttctgatttaggaggaagagatcaatcttcttcgtacgttgtattcttacctatacttgaaggagattttagagctgttcttcaagggaacgaggctaatgagctagagatttgtcttgaaagtggtaagttgacacagctagctagatttgagttgaattttttttgttagattctctctgagatttatatggtttttgtatggtcaaggtgatccaaccgttgaccaattcgaagggagtcatttggtttttgtggctgctggctccgacccttttgatgtcattaccaaagctgtcaagtatgtaatgtttctcaagtctcaacttaagacttctttatgtccaaatttttttagggttaagaatctttgcctttcaatgattatgcagggctgttgaacaacatcttcaaacattttcacaccgagagagaaagaaagtaaggaaacattgagacgttttatgtgatctttgattatatacataccaaaattaactctgaaaatttcccctgttttggttgtgttcagatgccagatatgttgaattggtttggttggtgcacttgggatgcattctataccaatgtcacagccaaagacgtcaagcaaggacttgagaggttctcctgagtctttacttttgaagatggctttagtaactgtgacttaaccaaacctgcactgattctctgtagcctcaaagctggtggggttaccccaaagtttgtcataattgatgatggatggcaatctgttggcatggatgagaccagtgtagaattcaacgctgataatgctgccaagtaagtaattaagctctcttaattctgatttaagttctttctttagtcttaataaaccactctttatcttttgtgcttaccttcagttttgcaaaccggttaactcacatcaaggagaatcataagtttcaaaaggatggcaaagaaggccaccgggtggatgacccttcattgagtcttggacatgttatcacagacattaagagtaataattcgctcaagtatgtttatgtttggcatgcgataacaggatattggggaggagtcaaaccaggtgtttctggtatggaacactacgaatccaaggttgcgtatccagtttcttcaccaggagttatgtccagtgagaattgtggatgtttagaaagcataactaagaatggacttggtttggtgaatcctgagaaagtctttagcttctataatgatcttcactcataccttgcatccgttggggtcgatggtgtcaaagtagacgtccaaaacattcttgaaactcttggagctggacatggtggtcgtgtcaaacttgcaaagaagtatcaccaggctttggaagcttctatttcaagaaacttccctgacaatggtattatctcttgcatgagtcataacacagatggtctctacaggttagcttctggacctacaacgttgttctcattgatatttatccataattattactatcccttctaatttcttcttgtaatgatactttagcgcaaaaaagactgctgttataagagcatcagacgatttctggcctagagaccccgcttcacacacgatccacattgcttctgttgcatataacacacttttccttggagagtttatgcagccggactgggacatgtttcatgtacgttgaattgctttaacaaacttttctgaacttgtgaatgaatctatctgtttctcattgcagagtttgcatccgatggctgaatatcatgctgcagctcgcgcggttggaggatgtgccatatatgtcaggtaatcacaagattcaataccatttgacaaacaaattatcatagtaaaatgagctgcaagtaagtaactctagatccattcaaacttgttaaacagcgacaaaccgggacaacatgacttcaaccttttaagaaagctagtacttcgagacggttccatactcagagcaaagcttcccggaagaccaaccagtgattgcttcttcagtgatccagtcagagacaataaaaggtatctcgttttcctttacttggaagagaagaaagcttaaatcttaactaactgttgtattatactttgcaagtcttctgaaaatatggaacctgaacgaattcactggcgttattggagttttcaactgccaaggcgctggatggtgtaagaacgagaagagatacctaatccatgaccaagaacctgggaccatttctggttgtgtccgaaccaatgatgttcattatcttcataaagtagcagcctttgaatggacaggagattccattgtctattcccatctcagaggtagtacacaaactcaaacatcagtctaaattactctgattatactaaaaccttcactttttttttccttttctatcaggagagttagtgtatctcccaaaagatacatctttaccagtgacattgatgccacgtgaatacgaagttttcacggtggttccggtgaaggaattttccgatggaagtaaatttgcaccggtggggcttatggagatgtttaattctggaggagccattgtgagtttaagatacgatgacgaggggactaaatttgtcgttaggatgaaacttcgaggcagtggtttggttggtgtttactcgtccgttcgacgaccacgaagtgttacggtggattcagacgacgtggagtaccggtatgaaccggaatccggtttagttacgtttactttaggagttccggagaaagaattgtatctgtgggacgtggtcatccaataattattgatctgtataattgtatcagttctgtattgatttgttggttaatctgtatgggttatcgaccagaccaatacaaatcaaacagattggtccgtgttcgttttgatataataatacaaaaaaaaaatgtttgttgtatggcttagcatgcattagtgtaatcattttcttccttcttatttatcatcaacggtgtaaaatctgtaaaatgttatggtgcaaatttagttgtccacaagagaacaaccagacgactatgtaatcatatctgtagatagtagtagactagtagatccgtgcatttttagcaatacttccactaataaaactcgcaaattaaagcattcttaattactctgaaaatgacttctacacacaccctaaatgtttttatagaaaatttggttttggtctaattattttgatttggttcggtctagtaattgatcagtttatgatattttttgaaaggatttttttttttttttggtcgtcttttgaaaggaaaattttaagaaattataaacgatttatttaagtccagaaacgaaagggatcgaatcaatgataaaaaaattgccttaacaaaaaagttttaaaaaaattgggattacttgatgcggtcgatagttaatttattctggactatggtaacacgtcatgtttaggaccactatgttttaactaaaaactgatattaaaataaaatttatcgaccgcaattgctcttttttttctcctatatttaaatcttcacagtaattcacagttcacatatatttcaatattcattagtcataacattagaaagtaacaatattgagtccaaatattttttaaaaatcggaaattagataaagttccaatagtcttttttcttttctaagtctaaataaattcaattaactagtttcataaattatttgaaagaagaaaataaaaaatcgaaacatgtctttaaaaatgagtagaagaaggaaagttcctctcgatcacgcacttgtttactgacatctcccaaattctttagtatcatctctcaataaaaaagaacagaccattgggatcacaaatctccgaagaagaagaagaagatatcaaagtgtttatttttgtgggatttctgctgcaacttgttcaagtctttcttctctgaccattggttgacttcttcttaggtactaaaactttcgaatctctcttcaccgtttcgttgatccctccgatcatctttaggtcttctatttgattcttggtagtttatatctggttttagggttttgatattggatggaattgggtttgtgtttttcaaatatcaagtcatttgattgggctctgatttcatggaaagattaagcttagattaacacattttcagttgaatcgtgcaagcttgttctggattcttgttttcacatttggttgtggtttatatactgtataacggaatgctctttgatactgatgattgatctcctaagcatttccaatctccaggtttccagaagaagacgatattgtagtgtatcctcgttttcatgttttcttagcacaagtctatgggttgttgtaaagtgccagctcttattcaggcccaggtagaagtaagtttgttcatgatcgatcatgtattatctttgattatatggctcttcattgtcagcttaatggaaagattacaactttgaacagatggggttggttaatgatgttgagcacaaaagcctttttagacgagatactgattccccagaaagaaaagcagcttccttgatggaacaaggatcactttctgcaagttttcgagaatgctcaactaaaacacctaataacagtgtgctccagagcttcaagattgtgattttatcgaataaacttaatcttttgttgccttttggtcctctggcaatactactccattacttgacagataataaggtgagcagttgtactttttgggtactattcatagcagtttcatttcttcctgttatttcccaagaaatgattcttcttgtggctcagggatggatcttcttattgagcttagtaggcatcacaccattagctgaacgtctcggatatgccaccgagtaagctgttgctcgcacttgtaactctataagttacaatgttatcattctatcagcaaggcttatctataagtaaccgtttattttgtgacaggcaattagcttgttacactggttcaactggtatgacttggtttcttctgatcgccattctattgcgggtttactttgttttctcctgatatctttttgacgctgtttacaaatttaacagttggaggtctcctaaacgctacatttggaaacgtgacagagctgatcatatcgattttcgctcttaaaagtggaatgatacgtgttgtacagctgacattgctcggctcgatactttctaacatgttacttgtacttggctgcgccttcttttgtggcgggcttgtattttcccagaaagagcaagtctttgacaaagtaggaatatcatcacttgttctcttctttttttcaatgtaattgtccctgttgttctgtaatttataccatgtttctgagcttatttattctgcaatgcagggtaatgctgttgtgaattcgggattgcttttgatggctgtcatgggactactcttccccgcagttcttcattacacgcacagtgaggttcatgctgggtcatcagagcttgctctctcaagattcagcagttgcataatgctcgttgcctatgctgcttacctctttttccagttaaagagccagccgagctcttatacccctctcaccgaggtttgttgtctttgaccttcggttgactttcgttttttcttacaaaaagcctggaaacgatagactaagataattataaatagaacaattgtttcaacatttgttttttttcattttcgagttttcaccagtatatccatgaccacagaatattcgtgccagttttacggggtctgtcgaatttctgttttataaagccgagtggttgctatctttctcttctaattggactgatctcagctgtttggtaaacattgttaatttgtaggaaactaaccagaacgaagaaacttcagacgatgatgaagatcctgagatctccaagtgggaagctattatctggctttcaatcttgacggcttgggtctctcttctttccggctatcttgttgatgccatagaggtgaatagcaacctgcttttttttctatcttagtatttcgaacaaagatcttacgtgtattaacttggcctgtttattcatttccatatgatcaggacaacattgtaatgctagtttatgagtttgacttatggttttgtattattgtttttcaatctgtaatagggtgcttcagtctcatggaagataccaatctcttttatcagtgtcatcttacttcctatagttgggaatgcggccgagcatgcaggtgccatcatgtttgccatgaaagacaagctggtacacagacaagtctcttgcgttttgatgtctttgattctcttctttaggttctaactttattattctcctctacaggatctgtctttgggagtggctattggatcctccattcagatttctatgttcgcggtatgtatatgaaatgtgaacttgggtctagtactgaacattctctaaaagattttgtctgatagtttgattggatttaggttcctttttgcgtggttatcggatggatgatgggtgcccaaatggacctaaatttccagctatttgagacggctactctgttcataactgttattgttgtagctttctttctccaggtaaatcttgaagctaattacgaaaccaatctcgagtatatctctctcttcaaagttgttaaatgtctttgtgtgtggtgtttttatgcaggaaggaacatcgaattacttcaaaggattgatgctcattctttgctatttgatagtcgccgctagtttctttgtacacgaagatcctcatcaaggttagtgttgaatttgctatatatattcctttctctgtgtcaactctctgttgaaacctgtttttgtcttcttattttttgacagatgatatataaatcaacccaaaagaacataaaaagtttgtatcctaaaactaaagcctgaagatctcaggaacacatcatcttacatgtacatttgagattctagagtttgtttcataacatttgaaagtagctccattttacggttttaccttcccttaggggcttatagggttacaaatttgtaaaattaccttgataactatgatgggaagattcaagattggagtgtctcttcttttctaagtatgcttgtttatcctctaatatatagaggattttctttgaacagtttatggacggttgtattcatacatttaatggtaaaaaacaagatgacactagttatagttaagtcttactcaaaacaatattgtgagccatatttggcataagattgcagaatttcttctgcaaatatttatcatagttcgtaagaagatgagttccagatggatttgttgaaaatgtggatcaacaaaagcagcattgagtcgacattcggcaaccttaagctgcaaaacaagtttgagcttcaaggtatggaatcgtgcttcagtgtcatacctttaaggaacaaagaaactaaagaaatggaaaccttttaatacttcaatactggagttccataaacaattcaaagaccatctgttgtaacttctcccccaagcaacgagtgagtggatgcttattgtgcttgtaatcatgtgtcacatgccatacactcttaaggaatagttaaggttaacaaggactagactttctaagaactcgatatacagatcaatgagatcacaaatctcatgtatatggagctatatttgatgttcagcaacttcttcaagtctataaggtggtgtaaggtgccagcttttatgcaggcgaaggtagaagtaagttagtccacgttcacgtcttgtctcagttatttggctcctcattatcagcttaagaactaaattattatcgtaaacagatggggcttgttaatgaagttgagcttaaaagccttttggaacaagaaacagattccccacaaacaaatgcagcttctttgatggagcaaggatcacttcgagaacgcagagctaaagcgcctaggaacagtgtggtccagagcttcaagatcgtcattttatcgaataaactaaatcttttgttgcctttcggtcctctagcaatactagtccactacttgacagataataaggtgagagcagttgtagtctcaggtacttatcataattagttttgtttcttcttgtttagtctcaagaaacgattcttgttgtggctcaggggtggttcttcttactaagcttagtaggtatcacaccattagctgaacgtctcggatatgccacagagtaagttgttcctcacacttgtgactctttaattaccatatcatcaaacactaaccgtttagttttgtaacaggcaattgtcttgctacacaggcgcaactggtatgacttggtttcttccgttactctctttttttttctcctaatatatttgtgacgcgctagacaattttgacagttggaggtctcctcaatgctacatttggaaacgtgattgagctgatcatatcgattatcgctcttaaaaatggaatgatacgcgttgtacagttgacgctgcttggctcgattctttctaacattttgcttgtacttggctgcgcttttttctgtggcggccttgtgtttcccgggaaagatcaagtctttgacaaagtttgcatatcattctttcttttcttttttctgtttagttcaattcttcttgtttcttatcttatttcttctaccatacagaggaatgcagttgtgagttcgggcatgcttttaatggcagtcatgggactactcttccccacatttcttcattacacgcacagcgaggttcatgctggatcatcagagcttgctctgtcgagatttatcagttgtataatgctcgttgcctatgcagcttatctctttttccagttaaagagccagccaagtttttataccgaggttccttgtcttttaagttaactacatatataaaattgtttcttacaagttacaaccactttcatcatctaaatgattcttgccagttctacttaaaacttatctctgctgtaaattatagaaaactaaccagaacgaagaaacttcaaacgatgatgaagatcctgagatctccaagtgggaagctatcatctggctttcaatctttacggcttgggtctctcttctttcgggctatcttgtcgatgccatagaggtaactaaagaccctgtatttcattcttaagaagatcttatattattacgttgtcatcttgtgttatgttgtttttgaatctgtaatagggtacttcggtctcatggaagataccaatctcttttatcagtgtcatcttgcttcctatagttgggaatgcggctgagcatgcaggtgcgattatgtttgccatgaaagacaagctggtacgtaaacaagtctctttcattttgatgtctttgcttcttttctttagttataaatttattattctcctctacaggatctgtctttgggagtggctattggatcctccattcagatttctatgttcgcggtatgtatatgatatgtgaacttgggtctagtactcaacattctctaaaagatttggtctgatagtttaattggatttaggttcctttttgtgtggtgatcggatggatgatgggtgcacaaatggatctaaatctccagctatttgagacggctactctgctcataactgttattgttgtagctttctttctccagttagttaatcttgaagctaattatgaaaccaatgttgattttatcttcatgatcgctaatcacgaaaccatgcattcttgagtttttcttgcatgaagctgtgtttgttgtaatgcaggaagggacatcgaattacttcaaaagattgatgctcattctttgctatttgatagtcgctgctagtttctttgtacacgaagatcctcatcaaggttagtgttgaatttgctatatacacctttctctgtgtcaacaagaaaacctaatatctctgctgaaacgtgttttttttttgtgttcttatttcttgacagatgatataaaaattaaccaaccctaaagaacacaatatggtgtgtgagacagtttgtgtcataaaactaatcccttatatgatctcaggaacagaccatcagcagatatgcacatgcaggacaccatcctatacatatgagattctatagtttgtctcataaaaattgaaagtaataatcccattttacatttacctccccttaaattctctagttcccttactggcttagggctaccaatttgtaaaattgtattcataactagtttataggaatatatttttttatcttcatttctttcaacagatcttaattaacataaaatggtttgggaagtcaaactagtagtagcactacgtacttgattattcatgagaatttaaagtaagtggaatatattggtataaaatagcataaattcttccgtaaagttttcgtatcttggatggttttgatcaatagctcttcagatgagttccaagtggcaatgctgagaaacaacagtggatcgagatttacaaaccctaatctgcttgaggcttagagccgagtgacatgttaagatgcgttctaatattttgacaccaaacttgcctcggtgtcacacctttgaacatgatagaatttgcaatattaggttatggtttttttatccaggcctgagagagtcccaagttgctttagaggagaaattgagtctcaaaattttcatacatgtttgaaaacgtgaaagaaaaaaatataacctaagccaaagtgctttatttaattttatttgccttaattctgcatctaaattattaaaagttagatattactttcttgtcaatatcaatttagttttaaaaatatagtttagattactttatatacataaaaataaatttaaattcaaggatcaatatttaataaaaaatatcaacttattaatgagctcaattagttcctagaaatattgtttacattgttaatgtaatacagttgggtacaaactgtgcggaccaacatcttagaaatacaaaagaacaatggaaactataatcttatataataaagtaaggtttcctcaaacttgtactctaaaaatctgacaagtggcgctctattcattcgcatgtgtcattcttctcaaatttaaatatactattttccatattctttgagtttaattacagttttataattaaaaaaaaacttataacatttttgtaatgccctttttctaaatagtaaggttcctcaaacttgtactctaaaaatctgacaagtggcgctctattcattcgacatgtgtcattcttctcaaatttaaatatactattttccatattctttgagtttaattacagttttataattaaaaaaaaacttataacatttttgcaatgccctttttctaaataattatttttcctaaaaaatatcatttatcaatattttcatataattaccataatattagaatttctcaacaaaataatttctcaggaattaaagaatgaaatattagttttatctttcaaaccaaagatcaaatattttttctctaaaataccttcaaaatataaaaaatgtatgagtagattatggtatgtgtttgttgacaatatgatcatttgtttatttgttttaaaaaaatttggcctctcacataatcgattaaatgtttatttgtatatcttgaaacaaaataaacaacataactgaccatataacttaagtcataaatatcatttacaatataataaattgaatgaaaaaacaatgaattactcataatatgtttcagttatgttgtgaggttaatattctatttaatgacacatgtgatatcacgttttcttttatttattatgtctaactattgcagttttttttttagtcaactaaactgttctatttcataaatcaaagcagttacgttacactaacataattatcatttatgtaattatgaccatgatttaaatatttagtatcatatttaatatcatttttagtgtaacccttcaccttataaaatgcaagacgctgcatgtcagtttttttaagttggtttctctgcatttgttaacgcttgaggttgaagcttcattctttctatacgaagataataaaaacgtgcatggtaagtttcaggaattacttcgagaggttgcctgtgaagcttcctaataaccgccatgtggagaaggagaagaagaaggaggtgaaagaagaggacgtggagaattgggggcttagagagttgatcgatggtggtgccgttgctcctggtaggattcttcataggaacaacatcaacatcggttcctcaaggtttgtttcttacaactccttttaaacttatatcattctgtgttgctttcgggattgtttaaacaccgaaataatattttgtggtctgctaagtctttccacataattaaattgaaagtaaagagaaaaaaagacaaaccacgaaccatatgagtatgacggattggagaaaccaaagaatggtaatctcaaaggtttgcttcgtcctctgtattacgttgttttttatttttctcattttcaccaaagaaatgaactaaaatcaagtttctctctcatttttataattttaatatttgttttgtgtagcctttgtatcgtccaaatgtggtgatactgattcacactttgttacttctcttctttataacatgtttcatgtgtttttgctaatacatccttttataggtgcaatggtagatacaaagtggcttaaaaattattacactaagaatttcttagcaatcattacactgagaatttctgttcatgatgaaggtaataggtaggcaaatcatatatgtgttgctcgatgctcatctgtgatgtatattttatttaatgtcatggttctaattttttctccagctatttgtgttttaactattcgagtcataaccatagtcaaagtttcaaagtttagtaaatggtgtcaaaggcctttagcttcactttagtggttcgacatgggaacccggtgtcttcaacctgctattttatgaacatgtctgatattttaatagaggatataaacatagtattaatggatatacatatatatatatatatatatttaactgaatatctttaaaaacaaaattttatgtgaatatcttgaaataaagaggttgagtcaaattttagagtatatgcataagtgaatatgtgaaaggtggatttcctttagaaatgacttgatgaaaaatgtctaaggtaccttctcacttttacatgagaaacaaggtaacttttaccttcattttctacttattcttcatgttttgaagttgaccaatgttgtttataaaatatttatgtcaagttgctaaaattcatattaatctttaaaattattttagtttttcaatgaaaaataccaacagtgagtactcaaccaaatgataaacatatatagccaaatgtttattggatccatatgatatttcctggttggtcctgcttaatatattcactttttattttaatgtgtggctacttctttaattttcgtctctttcatttagtttatagtttaatatacaaacattattcctatttgtacacatttgatttattattgatcttatgtactaaacagtaacttataactcattttactaatcgtagtaattgaaagaatgtttatcttttacttatcatgctaaatttacactatatttcgtttcttaagttttatagtgaccataataattcgtcttttgatgcatttgttggcaaatgaggtaatatagaaagaaattacatggataaagataatatagaacctacgagatttgatgaatgatgaaactatacaaaatatataatcttcattgatatcattggtgggaaattctgttaatttaaattattttgtatgttgttacttgttacattgtactttaaattttaaatttatttagttttcaaccgaattatggtatattttcttcaatatttgattatgtgcatcgaaataactttaaacttctttattaaaaatcatgtgtatataataaatcattagtaaataaattcaatactttcttaccatattgttcaaagatggaagaaatagtaaataatttgaatattaattgtataaagtatttagagttcttttgatatcaattagtattaatatatcaatattcatatatgttaatcttactcattaatcaagactttatcaatctcacaacttcaaatttattaactactttacaatttacacacatactataatcaatatgatatatacaattatgaaatcttttactcagagaaatattgcatatcattttcatatatttaaataaaacacaaggcttatcttgtatatcaatattataatttttcttttttgatcaattcgataatttttaatttataaatacccaaattttagattagaattcataaactaaatgtttagtttaaaactaaaatatcataatcacaatatttatgatattttttattgaatgtattataaaataatttaatattatattaatatatattagttatagacatatatttcactacattcatttcacccacgcatcgcgtaggacattttctagtactatataattttaagtactctatcccacaaacaattaaaagaacacgaagacaccaaatctgaataccgaaagaaaaagggttgtgtggaacgacgatcacacctatagcaaattgctcgagtgttatcattgttacgaataactgagaccgttgaacgtttttgttttatgtagaaggacgttggcttcaagaagattgggtttcccagtaagcaactaacatgaaccgtgacattgcaataatcattgcatgtatagaaccactcttctgcatctaatttcgcctcacatatgtcgcaccaatattgagcatttgttgtatcttcttccccgtagcaaagagcgagtggatgtttatcgtgcttgtagtgtgtcatacttggcaaagtagcgcattttaggcccaagaatgacttgcattccatacactcaagggaataaggtgaacaatgactagactcacaccccatgcattctccctttgtgagattaaagaagagctcatgtgaatggcttccatgtataaaaggatccggaagggaagcgcatcgtgcgtctaattggaatcggcagcctttttcgctgcatatgtacatgaaaccaaaacctaattggtcacaaccactgcaattgaacatgcctttgacatttcgcgaatacaatttaccccccatcattctcatgtggacctcaagtggcttaggaggaattggatggagtataagccggtgtttgtgtagcggatggtcttttttacgaggaaaggaagcacatgcttcgtggagaaggaagctgcattgcgtacaaccataaaaactttcagactctaagattggtatgatgcatgcctgacagaagctgtctgcatcaaaaactccgtttctgatgttgagtcttagataatgctcatggctgaaatgttgtattgtcttgtcatcaatcctctcaaatggctcgacgtcttcatcaggttcttctggaactccgtcaagatcttttccgtcccatattctttcttctattgcacatttggaatggacagcatagtggcatcccctattgcaagaaaactgcccataggtgacatcaatggtaaggcgacagacgccacaagggtatattccggaaggaagagagggagagagagataaacggtgttgatgacgggtgattttaataacacgtggtaagaagatacatgccatgtggaccatgaggttacatgaaagacaagcatagacgtaatcattggtgttttcaagagacaagccacaagcatcacatggcaaagggattcgtctaggaaaaatggagagggggtgctcatggctcttgagatgagagatagtggaaagtggtgggtttctagcacaagtgaggtttaggttaaatttgcaaatagaacagtgatagtatacctcttggagattcgtctgacaacatttgcatttcaaatcggatatagaagaatctgaggagacatcatcggatatagaagaatctgaggagacatcatctgacgcatcggagtcctctgtttcggagtcggagggttcctcttgccatgaagcgggcagctccttcaaatcagtaaaagaagaatctgaggagaaggtgagtttcagaggatgttgggcgtgaaaaggatgtctgatctcatgcgggtacaagttgcaaaccttgtggtaacacatttcacaagtaggacaatgatagctccgatcattttcggagacctcgtctccacatgtgtcgcaactactgtgataatcgtttccctcacggagagtgtgaggcctagttaaaggcattgaacgacatcttggtaagagataacaggacttgtgaatatcataatcgcaggtatcacaatggagatgatacttagtgcgatgatgtttcttggttctgcaaatgaggcatttagacattcgttgaccaccatatcgtcgagaaagcaagtgcgtcgactgagagggatcagattgacgacacaccagtatagcacgagaacttaacttcaatgtgatttcttccatttgttttttgttttttttagcaaatgaaggagaaagtgaagagtttttagatctgcatatattcttaggtttactcccttttattcttatttgttaaggcgagactttgctaatcataggataccattaccataccagacatgctttagctgtcacctaaagagtttagtactatttcctaaagaccaacaaattgagttacattaaatcaaagaccaatagacaatattttaactagtttgactttttagattggacaaagtcgtgttctcggatttactcccttcagacaaggtgcgtctggtgcggtactacttgcaaactataataaatgcatctgtcattagaaaatttctcactcatttttttgaaaaaaaattcacttctccacgatagctagatctataaaaatcaaaataaaggaatattccattaaaatatactaactatgttttacacaatataactacttattaaaaagagtatacaaaagtgtgaaccgtatattcagtttacaaactatatgaaatattgaaatgtacgttaacggaattaaaattatttttatctcttttttttcattcgaacatgtgaaaattagaattacatatttgggaattatttagatttaaatattttcataatttaaaagaaaacatatctatgagcatataggttaaaattttaaatttaaattaaagacttgagtatcgaaattggtataaattaataattcatactacttttttctgggtgctaaaaaaaatgtttatggaaatctcaaaatacttgatgtattcttatgaaatctagaaacatttcataaactcccattttttatattcaaatctaaattatatgaattcaaaatcaggtatcattctcatcgtatggtgtttattcttaagtgaacgatcatatgatgtgtttagtttttgatatattgcttactaggtccgcacacatgttttaagaatactagatgaatatctatgctatgcatgggtttttatttttaaatttgtaggaaaaaaatatgattatagtttttgttatttttattttcattttgtgtgtgttattatctaattaataaattcatatctatttatgttgttataatttttatgattagatttatttataactttaaatatcaactttacatttttatatataaatctaattatttatatacatattaatttaatctttcactatcatgaacacatacaacaacaatatatgatatattgatacaatatatataaataaagttatttatgtggtttgaaacttgtctaacttaattatttattttatgtactatcgcgtcatctaatacacaaaccacatcatgatatgttagtaatttaagttaacactttagatatattcccttacatatagccatattggagagagtctcatgttttaattttttttgtatgtctaacgtttcaaaggatcattgcgtgaaaaacaattgtaaccacataacatacaagaattaaaaaaaagaaagaaaatgttatatgataagtcttatttacaaaacgtaataataataaaatattcaaggtaaaattactaaattaatatgagattaggtagcaaacatctaaagtacaacaaaattaaaattttagccattatggagtaatgaatattgataaaacaaaattcaataaaataaatatagtagaatgaaagtagtgcttgatacattagtatgattttttactttgttggatgttttaaaaaaatcagtaattaatggatgatttaatacagcaaaagatttttaatgtttcctaaattaatttttatttaattaatataaaataataaatgtcattttcttgtgtgatgatatgatatttatagtaagagaattggtcaaatttcatatatataatttattttaaaagagtttagcattttttttaaaagcaaattatttacatattaatcaaagactggtagtgagtgttattttcattatttatacttttgagactggacaaagtcgtttatgggtttatatgtttcagaccatttccaactctattcaaactctatctttcgagtaagaatctcttcaatcttccatattttcaagttaatgatggaaatttccagtttttactatattattatggattatttggtttggttgagttaggttacaaaaatataaatctgacggttgactgttgttttcaaattgtggatttacaaataattattctccaaaatcacttgattttgtgctctaagaaaataataaaatcaagtggttttgtgaattaaataaaaactgaattcgggttgaacggttcaattttcttggttgcggtattttgtattgttcacccctaccgcttattgtcatctcaaagagtctccttttatgttttagtttctgactactaaatggaccgctataaggcccataaccaaatttcaaagagaattagagagttcatcacggcccaagatgaatatacccaagtctaagtttgaagtttgaacattaaagcctttttattttgttgtttgtttgatgcgcaacacggcaacagattatatgattttcattaaagttttaactttccttttgaacgacagtagagtagatgatactatataattgaactacatatttagttacttatattgccaaacttacggtgttccgctatcaacaccggttaagaaacttaaaatataggagtttgactgatatgtcagattaacaactgaaaagtatgactgtatgatagctgaatggtaacaattttaaatggaatagaaattactttttttttaaatgtaaaacaactattattcagaacatgtcttataaaatcatatataattttatgaatatttaaacgtatgttacaaaaaccttatataaaataaaatataacatttttgacaacatggtttataaaagtttataaaagaatacaaatttgtatttgtgctgtcttaaaaatgacaaaaaaatagtggtatttttgacaaacagtaacataaaaatgatacttttaaaattgtctctcaaaatttagaatgtaagagttttctcttcaaaaagtctaaattttaagtttaaatataattaaaattttagtagttttgttaaattgttaatttgttacggagtaaataacaacagcaaatcattatcatttacttttttatcacttgttgaaatcaaatatattaaaaagacatagcaacgtcgaaaacataataacaccaaaaaaactagttttgtagtgtgtaattagtactggaaaaggggaatgacaagaaagagaaatgcacgtggtttgggacgaagcaaaacgacgagaagttacactcgtcaattgcaaaacgagggtatgagctgtgtcatgtcgatcgttttcaatacttccaaaaaacttacgaagtggacctcatgcatacaatatactccattctccatatataggcagaaagaactaaaaccacacatcgttttctttagtctggtccttcaatatctctttaatttggttccaacagtcaaaaaatgtaaaaactatagtaccattcagttacttaacataaccaaaagttaaacagtgaaatttccaattctttttcactttgtgggacacacgttggttttaacccactagcctatcaatataaattcgttttttaacagttaccaccacattaccaactctagttctactgtacggattgattttaataatttgattagttacagtctgacttactagtccatatatgtatactcatagatatgtgtgttagaataatctctacatttctaaataacagtaaaactttacatgtgaacattggtaattggtgtattgtgtgtaataatactttatttaaaaatattcatcgagtttagcaacacaatattcacgggaagaacaagaacagttcaaaacttgtaaaggtgaaaagaaaaagaaggcaaagagttgactccatggattaaagagactgtgtcagccttgttctcaaagcgatccaaaaccccaacatggatgttcttcatctaattatgttattagtaactcttttatgtagaaaagtaagtctttcaagtactatctttaaactatcatatttttaaaactgccacaactttccaaaattacttgaaaataccaaaaagtgtttaagcaagggttttggagagtgttagaatcttcattacaactgacttagaatctttaatttatgaaacgctttaaaattttatttttttgccgtgttttgtaataattgactatatctgaaaaacaaaagtaaaagtggtgtgtaataaaattaatacagtatagaaaatgttgttatacaatctaccaacacttttaagaaaaaaacatataacgttttgttttatctttatatatatatatataagaattaagaattttcaatattgcataaaaaattaagataaacaccgggaaaatattgttaacagaaaaagaaaatcctgtcaagacatcgtatactaataaataagagcatcattaacaatgggttcttaaaaagttttaaaaactcttaaaatattatataaaataaaatatgaataaaaaaatagaaagggttcttaaaaatgttaaattggctcttaactaagagatttttgatacactctgttttcctattaaaaacctttaatattttactattattttgtacataaaaatgttaagaattttactaagaacccaccattaaaaatggtctaatagttcttattgaataatctcatgcagacagtgatagtaatagataaaactattttttcacaaagaaataattaaaactaataaccccaaaatttgtcggaatcattgttccatcagtttacgttgtagtaggacccaatatcacacaatcttttagagaagagattttgcactttttctttataacaaagaagaccggcgcatttgactttaatatgtaataaggtttggaattcgagaaatatttaggaagaagaaaaaaagaagattgcttgtgaatcaggaaaagcaaaactcacaagtctttgagaatacaaattctttgtagttttttttgtgacaaactagtatggttaaaaactattttatttgtagttgaatgtttctatatatataaaagttgtgattggcgacacaaaaattgcgtatttcaacacctaatttggaaaacctcacttttgttaccaatcagcattatttattacacatgtacgttttttatttttcttcccaaatacaatttgcgtttttcaaaacagagtaaacgcttgtaaaccgcttttcaaaacaacaaactcctttaaccatgtggtccaacgaattccgcaatgagttttacacatatgtttctattttttattttttaattattaaaagcatttatatactcatatatataatatttatttaccccaaataaaataattaaatttttctttcactttcttgtaacctgtcttttttctctctctttttttttacatcatcatactttcctttacgttttgttatcagaatttcaaactgttttgctacagtgggattacataatttcatcagaatttcaaactgttattatttatttattaacacaaaaaattaatatatgttattgtttatttattaacacaaaaaattaattatttattaatatatataatctataatccgtaccacaaatagtttttttcacgaatcaaacattattatataccgcttattttgtacaaaccgcacttgtcccgcaaatatatttcttccacacgtaccgtaattgaaccgtaccgcactacaataacgctttccccgcacaacaaaaaccgcggttaccattcggactctaagtattaatcacaagttttggtacaatatatataatctctattgattagcttacatttaaaaaaataaaatattagactatatatgatcaaagaaccatgtatttttcaatagcaaaaccttaataaaaaaaatcttattctctcttcataagcatggatatgttgtatgattccatatttttcgtgtagtgttcattaacgatatctttgcgacatgaaacacattttggactgtatgtaaataaaggaattcttaataattaattataccaaactctacggtataaaaatgtgaagtattttgaaaaaacgtaagaaaatgtaagtacaaagtgcaaggggcaacgaaaacgactaataactgcagaatatttggggcattggaatggggtagatattatttatggctgtcaacactgtgaagaaagtgacatttcctttgattcttttttttataattgaattttgtaaaattttattcaaaaaggaaaggacttttggtcagcactgcactgcaaaacggagatttcgccatcttctttgtcacgatgtcaagttgctctcaattcttggattctctatatccccttccaaatctttcttttatctctttcctagtttttcatttccccattttttaaaattttattttcaatatctcaacatatttcattgaaaaaactagcttcgtgtattttatacgtgtataattgttttatttgatcatctcattttattgataataaattgaaaggatacatgagatacaaattttaaaccggcaaaacacatagatatcctcagaatctaaatcttaaacaagagaaaccaagtccgaagatgaagaaaaaagttcagaaacataagtcgaaggaatagtttcttggaaactaaactgaaaacgaaacaacatttcaaatagattgcagaaaatctaaaccccaaatagaagagattgtaatatactcgtgcaaaaacattttagtatttttttaataaaattttggagaagtgacttccccgcaaaagtatgagaaatcttattataccaataattatgtaataagtactgtggtaatttgctggtgagactttcagagcattaaatgttttttaacttggatttttatttgtcggcacgcaattgaagaaaccaagtgaaaaatttaatggcgaatgatggtttgatgatgcgtttgtacagaagaaaaaaacgatagtgtcttgtgtcgttttagagcggtaaaagtaaaacagtaatcattaaaaataaaataaaaaatcatttgataatgatgtaaattttatttcttgccgactgaatttatattcgaaactgtacaatttcttgaacgtactgttatgttttgatgggacctttctcatttattgctggacccgtttttatttgcaaacaaaaacaaatacgaatagtgaaaaataaaacaaaaagatttattgaaaatatatggtaactaattgataagtgttgataacttaatatacgagtgaaaacttttgataacgaaaaataaaataaaaaaaagttcgaaaaaaagaagaacatataggagctgagtaatgtacgtatatttatgagaagaacacataacataatgataataaatttataagaatgttagtattttcttttaatggttaagaaatggacaatcctagtatgaatctaaaatgatgggatgcatgcattaaattaatcaggctgaggaatattgacacgtgtccatatccatatgtggttgtccgaaaaagtcaacttactccagttaattaccaccacccttttcatttcttctagaaaattaaaaaacgttacgaaaaacttaactaattgtcatatcgtatacgttacaaagattattgactaattatttattcaacgtatttttgccatttaattttggttcattgacttattatttttattagtttattgactaccagaccattaaatagatttagaattagataaaacgtcaaacaaaatagctgaaaaaggatagtaatttaggatactctccaactaaagtttttaagcacttgacgttaataacgaagttattaactagttaatcgatttgaaataaaacaatccaagataatttttcaaattttcgaaataaagcgactaacatcttgataaacataattgttttgaagaagtctaaacttaaaccgaaaaagtagagggactttcttaaaaaacaaaaactaattatcttctagtaaatcaaccaaaaaatcttgtagtacctgtaaaaaacctaaacttgaacaaagcagtatcttaagggtatgatttaaatcaagtttgggaatgaacaaacccactatctacatgctttcaaaacaaaatactacagaatacagattgtgcattttaataacagaataatataaatgacttgtaacaaaaaaaaaagaataatgtaaatgacactggggaaaacaaatgtggtattaaaacatattaaacagtttatgaaaacaaattctaaggaaaaacgaaagttatatacatgttggggtgaatttattagacattgaaatcaataattaaatactcatgggggaagaaaaggacacgcatgcaaaatagagacagaccaagggtaacaaaaagctactgaccaacgctgccaatgcacactttcttttaccttctttctccatttgttcactctgataaggaccattggacccaacactacacacaatattaccaaacctaaagaattttttttctttcaaaatgaaccaaaagaaaagaaaagaagagtatattaatttattaagtagtagcgaaaactcaaaagagtaaagaagcagaagatagaagaagaacaacaacacacgcgagaaatttcagatctttcctctctccgcatctccctttttgcatcctcgtgtaatcatcgtctaagaagaagaagaagaatccttttgcttgttgctttactttctctgcaaactttcgtatctttgcgtgtttgagaatctctctatctttctcggatttggagagttatcgaagagatcgtgtcacattaaggtaaaaacagagttttaattagagttctgtttcggttctgttttttttttggtttgtcggtgggtttactgttaccccttccgagaatcgagggttgagatctcatccgtattgttcttcttcaatcggcattactgcgaaatctaacgtttttattgttttttccgaatcactgattcagcggaataacagagtatgatggttttttgatttcgacgttttctgattactactgtttctttttaacggtttctgtctcatttaaagtcttgagatttgcatttatggcgatagctaaagtaatgtcttttttttattaggattgaagacaagtctttaatgcagagaaatcgtgtgaaaatggattcttaagccccacttttagttgcagatctggagctttttactgggtttctgctaatttatcgacaagaacaaaaaaaggtttacacaagtttttgtttttatgtttctgttttgtggttaatggcttaggcaaatatcttgtgggtttggtactgctttagttcttatgttcacgaggaatcctttgctttgaaagtctatggccgtgtaaaagagatatgtatttaatgtaatcacaggaagatttacttttgattcaaaacccaagaaagttatgatgattcttggtttaatttgttttgacaagttttgtcttttgtttctccaggtttgttttgtctcacaagtgatggtcgtatgactcacatgcatgtcctctgagctcgtttagcatcaataagctttccctttgaattgatatgtcaggtaaatttcgttgtttgattagattttctcatttgctgagactttgcagtttactgagactttgtttcttttctattgaaggtgttgaagaaatcagtacacttgacgaatttagggaaagaagatcagactttgaaatctcagaagatgagagacggcgctcaaaaatagggaatttgaagaagaaagccattaatgcttcaaccaagttcactcattctttgaagaaacgggggaaaaggaaaattgactatcgggttcctgcagtctccattgaagatgtaagggatgaaaaagaggagagcgttgtgcttgaattccgccgtaagcttcttgagagagatttgttacctcctagacatgatgagtaccatactcttctgaggtttgtctgttctatagtagctacatacacactctggtcgctttagctaaaaacatgatgtgttgctaatactgtcaagctaatcaattattcattttgaaaatgtaggtttttgaaagctagggatcttaacattgaaaaaaccacccagttgtgggaagaaatgcttagatggagaaaagagtatgggacagataccatactagaggttaggagtcatttatttaagtttgaaacctgcttgtttccatatgaaaaaaagaagtaatttcttgtgtacaacatacttggtatttggatgcaagcatctaatcattctctggattagttgatggaatcaatatctaactcttataattttactatgtatgtgaatggtaggattttgatttcgaagagcttgaagaagttttgcaatactatcctcaaggctatcatggagttgataaggaaggaagacctgtctacattgaaagacttggaaaagctcatccctctaagcttatgcgtatcaccaccatagatagatatttaaagtaccatgtgcaagagtttgagagagctctccaggagaaattccctgcatgctcaattgctgcaaagcgtcgaatctgttccacaactacaatactggatgtgcaaggattggtaattatttaagttcttaccaagctttggaatatttttgcattgtgttatgctctgaagcagaacttgcacctttagtgcttctagattcttatctgtgaagtgtcatgttaatgacagggaattaagaactttacaccaacagctgcaaatcttgtggctgccatgtcgaagatagacaacagttactaccctgaggtacttgactttctcaattttacatctcatatgttcttcacatgcattcccagttgtttgaagtcatcatattattttgcagacgttgcacagaatgtacattgtaaatgctggaacaggtttcaaaaagatgctttggcctgctgctcagaagtttcttgatgcaaagaccattgcaaagatacacgtacagctttcagcctagttttctatttggtcaactattgccatgtgtagttttcttatctctgtcaatgcaggtgctagagcccaaatctctatttaagttacatgaagtcattgattcaaggtagctttctttctctttacactgcacctgaaaagtttcagaaatcatgtctagccaatacttatgagctctggtgctctgtgctttagtcaattgccagaattccttggaggttcatgctcttgctttggtgatggaggagggtgtcttcgctctaataaaggaccctggaatgatcctgaaataatgaaggtaaaatctatatctttttagattttgctgttagttttcgaggatgctgttccttaaggaacttttaagtaggagttcagattctatttcggctttgtacatgaagctcattttagatctattccttgattagctcatctaccatggagaatcatcactttttaggcaaagcaccagaaagctgactgacccgcattattcttcttcctacataagtatacatccatcaaaggtaaatgattctatctagccaatttctctgtttgtcgtagaacttttttcatggttaatatgacaatgcaactttggattttcaggctatacaagctgagacttcagcagcagagtcgatatcttgttctgatgttccttcttctccaactggaagattatgctcagcctcttctcatgtgaattcagcttatgaggaagtgagttcttgtgttagtgcatttttgtcacagaacaccttagttgatactgaccagaacagtatgatctatgtaggctagggcatcagatgttaatggctattatagttgcgacgacaagtttgccatacctgacaaagctactaaccgaaaaggccaagaaaggcaatcccaataccaaatgcgtgaacttaatgcaacaactatcggtttaaaatgtgaaacatcttcaccaggttatacttcttattaatgcttttctcataaaacaatttcattttatatgtctccttttttaattcaaatgttgctcagtgctaatattacagatttcttctatagttttctcaccttttgaatttcatcttctctctggtatctcctaggtgctcccatcatccgttggcttcatgatttaagggtaatgattgacaagataaaatgtgagaacctagcgaaaagactactttcgttaatgctgaaactagctgcagtttttcgttatactccgcttgagcttctgagaagccagactacagtcagcccttcaagtctaacagaagatgacagtcggtgcagcctcatctcaccacctcctagagagcccacaatgaaagaccggattcttccatgtttggaacgtattcagaaactggagaaaagttatgaggatattcggaacaaacccgttgcaatacctgtagagaaggagagaatgttgatggattctttagatagaatcaagtcagttgagtttgatctcgacaaaacaaagagggtacgatacctttcctgttagttttaaaaccttcaaacttaaagattcagtatggactcaaaagcgttttttcattggttgcagcttttacacgccacggtgatgaaacagatggagataactgaaatgctgcaaaatatacgagactcccaacttcacgtaagaacctaatctgcctcagtatagcaaggaacattgtgatgagataactaacactcgagattgttctttgtgcagagaagaagaagattgttctgttaataaaccataagagaacatctgagttttgcataaatacaaatctgcacatacagagaaagagagagagagaattgaaaacaaaagacatgttagtttctttagctctttcccttctcttctaacttatttcacaacttttttttgcctttctaaataggtccctatgcttccactttttaagttataaaaagaagaagaagaagatagtgacagagaaagactctgatgatcaatcctgtctgtgataatttagattgagagagatcagaattttaaaaaccaaatccttttgttgtaatcagtgtagataagaaactacactaagctaaacaaatgagattttgtaaatctttcccaaggtattttgataatgagaaaaacactcttgagtctctgaagaatccattttgtttaacatgaaagcaaaaactatattattaagtaaaacatttatatcagaatctgatatttcaagtggatttgcagttgttaatgtttatgattagagtttgatatatcatcaaggttgcataataatgaatgatggccaatgagataaagacaaaacagccctcgtaatcagaaccctgtattggaattatataagggtaaaaccgtcaaaataagtaacaaaataaggaaattttaaatcagaaaaaatagagaccgtccttttccactgtgaacgaagataaatttcgctattcctctctctctctctctctctctctctctctctctctctcttcttcttcttctccgttcgtgctctggactcgctcgaaatcgatccgatgataatttatgcagctcgaaacttaatttagaatcatacctttttctggatttggctgacgaatccgttttcaattgcacgagttgcttcgccaggtgaatctatcgatcctaggttttctccgcctctgattttttcttgttcctgagtttttggaatcgaattttacgattggtagggtttgtgttcttgaggaggcttgtgaagtatttattatttggtttcgtttctcccatcttcgattatgtcggtagttttggtttctggaaatggactttgatatttgtgtacatagattgcaggtttgatccttgtttctgagcgatttgcttgttggagattgttataatctcatggagtcgtaatctattaggtgttttcatgcttgattgttcactaaatcacatttttatgttttaagtatgttggtgttattggattctactatattgtagcttctgtggtccctggctttcgtagtttttagtaataaaggtgctttttgatatatgtaggtttatcaacttaagaatgtctaattatcaaggggatgatgctgagtacatggaagatgtggatgatgaaatggatgaggatgatttagatgaggattttcgtggggatgatatggctgcctctgattccgatgtcgatgagtttgactactctgtaagtattcctgtgtgaagtctaatgtaaatttgctaagctatttttaaaattcctgtgtcaaatgtatagctttaatgtcaattaataatttctgcagtctcttactctgttgtgtgggttctttggtttcagaataataaaatagctgacacttcagctgaccaagcccggaaagggaaagacatccaggggattccttgggacaggcttagtattacgagagagacatacagacaaactagactagaacagtataaaaattatgaaaatgtccctaactctggggaatcttcagggaaagtaagtcttccattctctatgtctcgtaggttttctttttcttctatatgtttcactaatattgggtttcaactgatacttatcatttgcttaatgaattcaggattgcatggccacacagaaaggggctcttttttatgatttctggcggaatacaagatctatcaaatcaagtattcttcatttccaggttcatattatttaaacatatctattttctattgagtcaatgtttttttggtaattccatcagtatgtcatgtgtttgggtaatgagggtgcacaaattgctacaactgtctacctaagttaaagcttaaaagatatggattcatagactatttttatgcggacatctaactaaagttgttttctttttattgtagttgaggaatttggtttgggcaacttctaagcacgatgtctaccttatgtcacaatatttggtgagccactattctactttgacatccggaaagcatgatgttctcaatgttcaaggtcatgtttccccatctgaggttagtttcttcctgaatgatataagattcctctataaatacctacatcagtttaatggttgttgtctttttcttgtgtgggtgcagaaacatcctggaagtttgttggagggatttacaaagactcaagtgagtacactcgcagtgagagataaatttttagttgccggtggatttcaaggagaacttatatgcaaggtaagctctagagttttacaatcatggatttttagtttttcacacaacaattacatgcattctaatcaaggaacttcatctttttccacattgattttattttcagcatcttgatagacctggtgtgagcttttgttcacgtactacttatgatgataatgctataaccaatgctattgagatttataacaaacccaggtatttgcatgtcttttgcttgaggttgtatttgccaacttgtctcttctaactgattttttgatgtctgtctgtctgcagtggggcacttcattttactgcgtcgaataatgattgtggagtcagagattttgatatggagagataccagcttgttaaccagtttcgctttccatggccggtgaatgtaagtccctactttttccttgattttttttttgtttttgttttggtataagttgatctgtagtgcttgtagcagtaagtttcagttacaaatacgttttgtaatctgatatcttcttttacattacgaaattgtaaatgtaattgcaccccaaattatttaacgaaagggggtttttgtattgatagcacacatctttaagtcctgatggtaaattgttgacgattgtgggagacaaccctgaaagccttctggtagaccccaacactggaaaggtacagaaacgatctctgtgttacgtatccctgaataaatatgctttctaactaaatttggaattttctacagacactggcaacgctatcaggacatctggacttttcctttgcatcagcatggcacccagatggattcacgttctccacaggtaaccaggacaagacctgccgggtttgggacattcgtaacctgtcaaaatctgttgctgtcttgaggggtaaccttggagcaatccgatccattcgctacacatctgatgggaagtacatggccatggctgagccggctgactttgtccatgtgtatgatgtctcaaacgggtatgaaacggagcaagagatcgacttctttggggagatctcgggaatatcatttagccccgacacagaagcactcttcataggcgtttgggaccgcacttacggaagtctaattgagtatagccggcgccacaactactcctaccttgattcatttctatgatcacccgacataccagaggaataaaagagccgatacatatgtgctgctgcactctcctgtcgctctgttaaactaagaaacccgagaaaagagaaaacataaactcaagtcgatctctaatggtgtaaatgatgtgttgtgcaagtactagtaggaatgttgtcacagagagcggatttagttagttaatgttcatttcttgtatgagtgttggagttcgtgtattgtacataagtatatgaggttcgggtgagtttgcatcaagtctcaactcttggcaaagagacaactttactcgagtctgtggctcgttatttggctatggtcacttgtagaggaactcaatttgagatgtttctgccgattgttggatcaaattatatatcatgatgtttcataatatttctgtttcctagactattaaagtgtatcaatggtaagtttctctctctcttctctctttaatatcttttagagaaagctaaactttccgatcaaacctttgccttctggtttgattcgaaggctcatgttcctcacatagtgggctcgtgtctggcatctctgactactttagcggagttggctagctttcttctgacagcgatggcttccttagcgtcgtcttggtcggcaccactccggaagcagtagcttacatagtatcgtcttgaccggatttcgggtttgtctccgccgttgttatgtttttcttccagttgtttatttacttacaataaattttattagggatgtgttgataatatcgattgaagcgaattatcgcttaatgaagtgtattattcgatgcttttacttttgagtttgcaattacaggaattgattcatagcttttcaatgaattatggactcttattggctttgatcaatttttgtaaaatctgtgccgctgtgtttttggaattcgggaatcaattgtcttttggaagatcctttctttgcaaatttgatgatgatgtttgttgggattctctaattaaaaaccgatggacttctgtgtttaaagttctagctgtttccggtggctttggagttttccggttgttgctgaacagatcggcgatgaacggtgacgaagaatcatctatccacgtcttcaactttatttgttagcattccacgtggctttgcagtcgggaattatttagcttacttccttaaaggattatgtttctcgattgggcttttctcgttgggcctatggttataagtttgttggttttagtttcatatgtatcaagacctgtaatattgagtttttacaacacaagttataaataaaatacaaacactttatgagaaaaaagactattaaagtgtagattatggactaaatcttttaaaaaaaagatagtaggttcttcaaagtgtatcctactaaattacaagggtttgaacgcaaatatttctttgaaaatctcataatccagaaagaaccaacgagagaatgccacatcatccatccgtaatcgtatcctcacaaacaaaatcttcttctgcttcttctcctgcttgccagaatccaaaaccaaaccttcagatcataaatccaaaaccactcatttttctattactgaaatttttcttagagaagaagaagaagaagcaaaatggccacaagcgcatcagctttgctctcaccaaccacattctccactgcaatctcccacaaaaaccctaactccatctcattccatggccttcgtcccctccgtctaggtggctcctcctccgccctacccaaactatcaaccaccgggagaaaatcctcctccgctgtcgtgagagctgagctaagcccttccatcgtcataagtctcagcacaggtctctccctcttcctcggccgtttcgtcttcttcaacttccagagagagaacgtagcaaaacagggcttaccggagcagaacggaaaaacccatttcgaagctggagatgatcgtgctaaggagtacgtcagtctcttgaaatcgaacgatccaattggattcaacattgttgatgttcttgcttggggttctattggacacatcgttgcttactacatcttggctacttccagcaatggatacgacccaagcttctttggatgattcgtttcaatgtcaatctctcgtatatgtatatgtatatgtttgacttgtgttgcaagctatctaatctgttctctatctctgtttcttcttctgttgttgttgttgttgtctaagacttgtccctctttttgcaaatgttttatttctccatttacaaagattggtttgcagagttttataagaagaacataatagtatatacactatggaaacagagagatgaaatcacatttttacttgcgctcaagatttcgatttagtttgagctaatgttcgtatgaaaaacttaggtgatttggtgaagctagtttcatacctaagagagagtctagatgtaagatctcagaaagataaagccaatgtctcaacaaaaacagtatgctcaaagataaagtatacaaaaagaaaaccaaaaacaaagacataaaccttaagtttagatcaagttacggctgcaaataaaaaaccattgtaataaaggagggtagtgtctatggaaatgaaagtttgaatccttatgattcacatcctcaatggaagaagacttggcatgtttctggaccttgaaaagaaagtgacaactcctcgatcatctcatctcttgtttcttgagcatatgttgtcggaaaaaagattgtcgcagactttaagcagcgagcatttttcaagatatatttagctacatccatctggttctgcagcaatccatgcatctcactccaacggaacgtttcgagactggacaacaaacatgtaggaacacaattcagctgattgtcccactgatttggtagatccgtacgcccatttggatgatcctgtgatcaaacatgagaagtttggcttaaacattatagttaattgaaccaagagtataggtctctaaggaacaaacttacttctatcacgtaagcctcgagctctcgtaaattgggagagcttttgagtaatcgggcaagtaaaattgaccaatctgaatcacatgaacatatcttcaattgttcaagctggttgaagacaagaccctcatgatataaagactgcataagatgacaaaagattcaacttcaagaaaacctggtttattgttcaacaatgagatggatagagtgatggaaacagattacctcttcggtgtagactcccaagcataacgaaagacgcttaacagatgtgattgatccaaagaactttttgatattttggaatgtcaatacaaaatctgcctcctccaacttaggcatatcttcaaaatcgtagaagtatcgaggactatcactgtcactctcatcatcactatcactctctagcctttcatcaatgactttcaaatacttcaaagaaggagaattcatcttaagcccatcaagatgacaaggacgagacatctttagggttagtctctgcaaggacttgacaatcacactcaatttccccaaattgtcaattttatctcgttccataactagatcctcaagaacagggcagttggaaagaagtcggtgaagagaatttgcatccgagtaagtcacacgtccaaggaacaatgttttcagggaggggagacataccttacgaggaacatcaacgagaatctcgtctttcagtttcaagatcacaatcgatttgcatttacataagcttttgggcaatttagttggaagctccgcaaaattaaaaagctttagacttaactcacggacgttgctaacatgaactgcaagtgaaacccagagataaatatctttaggtttaattgatccaattgctccatacctaaacttgagactcaagctttcaatagccggagctttatgtactcgcagactcgaagtaataaatctagccaacccctggccttcagacactgaataatgcctaaaattgtactccagtttaggcagccacatccaaagagacttccatcgcatcgataagatactcgtgcttacagcatcttttgttgaaagaaatgatagtaccttcacgagcaattcatcaggcaactgactgatcttgtccattaaattcttcacaatctccacgtttcttttcgttgatgttaaccaagattcatttatcttgtcgaataagaaacttggaatctgtccgagtaaccaagaaaagagtgaacataagtaagaacatagacaaggaataataacacaaaggaacataagatgtattgccttgtctagggcaaacgaacaggtttgttctcttaattaattttcttaatgaataatcaataatgaaggaaatgttttaaaagaaattgtttgtaataaacatgaattccacacatttcgttggaaaatactcactaaaacattagatctaacatttactgtgcacgttacattcgtaccatccattcatgtaaatcttgaataagcatacacctacaagtgttcaagttccatatattcaataagttcgaaataagtaacacttttgcaatgtaaaaggcgtccgaatacgaacatgtaagaatgtaaatatcttaacctaaaagacattttcatgaagctaacatggtcccatgtcaaaaaaagttttaaaaacatgaaaacaataaatttttgagattcatttcatcatagaaccttaagctattatgctcttggttagagatgtgttgtaattcgatctagattctcccttaatcgaaacgagatcaaaagaaaaagcaacaaaggaaagcaagaaaactgaaaatcaacgaataagcgaggaggaagtcctttcttactacataatatatggagtttctgttgtaaataaaaaatcaataaaacttttcatgtgaatcgaaagtctcactcgatgatagctatgattatataacaaacaaccctaactcacggatttgatcttgattgcctcttaattgtgggaagattgtagaaactactcccttctatccattgaaatcgttacctttttctttattttattttctttggggaaatttgtttcttcaacctcgtcttgagagtaaagaaaattaaacatatacgatgtcgtcttgttttattagatggcatcctagtacacattctatgacggtttgggaaaaaatttgaaaaaattaatggttgattgagacagaacggtcaaagtatgtgtcatttattcgctaatttgggtataagaatttaaagtatctttgggtatttctaaacatattatcatttatataaaaatacttctcattattgaaatccaacatactctcttctatccattgaaatcatcacctttttctttattttatcctctttggagaaatttgtttcttcaacctcgttttgagagtaaagaaaattaaacatacacgacgtcttgttttattggatggcatcctagtacacattttatgatggtttgggaacaaatttgaaaaattaatgattgattgagacagatacagtcaaagtatgtgtcatttattcgctaatttgggtataagaatttaaactatttttggatatttctaaacatattatcatttctataaaaaataacttctcattattgaaatccaacatactctcttttatccattaaaatcttcactttttttttctctatctctatatttcccaacgtcgttttgaaagtagagtaatttaaatatatacagcgtcatattattttcttagatggcgtcatagtaagctatgatggtttgggatagaagtttcaaaacattactagctgattcacagagatacggtcaaagtatgtgtcatttatttgttagttaatgtggatataaaatttaaaatgattactatttatatttctaatgatcatatatcatctataaaaagaacttcccataatgttcggatatgacttagccgtttttcccctaaacccaagtttaaatctggtatctttctccttagggtaagacttcaaacattgacttctccgcccaaaccgtctgaaacctttgaaataactctaattctgtaacttttggtcttttcgaaaaatatgaatatatatgtaacaaaaaggcccgttgaggaaaataacaagaaagcccgttatgtttagactagaatggattagagaagcctctgcatgcgacccacaacagtacgttggtttaaaaaataaaatacaatcatgatgttactttcagaaacggcatgtctcatactaggacgattaggacaagctaactcaactcttgaaacataaagtttggcattaagattgcagaaaaaaaaaaaaaaaaacaatttattgaaagggtcgttgccaagattccacaacttattattaaccaaagttctcataacataaagataaacttacaacaaatagagaagacaacgatagagaaacactactgacccatctcaacggtcaacactactgactcacctcatcctcagtctcagctgcactacttgcacttgtgcatgcatcagtcttggctaaattttcttgactcgcctcatccgcagtctccgctgcacttgcacttgtacctgcatcagttgcggctacaatttccgccacacgagattccattaaagatctgtactgtaaaatctccattttatacctcttcccatcctcacgacttttctcataataaacctgttcaaaaatcataaaccaaacccgttaaatccattcgagataaatgaaacttgaaaacgtagtttaaaatcatcagttaatttcttaagtcttttgaattacctttctatcagattcagagagattggtccacatgttcccaaaattcttagggctagatactttttgtccagcgttctcagctttaatcctcacggattgctcagcaacgaagaagttgtaaccggttctttgacgcttaggtggcttatgagaatccccctgagatgattttgctttcttcttgcctcttttagtttcaggagaaatgtggtaaagcattcctttgagcttttctgagcctacctttgtgcttataagataaccactttcgaatttcccatcgatgatcccagtaatcacggtgccaggtttcagttcttgagagtctgaatatgtttcagaaagcaaatcccaacactcaaaataagatgaaagaagagaatctaaaaactttggatttataaatgcaaaaaacatgcaacatatccaaaaacatgaatttttaagtacctttgtcacggtttgcagatttttcgataaggagcttcaatgctttttctgcgaagaaaggacaaacatgtatattaatcttggatcttcttggagaattagaaagagagagatcatgaatggtattttaagacctttttcccaaaatgtagaaagtggagcttggaagtaatagagatgctcaaattcaaagagcattttaagatacgacttccttagaacaaatgctgaatttgttattgttgtcttaaaattgaatgcgtcaatcacttctttgcatctacgatccttgatcacctaaaatcaataggatttttaaaacagaattgtataatatttaatgaagaaaaaatagatttaaaacttgatgttcaatggcactatgaacttgttaccttttcaagaccacctcgagatgtgacttcgttgaaaagccgatgcagatcaagactttttccacccacaataggaatcctttacaaacggaaaaaatcagaaacagtttaatgtaatgaaatttagtcaagagaatagatcaactgaagcacaaaacattgaacatatcagaagagcataaaagcaatttccatttcccaacatttttacttttaaaacaatttagcattaacggtaaccaaaaaaaaaattaaaaaaaatcttacagctcttcgtggcttatcaattcaaatctttttgtcaaaaccaaataaagactgattttggactacagtttaagagcaaaccagatccaattcaataagccatacacacttccgtgccttcacaattcgataacctaattggtttatgcttccatctagccaaataaattttatcaagcccttaaatctacgacaatacgagtcatttttattttaagaggaagttcagggccaaagctcaaagtcaccttttccaataacaatattttgaagatttttttcccttaaacaaaaaaattgccacttatcccagtgtttctcaaaccaaggagaacaaggctactgtctactgactcctttggtatatttataacccaccatacaatggattgtgaataaagttgtagaatctctaataaatttatcaacccgatgtagagtaggatttttcatccacaattgtaattttataaacaataaaattcattaagaaaaccaaaaacactaaaagaacatgcataactcacttaaattttttgtccgaagattcatggaaatcccggagcatctcccagaaaagttcggggtttcggacaatatcctgatacaacatagacatgtgagaggaaacgtcgttgtctaaagcagaggcattagcgggaacaacttcaaattgtgaactatcggtcgacatagtttcttttggagtgtttttttttttcttttgaaaagatttttcaactttcagagatataaatgaacgaactttcatacaactttcaggatttttttatcttcttatctggaattaggggcctaatgtttatgtacagattttgtttttgtctccaccacatatgcatatactaaatcccctttttccttttacataatccgcgttaaattaattacgatttacgacttgttgcaaaatgttgaatgaattgtagcagttttacaaaaaaggtttttcctttaaatgtagtcagtagataagattttatttatattatgatattaagtaaagggtcctaagtaaagtgagtgctttttcgcttcgtatttgaataaaaattatcaatgatattgcatgcatagatggacaatatttcaattatttattctttttatccaattttccttaaaactaaattagctgttatctatttttagatacatcatgtaagaattttcttagaaaaaaaattgtagtgaaatttttgggaaataattttaaaacaaattaaaattggaataggtcaaatattacaatatttttggacataatcttttgtggtcatatttttttttctttacaaataatcaattaaaagatttagactaagaaacttttactttgttagtaaatttcacaaaagaatatttaagggtgcaggtgagtgtagtaaagattgtgggctaagaggttggggagatagttcttcaggactcaaataaatgctctcggagaagcagtaaggtttaaaagggttaaaagcttgcacaggtttaacaggttaagagacaagagtacacaggcagacaagacatagtgagaaaccagaaaactacctgagagaactcttgaggagagtgggagtaagatgtaaaaccaaattagagcttgaaacagaggggataagcggaggaggagacgtcggaatcacccaaaatctcgtcggagctcattagggttggttaataaccgttggaagtttccacttttgggatgcaaaaggaaacatagatctggttaaaagcgggagacatacttctaatatcctccttgggtaccgtgcctgggagagaaagtttttcaaagtctcattctatgaattgtagcagttttagataaggtttttcctttaaatgtagtcagtagataagattttatttatattatgatattaagtaaaggatcctaagtaaagtgagtgcttcgtcgctttcgtatttgaataaaaattatcaatgatattgcatgcgttagatggacaatatttcaattatttatttttttatccaattttccctaaaataaattagccgttatcgatttttagatacatcatgtaagaattttcttagaaaaaaaattgtagtgaaatttttgggaaatgattttaaaacaaattaaaattggaataggtcaaatattacaatatttttggacataatcttttgtggtcatattttttttttctctacaaataatcaattaaaagatttagactaagaaacttttactttgttagtaaatttcacaaaagaatatttgagtaccaatgtaccatccattaattgcttccacaagacaagaggagcaattatgaaaggctctagcggagatgagagtacgataacaaagataatgtccctattaagttgatacaatgtgaaggtaggtagttttagaacaattcttatggttattcttgtatataattttcttttaaaaaaaattgtattgatttcaaatttttggtgtacagggagggtcataaatttttctcaagataatagacgattagaaaaaaactgggcatatcagaaatgataataactagtaataaatatgcaagcttgaccggacatgtaaaatatactgataccatttcgtaacccacatggccacattcaaatatgacaatgcgtgcgtgaattttaaaggtaatcacataattgcatatgacatatcgtcagctccaatgaaggaaattggaaggaacaacaacatctttctcttgtacaaagaggtcgtctgaattccgtatgattgcgtggaccaaacaaagcaagacacttgtaacgacgccaagaatcaggcattggaggctattaatgaaccacaatgcccaaagcgagccaagaatcaacccaaagacgataacacggtcgctaatatgtcgaccgtacaagaccaacggatggtctctatagaaatataggagtagccacatggctacaaaggatgcaaccgtgacaagagccatcggatcaccgatcaagaagagtgtgatggaagcagcggttaaaagtacgtagttaaccgcaaagtggtgaaggttaagtttaacgcgcgaaacagcgggggagaaagagcttggacggtcgatggaaccgaatgctagaaattctgaccaccatggacggtagctagaaacagaagctattagattgtgcaccgacaaggagataacatcaccagcggagagacttatctcctccgccgggatcagaacactctcccccggtgctaacatcgccgatcaccggacaccacttttgagttctctagtcaactagtttaaccgaaattaaaagttttgaaggtataggtatatagcaaaacaaaaagtggttcccacgttgattaacgttttgggatgggccagttttattttagggcccataaaagtcgggtcggatcctcttcaaaatgtggattcggttcagcgattctcttctcggtagttctcaaaagcagagagcagcggcagagacgtctgagtagaacctgggatccaggttcagttattttaccattataccccttgaactcgtcttcttcgtcaaggtaatcttcgatttcagatggaatctgtagaaatctagattccaatttgcttaattgccaatagtttgatgggtttttgcggttttgcgaatccgaggctctcggaggtgagattttcgtctttgaatttagagttctcgggtctgcttagttcctttaagttccagagatgatgaagaaaaatctattttggattaagctcaaatatgaactctgtaattcattatagcactagtgttgcggttcgtaaagcttctcgctttctcttcacatcgaggaaattttgcaatggtagcatcggtggtgatgtaaccgataacgggaccgaagagcccttgaagataacttgggaatcttcggagatggattgtgagtttgaccaggaggaaaatggtgagaaaatctctgttagaaaaaggtttatggagagtactaaactcagtgcgtctcgggttctcgatacgttacagcaagattgtcccggtttcaatacgaaatcagctttagatgaattgaatgtttcaatctcagggctattagtgagagaggttcttgttgggatcttaagaactctgagctttgataataaaacaaggtgtgctaagctcgcttacaagttctttgtgtggtgtggtggacaagagaatttcaggcacactgcgaattgttatcatttacttatgaagatatttgctgaatgtggtgagtataaagccatgtgcaggctaattgatgagatgatcaaagacggttatccaacaacagcatgcacgtttaatctattgatatgtacttgcggggaagcaggccttgctagagatgttgttgagcagttcatcaagtcgaaaactttcaattaccgaccttataaacactcttacaatgccattttgcattctttgctaggggtgaaacagtacaagctgattgattgggtttacgagcagatgttagaagacgggtttacgccagatgttctgacttacaacattgtaatgtttgcaaactttaggttagggaaaacagatcggctttatagattgctagatgaaatggttaaagacgggttttctcctgatttgtatacatacaacatcctcctccatcatctagcaacaggaaacaagcctctcgctgctcttaaccttctgaatcatatgagggaagtaggagttgagcccggtgtcatccatttcactactctgatagacgggctgagccgagctgggaagttagaagcttgcaaatactttatggacgaaacggtgaaagttggatgcacgccagatgttgtttgctacactgttatgatcacaggatatatatcaggtggggagctcgagaaagccgaagaaatgttcaaagaaatgacagaaaaggggcaactcccgaatgttttcacatacaattcgatgatccgcgggttttgtatggcggggaaattcaaagaggcgtgcgcgttgctcaaggaaatggagtcaagagggtgtaaccctaattttgtagtgtatagtacactggtgaacaatctaaaaaacgcggggaaggttttagaggctcatgaagtagtgaaggacatggtagagaaagggcattatgttcatcttatttcaaagttgaaaaaatatagaagatcttagttttttttagtttgtttcataaggcttttttgtgatatcgattaaacggatttttttttttgcctacctcatgttccttaacatgttttagtaggctgttgtgtattagccattttaaccgaaccaaatgtattgaaccgaagtgaaaagaaccaatcagaaccaaacgaatggatactaaattttaaatccgaattcactgaatagatacttaaaaatctataaaaatacttgaaaataaccgaacaatatccaaaaaaacaaaatttaccgaatagatactaaaatttaaatccgaatgaactggaaccaaaacttcaagatacccgaatgaacactatagaactgaaaccgatcggataaccgaacatcgaagactaattttcagaaattgaaataaccaaccaaaaaaaggaaaacgcatcgtcgacagcagggttcgaacctgcgcgggcgaagcccaacagatttcaagtctgtctccttaaccactcggacatatcgacttgttgtgcagaatcgaacgtaccttttatataattgttacaaaaataaaccagcccaataaaggcccataaatggtggcttcgcttgaatcttctagttgacactaaaggttctctttacgactccggcgcgtgtttcgttatcgactttagtaaaaaaaaaactcggaatctgaatccgatcaaatctgaacaacaccggcgacgaatctctgcggcgtagatttagatttcatcccggggagacttaaattgatgcagtagtgaaatatcacggcgaagggatggtttgttggtaaaagagccaattgaaatcagttatgtcatcgggaggagccggagagtataacgaagacagacatctgttacgatccaccgacggagatgaagtcggcattggcggaggagagggtgatctagatgttgaatctcagtctccggctatcagaagtggagctggaggagttagggatctgttcaagcatatagatcggagattttctctttccggtcgtcgtttaagttttaaacggatggagaatatcagagtcgatagagagcgccataatccttcttcttcttcagcgttttcggctgctggagaagaagatggtggtggtatcagtaatttacatagcgttgatgatcgaaatgacgagtacgggtttgatgaagaagttctcggagatagtgctccacctgagtgggctctgcttctcattggctgtcttattggtgttgccgctggaatttgtgtcgccggcttcaataaaggggtacggtcatacatcagatctcgatgtatattgattcgattgatttacaaattgagtgctgattctatagagtagtatttttgtcttaggttcatgtcattcatgagtgggcatgggctggtactcccaacgaaggtgctgcatggcttcgtctacagagactagctgatacttggcatcggattcttctaattccggtcactggaggtgttatagtaggaatgatgcacggtttgcttgagatcttagaccaaataaggcaatctaattcttctcaaagacaaggactagattttcttgctggtatttatccagtgataaaggccatccaagctgctgtgacccttggtacaggatgttcactgggtcctgagggacctagcgttgacattggaaaatcatgtgccaacggttttgcactcatgatggaaaacaacagagaaagaagaatagctctcaccgcagctggtgcggcttctgggattgcatctggtataatctacaccctcgctctcttcaacagtttatgcatcttctgagttgatatttatgtgttattggattgtcaatgaaaacatagctccttaagatcagcttttacctggtgaatttgatcaagaaatgtccatattagggacctggtatgttggcctatgcaacatttattgcccctcgttcttctcgctcactctcttggtctcacaatcgtctatgtactatatagcctagaaatgtgtatgtggatcataggtgtgtagatctagacaaagcatcttgcgggagtaattactgaaaaatagtttacttatggccattttgaaatatgattcttgggtagtggtgtttcttactaaaggtgagagcattgagatagtcatctttatttctcgttacaggtttcaatgcagcagtggcgggttgtttctttgctattgaaactgttttaagacctttacgtgccgagaactcgcctccatttaccactgcaatgataatattggcctctgttatatcatcgactgtgtcaaatgctctgcttgggactcaatcagctttcacagttccctcatacgacctgaagtctgctgcaggtatgtttctttcactgttaatctatattgcaaaccttccagttagtcttgtggtttgcgtttttttgtagcttatgatttagtgtcctgatggataggtgataatgtgatatatcataaaaaatcttggtatctttagataatgaatgccaatatttatttgcttcatcgagtatttgtgtataagtttccaaacatattttttacttgtctccagagctccctctgtacctgatactaggcatgctttgcggtgctgtcagtgttgttttttctcggctcgtcacgtggtttaccaagtcattcgatttcatcaaagacaaatttggtcttcctgctatcgtgtgccctgcactaggtggtttaggagctggaattattgctctcaagtaccctggaattttgtattgggggtttacaaatgttgaggaaatcctgcatactggaaaaagtgcttcagctcctggaatctggttattagctcagttagccgctgcaaaagttgtggctacagctctttgcaaaggctctgggcttgtaggtggtctatatgcaccaagtttgatgattggtgctgctgttggtgctgtatttgggggttcggctgctgagattattaacagagctattcctggtaatgctgctgttgctcaaccacaagcttatgctctggtattgtattccctttgacgcaggcccttgcttcagtgcagttttcttaaattaaattttagtactgtccaatttgattgttgtgaaatctgacacattaagatgccatcgttttatgtgatgcaggttggaatggcagcgacactagcttcaatgtgctctgttcccttaacatcagtattactgctgttcgagctaacgaaagattatagaattttgcttcccctcatggtaaatattctctttcccgttctgtttcagtgatgcttattgtataaactcacttaatagaggcggattcataacatattcccgaatttgcctgtttaactaattgatcagtaaagcccttgttgacactatgaaatgtaccactgaccatgtcgttgtaatactatgtttataaccagaggtccagggctagtttgtacgtagataaaaacattccttttccatttaacattctatattctggttcatattttgattaagctgttattgatattatctctctgtcgatatctatgaacagggagcagttggtttagcaatatgggttccctctgtggcaaaccaaggcaaagagagtgattcatctgaaggtcgtagcacaggaagaggatactcttctctttcaccttccgaacgtaaaaccgaaggagtctggagacatacggataatgctgactcccttgagcttaccgtcatagagaaccctgaccataattcctttttggatgaagagactattctggaagacttaaaagttatgcgggttatgtcaaagaactatgtgaaagtttcttcaggaacaactctaagagaagcaagaaacatccttaaagagagccaccaaaactgcattatggtggtcgatgacgatgattttctagctggaatcctaacacacggtgacataagaagatacttgtccaataacgcctctacaatcttagatgtgagtagtgaaacaaaacaaactccctcagtctcatcgcatttagttgaaccgagtttaagtcttcgtctcttgcaggagaatacatgtccggtttcttctgtatgtactaagaaaataagctatcgaggccaagaacgcggtttacttacttgttatccagacgccacagttggtgtagccaaggagttgatggaggctagaggtgtaaagcaattacctgttgtaaaacgaggtgaagtaattcacaaagggaaacgaaggaaactgcttggcctccttcattacgattccatttggacttttctcaggtaaaaatatctcttttactaaacactagaaatctaaaatatgaccaaaaccaaagttaaattttttggttctctttgtttttgtaacgcagagatgaaatgagtcgtaggagatcgatcaacgaccggagaaaagacaaagaggttggtacaaatgggcattgattgggtttgtgcccattttggtatagctttttttttatatttttcttcttttaaatttttgaggtcaaattgattagaacgaggcaaacaagatcgtaaaaataatattaatatatacctctattagttttgaaaatattgcttctcaccaaagtaacagactcatctcatataatcaaaagaaatctagtgaaattgatactgtacatttgttggccaatctctatttactatgttcagaatcgacaatattctaaattcatgtttgtatagctttatccaccttttacactagtttaatgatagcgtgcatgtttgaattttttttataaaattattttcttttgcatgaatgtgatgtacaactgttaaaataaagttgggaaccaaatcttgaaaatgttcatgttgatgagtaaatcatatacagaagatccacaaagatagcgtaatgactgaagatggacccatgatttgcactgaaaagaggcttttacagttaacttgttaagaaaaaaggggcaaaattaataaacagttgactaattgattggaatgtgattgaattttgttggtcatatactatgaattgcttagctttttcttcattattaggtcggtccttaatgtcaaacaaaattatcaaaatatatataagcgtaaccattttcgatatatcaactagaaaagcgtaattaaagtagaaaatcaatgttaacattcaaatggtaaatccccgataaatcattttcgatatgtgaattttgtatataaaagcttgaaaggtgtcgagagacatgcatgaactattcctcaattttagtttacctaatattaataatgatacgttggaccattaaaatgtctttttctgcctctttttttgtttcttcttttacaagttatggattactaaaaggaaaaaaataaatatatacatgtaaaaaaatgattgtaatttagacaaataagaggaataatactgggttgattaggatatgggtcatcactaaaaaaatagtcgttttcatgaagactgaagtcatcatccaccattcattatagaacaaaagaaccaattacatcctgattaatgatgtgtaacgaaaattggaatttttgaaatatgatttatgtgaaaacttataatgaaatttcactttaataactctcttttttttgtcaatcatttaagtttaataactctttaatcaaatttgagtagtaaaagaaagaagaagagtcaaagatttatgattgttttagctacaaaatccttttatttttagagtggaattggtaactttgtatcgctacgatatagagtttacagttttcgctgtaactaatcacaaaaactttactatgtgcatggttatcttctctctacacgttaattttttttacccgttgctttgaatagttttaaactacgtatgtattgttatcttctctctggacgttaaaatttttgttaccaatccgattcttaataaaattatgagactgcaaacttttttctttcaaagtattatactttatatttagtcactgaatcatttcataatgacactatacataaaaatatttagtgggcatgaggagaatctttatagagtagaaagaggtcacaaaatatccgctcgtgcggaagagaatactgacaaaaccggtacccggcccaaccctacggcccacgcgcgtcgaaaaccgtctcctgcttttcataaaaacccttcttattttaattctctttttatctaacctaatattattaaattgatttcctagatccgtttgtggtcctcactatattctaattcaaaatttgtcatttacatcgaacattacacaggctaaatgttttagaatcatattctatttttttatgtttcctatgtgtataaactatgttatgtgttaacacttcgagaaaattttgtttgtttttctcttaatctatttagctcattttttcatgtgaatgtcacagatttttggaattaatgttctattttctgtttatgtattacacttgtatttggtttattacatgttgatatatgtgctatggaagagtaaataaggtctcatctatcatctatatacatagtttattataccccagaaatttggcatttagaatagattctttttaaaaaaaaaagttattcaacacttcaacttgtaactagtcgaagtaagtgtttataaaatgtaaacaatctttaagaggcttctcttagttaattctcaagtgtactactaccttgatagactaaacttgagctactatatgttttatgtagaagttggataaaatgctactttggcaaaaagttaagcagcaactacataaataaagacaaaacacgaggccacacataatatacaaaagggaaaggagaaggaccaaaggtaaattaaaaacaatatttgttaaatatcttttaaatttaataagctagtgcttcgtgccttgtacttgtagggtagaaagttgcataaatgcgtagaaacatacgagaactaaggaaaaaagtaggcctttatcgtaataatcgtcaaatttatcatattcatttcctttgtatagttgtataggttaggtgttactatttatatgggaacaagagacctataatctcgatacgtgccggttaattcatctaaccccaaaaagtatgataaaggttgataataatttattagaaacgttaaataaatcgaatccaagtgtttgactaaaagtcccatttaggattttattaccaacgggcaaatgaaaaagaaaaacagctgttgtactacatatttgcagattatttagagtttgtattttaagttaataaatctcaagtatctcacagttttgttactactaaatcagtaaatcatttaacttgaaggtgactaattattagtaattggtagataaaatattacatttaagataacttttgtaaatcagtaaaattgaattctaaatcatcaacccaagtaacttcaatagtgaaacatttagttttcttattaaaataatgcaagattattagatagagattataaagagaaaattaatctttagtatcatgattatgttttctcttcttttttgtaggatttatatcttcatttatctgcttttccttttttcttgcctttttttttgtgtgtgtgacctcacttgcctttttattcttgttttttaaaaatgtgttctctattgcttttgtaatttccccgcaaatgagaaaattgtaaataaataaagaaataattcgctttacaaattagagagacctttgatatttctttccaaacaaagactaataaaccatactcctcaattacgcaacgattaagaaagagaacttttttttttccgggagaactcttggtttttttccaggaaaaattcactttttctgttctctttctcatttctgggttatggtcttgcttgcaaaagttttctctctatgtaagcacttatctccttgctagtgaatctttaaaccatctgattttggaaaggaaagagccaaattttttttttaactttggtttttttttttttaaatccgaccagctctgcaacatcgtacttgagcagaaaaacagtatctaaaagacaacctctgttgtcttcctcatcagtgtctctgtctctctccttccgtcaccgtcaaacttagtttctactcttcttcttgaacaaggttctatatttagatcgacctttttcgagaaaaactgaaaaagattgtttctttgttgttattctgaaaacttactctgttttttttttttggttctttgttttttttcaggagttgagcacagtgaagataaacttcttttcattcatgtccgtaaaagaagattcttactctttcaagaaattaaaagcttggattttcaacctctaaaaggaagttaagcgaactcttgctgtgccaaatgaagcagagatggctgttagtgttgatactctgtttctttacgacttctcttgtgatgggcattcatggaaaacacctaatcaacgatgacttcaacgaaactgctctgttattggcgttcaagcaaaactctgtaaaatctgatcctaataacgttcttggtaactggaaatacgagtcgggtcgtggttcatgctcttggcgaggggtttcttgctctgacgatggtcgaatcgtcggattagatctccgaaacagtggactcaccggaaccctaaacctagttaacctcacggcgttgcctaatctccagaatctttacttgcaaggaaattacttctcctctggaggagattcgtctggttctgattgttatcttcaagttctggatttgtcttcgaattctatttcagactattcaatggtggattacgttttctcaaaatgttcgaatctggtttcggtgaatatctccaacaacaagctcgtcggaaaattaggttttgctccgtcgtctttacagagcttgacgactgttgatctctcttacaacatcttatcagataagattccggagagttttatttcagattttccggcgtcgttgaaatatctcgatctaactcacaacaacttatccggcgacttctccgatctcagtttcggtatctgtgggaatctcaccttcttcagtctatcacagaacaatctctccggtgataaattcccaatcactctaccaaactgcaaattcctcgagacattaaacatctctcggaacaatctcgccggaaaaatccctaacggagagtattggggaagtttccagaatctgaaacagctctctctagctcataaccgtctctccggcgaaatcccaccggagctttctctactctgcaaaaccctagtgattcttgatctatccggaaacactttctccggcgagcttccttcacagttcaccgcctgcgtctggttacagaatcttaacctcggaaacaactacctctccggagatttcttaaacacggtcgtgagtaaaatcaccggaatcacttatctatacgttgcttacaacaacatctcaggctctgttccgatttctctcacaaactgttcaaatcttcgtgttcttgatctaagctcaaatggtttcaccggaaatgtaccgtctggtttctgctctctgcaaagctcgccggttcttgaaaagattctcatagctaacaattacctctcaggaacagttcctatggagcttggtaaatgcaagagcttgaagacaattgatcttagcttcaatgagcttactggtccgattccgaaagagatatggatgttgccgaatctgtcggatttggttatgtgggcgaacaatctcactgggacgatcccggaaggtgtttgtgttaaaggaggaaatttggaaactcttatcctcaacaacaatctcttaaccggttcaatccctgagtcgatctcgagatgcaccaatatgatctggatctctctttctagtaatcgtctcaccgggaaaatcccgagcgggattggtaatctttccaagttagcaatcttgcagctagggaataactctctgtccgggaacgttcctcgccagcttgggaactgcaagagtctgatctggcttgatctgaacagcaacaatctaaccggggacctcccgggtgagctagctagccaagccgggttagtaatgcctgggagcgtttcaggtaaacagtttgcgtttgtgagaaacgaaggtggaacagactgcagaggtgcaggtgggttagtagagtttgaaggcattcgtgctgaacgattagagcggctaccaatggttcattcgtgtcccgcgacacggatatactcaggcatgacaatgtacacattctcagcaaatggaagcatgatctatttcgacatctcgtataatgctgtttcaggttttatacctcctggttatggtaacatgggctatctccaggtcttgaatttgggacataaccggataaccggaaccatcccggacagttttggaggattgaaagcgattggtgttctcgatctatctcacaacaatcttcaagggtacttacccgggtcgctggggtcgctttctttcctcagtgatcttgatgtctctaacaacaaccttactggtccaatcccatttggaggtcagcttacaacgttccctgtctcgagatacgcaaacaactcaggcctctgtggtgttcctttgcgtccctgcggttcagctcctcgacggcccattacctcccgtatccatgccaagaagcaaactgttgcaaccgctgtgatcgctggaattgcgttttctttcatgtgctttgtgatgctagtcatggcgctttacagggtgaggaaagttcagaagaaggaacagaagagggagaaatacattgagagccttccaacttccggaagctgcagctggaagctctctagcgttcctgaaccgcttagcatcaacgttgctacattcgagaaaccgctgagaaaactcactttcgctcatcttcttgaagctacaaacgggtttagcgcagagactatggtcgggtctggtgggtttggagaagtatacaaggcccaactcagagacggatctgttgtagcgatcaagaagttgattcgaatcacgggacaaggcgacagagagttcatggctgagatggaaacaatcggaaaaatcaaacacagaaaccttgttccacttttgggatattgcaaggttggtgaagagaggcttcttgtctacgaatacatgaaatggggaagcttagaaaccgttcttcacgagaaatcatcgaagaaaggcggaatatatctgaattgggccgcaaggaagaagatcgcgattggagctgcaagagggctagcgtttttgcaccatagctgcattcctcacattatccacagagacatgaaatcaagcaatgttcttctggacgaagatttcgaagcacgtgtttcggatttcggaatggcgaggctggtcagcgctctagacacgcatctgagcgtgagcacgctcgcgggtacaccaggttacgttccaccggaatattaccagagtttccggtgtacagctaaaggggatgtttacagctacggagttatacttcttgagcttctgtctggtaagaaaccaattgatccaggggagtttggagaagataataaccttgtagggtgggcgaaacagctatacagagagaaaagaggagctgagattcttgatccggagcttgtaaccgataaatcaggcgatgttgagctgtttcattatttgaagatcgcgtctcaatgcttggatgatcgaccgtttaagcggccgacaatgattcaactgatggcaatgttcaaagagatgaaggctgatacagaggaagacgaaagtctcgatgagttttcgctcaaggaaactccgttggtcgaagaatcgcgagataaggagccttaagagtgattgagagaattgggaatgctttgttacatgttccaaattttggtgtcagtgtatataacaaacgaagcttgagcaagacaagtgaattgggaagacgaggtagacaattgacgagttcttgtagctgtcaagcttctgatttggcttggagggttttgtaacttgttaaacacggtaatagaaatacgtcgttgtaagcttttgtaagttcccattaaagaaattatgcgatcatgacatttcttttagaattttgttagagatatagctagtttaaaagaatttgatatcttgtttcgttttccgttagtttagaaagtcgaaaccaaaaaatgagtctcaactctcaactattacatttctctgttagtcatggtaaacgttttaaatgattgtaatattttgattttttatttaaggatcaagtggcgtggccatgttacaggacgattcccgttgagtaaaaaattaaactccaaaattcaagaacaaacattttacatttcagtaagtgcgaaacaaaacgaatgctaaacgggatgttatgggccgagattaaaagcccgttgatgagtacatttatgtggtgaccacattgctcagtgtccgtccgactcacccaaacacaagattctggggcatgtgccccaccatctcctgccatagatcctacctacatgtaatttaaaaagtttagctaattttgatgtagaataggtaaaacttgaaattgtaaacaaaatttgaatctatagcttctcgtgcagaatcaatgaatttaaacaaaattttggctcacacaatatgatagttttttaaaagagtaaaatgtgaagatattataccattttcgaagttttgataaaaattacaaaaaaatacaaataacagaaaaaatcaaaatgtacataatgaacatacaataacaaaacaaaattgttatgaaaacttacataattggatgttactttaactaggcatataaactatcccacagagatgtatcatcgcaaaggtccgattatacaaatttcacggactatagttgtatccattaaggtctaagtcccccttataaaatatgatattgttcatgtatgtagtttccaatacggtattattacactcgaaacaaagaaattgaaatatatatacctaaatcggtgtgaatgaaaaagaatctattcctaaatcctcatacttatttagtttctttctgtgggtgaatgttttaagagattaacagtggagagtgacaatacattgacagacatatgtttatggctatttaaagaaaagaaaaaaaagcttctaaaattgatatttactttccattttacttggtcaacaaaattttttttgtcatatttatgttatatccatatttgttttaactacaaaagatatatgagtttataaactgaaccaaaattaaccgaaatgttttggtttacccaaggtgaagatcaaatcggtggaaccgtaacgtcaacacaaaattgataaaatcttattatcttgttcaatgtaagagtttactaagcagcatttttttaattttaataatattttcttattaaagttgactggactggactagtaatattaaggattgtcaatttttgattaaagagaataattattctcaagtaaattgtattgtctaaaatgttttagaatatagttaatatatggaccatctatattttttcgggcaaacatctaatattcattaaattaaagagtcacaacttttaatacaaaacaaaaaaatacatccagaacaacgaaaatgcaaagaaaaaatagaaacaaatgccaaaaagatcatcaaaagatggttaaacgagagatagataagatacaaatcaaagaaagaatacataagagatcgacaaacacttacaatcttcactgcttcttgcttgacctcatccataataaccccaaaggttacaaactctaccaaataggcagagggagccattagccgggaggtagaactttgcattagcgacaagtcttgaccattcatgctgttcactagacagaattttgggaaaataaactggttcaaagaagcaaaacaagcatttaagaatgctttcttgagggtcaaactatttgctacaagggcatataaacggagcatcatcgtccaagcgatagcttttttcaggaggtgacatcgaaggttttggaagcaccaatcctttcgatggaccatctatatatcttgacaaatataaaatctcggtgataatcaatctagtttaactccggtatttttataacaattattagaataatgtttcatatacgatgacagtaatgtcaaacgatcgagtttatttaaaagttggttggactggtagagtcagatcgaggttaaaacacttaaatttttttacaatatcaattaatgattactaatttttgattagaaaaggtaattactctcatgcaaatcatatggtctaaaatttcttagaatttacgaacaatctatatatatgttagttttttttaactatttgatttaataaatatatgatcacggtgatatacgatcacggtactataccatcacggtgatataagatcatagtgatatacaatcacggtgatactcaatctaggttaactccgttatataacatttgttagaataatgttctatatataacgacattaatataaatccaaaaagtaaataagtaacgataaatggttattttttaaatatggtctaaaattaattggaatatacataaaacatttatttttgttaattgtttgatttaataaacataagatcgcaatgatactcaatctagtttaactccgttatattaaagacattaatggattaatgtcctggatacactaatatttctataaaaccaaacattaaataactaatgataaatgaggtttttctttttctttcttccaacaaacggttatttttcttattcggtttagttttttatgtacacagtacaatagaattcagtgttttcataattcaaatttaatttattgatgataaacccaatcacattgaagtttaaatgattttaaatcataattaagaaattaaaattacaacaaaagtttgtatattgtttctcttaatatatacaaaatacataaatgtgaaaaattgaaaacaaaaccgagtttggttcatattcattagtctttggttttttacttaaaccgaaccgaagtagaaacctaaacaaaatttggaaaatagagattaaaaaaactctttagggattgctgacacattggatgacgaaagtttgaccatataaaattgttaccaaattaaaatggttacaaactttgctatataagacccactatattcctcctatgcaatacacatcccctctgtattcttctttcatttgctgctagcgttttctgaagaaaaaggtttatcctcttatatctattaattatgtcattatttcaataatttactaatcatttgattctaaatctcaaaattatcacttttacactagattttgtttcttgacatcctaaggatttgtcaaaaatgagtgattttgatgaaaacttcatcgaaatgacgtcgtattgggctccaccatccagtcctagcccaagaacgatattggcaatgctggagcaaaccgacaatggtctgaatccaatcagtgagatcttccctcaagaaagcttgccaagagatcatactgatcaatctggacaaagatctggtcttcgtgagagactggctgcaagagtaggattcaatcttccaacactcaatacagaagaaaacatgagtcctttggatgcatttttcaggagctcgaatgttcctaattctcctgtcgttgcaatctctccaggattcagtccatcagcactattgcatactcccaatatggtcagtgattcttcccaggtaagtattaatgtcttttgtctttatgattgtttaataatatacatgatataaagtttatatgataaatagtaaaaatctctctgtgattgaaccaatatttgggaatatgatcatgtatgttatcataattctatttcgttttaacatatatagagtaatattgctgtcaaagaaaaaaaaagagaaaaaaagtaataatatctatcggtaaacacagaatctattatttccttttgtttaggtttgatatttttcattcctatctgtgtttacaaattttgtcgaaaacaaaataaaaaaaatctgtgtttacaacttaaaaatggttgtcccggactaattaatttatgttgtttatgatcgaaatgtatatgggttgaataaaattttgataccatgtaaatgattattttcaaatccttcttttcttaatttacgtttgaagccatagggatctctaggcctcaattctaaaaccgtaactaaaatagtctttgtgaccttcttgttacagattatccctccgtcttcagccaccaattacggacctctagagatggtggaaacttccggtgaagacaatgcagcgatgatgatgttcaacaacgatcttccttatcagccgtacaatgttgatctgccttctctagaaggtaaatagagttgcttgtgtctcaagtttgcttccattttcaattttccaaatctttttgtcataattttcttacatgtgaaacagtctttgatgatattgcaacggaagagtccttttatatcccatcttatgaacctcatgttgacccaattggaactcctttagtcacatcctttgaatctgaactcgttgacgatgcccataccgacatcatctccattgaggacagtgagagcgaggatggaaacaaagatgatgacgacgaggacttccaatacgaagacgaagacgaagaccaatacgaccaagatcaagatgtagatgaagatgaagaggaagaaaaagatgaagacaatgttgcattagatgatcctcaacctccacctccaaagagaaggtcccaacaaaacttataatatcataatcaataatcttttcacaaaaacttatttaagttaaccatacatatataaaatcttgtaggagatatgaggtatcaaacatgattggagccacaagaacaagcaagacacaaaggatcatacttcagatggaaagcgacgaagacaatcctaacgatggttatcgctggagaaaatacggtcagaaagtcgtcaaaggaaatcctaatccgaggttattatttcgcaatgttgttagtctcttttccctaacgatttaatcatcttacacattaatatgtttttttgtgtggtatatatgttaatatgcaggagttacttcaagtgcacaaacatcgagtgcagagtgaaaaaacatgtggagagaggagcagacaatatcaagttggttgtgactacatacgatgggatacacaaccatccttcaccacctgcacgtagaagcaattccagttcaaggaaccggtctgcaggggcaacaatacctcaaaatcagaatgatcgaaccagtcggttaggtagggctcctcctactcctactcctcctactcctcctccttcgtcttacacacctgaggagatgaggcctttctcttcgttggctacagaaattgatctgacagaggtttatatgaccggaatctctatgctgccgaatataccggtttacgagaattcgggttttatgtaccagaatgatgaaccgacgatgaatgcgatgccggatggttcagatgtgtacgatgggatcatggaacgcctgtattttaagtttggtgtcgacatgtagacataaaacctttattttcagtccttatcgtcgatgatagacaacaacttgcactgatcatcagcttaattataaattctgaataaattttactttcaaatattttttcactcatttaatttctaacaattagagatgtttaatctagaaaatgttaaatataaaatttgattttgattagtaatgactgtgatttttggttgaggagacttagactgtggacttgaatgtaaagattttgactagagaaactttatgattgattggtaaagattatggcagcataaattgtaattttaaataatataaattatatcgatttaaactcgaacgattaacgactaaattctcacaaattacctttttatatactgtagttaaatttaatacaccttaaataatcgtcataacatataatttgttccctaaattaataattagataagtattgaaacattaattttaaagatttgtttattgttctacagtgaaactatttagtttatcatactttgtattgaaatcaaattcaatctttgtttttctcttttttgtggaaaaatagatcttaaaagaacaaaaaaaaatcacctctatttttttgaagaatcaactgttttcaccaaaaataaatacaaatatggtaatgaaattcacgttaaaaaatcagcatatattaatgttcaacaatagatgtcataatcttgtcttcttcttcttattttatcaaaacaatgttgtcatccaaattaatgttagaggtatgaagctggctgcggtccgcggacttagctcatatagtacagcaaggtgagcttggacaccatattacatacccgtaaaatagcgggccagtgagaccagctcaaacgaattgcagattttagcagatttagcccgcagattggtgggtcgatccacagactataaatattcaataaaattaaataaaaactaatgctcattgtggaccggtctgtttgacacctctgcaaaatgtttcactagatctcctttcaataccagttttagtcaggaaagagatttataatgttacaaaatcttacagtccaaaatttgagataaaactatatttacattttacatattcaacttagtattgtgataaacaatttattaatctcttctgaaaatactagtgtttgaataaatcacaagtgtttccaaataataaactcaagatcaccaatggtgttaagaaacggagacaagaacatttcgtctatttgtcctttgaaaattagtcacgtccaatttccatcgagtttcgaattgtgttgtcactatgtttcaacttttaacctcgagaaattagctatagatacgatggttatgttcgtgcgtcaaaacaataatttattagatttgattatctttgaaattagcggtatcaaaagtcgttgggccaataaaattcaccattaaagatagaggaaacaactatggatacaacatcacacacatcagtgactttagaagctcaagtttagagcaagatccggaagagaaaaaaaatgagttttggtttcgaagtgacgattaaattaaactgaaagccaatccctccgagagtcaataaaaacataaaagaaaaacaaaacaagcagtcagtgaaatcaaacaacaaccataaaaaataatcaagacaacaaaaagaaaatccaatcaatcattgatcaacatatacacacgttcgtaacatcaacaaaatctccatataacgtcatcacggtattgctttgtctacatttggggaaaagcaatgatatcatcaccttttccaaaagtgtagacaaagaagcacagagatgacgtgttcttatccttctgcagtcaaaatctaaactctgcagatgaacaagtatctatctgtgtgtatttataggaggctactctagggttacgatgatctggaaaccctagaataatctatagtgaagtcaccgctaatggaagacggaccaaatttgcaaaacatgggttaagcccaaattgttataaaagccgaattgttacataatctgcaaaataaaattaaaatatccaaaccatcttcatctcagaaccgaaattaaatattgaaccggtttctaccaggttgtttggttttatttaaaccgatggtttataatgacccgaagaagtcggcaagaattatgagtaatcctgcgtccaaacaataactttcgtcaacggctcaagaggggaagaagattgaattggaaattctgggaattggaattggagagggagagagagaattcgttcatcatggaggaagtgacgagatctgtgttagcagaagaaatactgaagcgtttagatctggagaatctctgttccgtcgcatgcgtttccaccactctccgctccgccgttgtttccggcgttcttccttctcttacctccctcgatctctctgtaagtttccgattctcgtcaatttggagattttatttttctgaatagagatgaaattgatcgaattttcgtttctctgttaggttttctctccggacgatgaaactctgaatcacgtgctgcgtggttgtatcggactcagcagcttaactctgaattgtctccgccttaacgctgcttctgtgcgtggagttctcgggccacatctccgagaacttcacttgctcaggtgttcacttttatcctccaccgtcctcacttacattggcaccctctgcccaaatctccggtacaattccttcttcccatgaacttttcaatgaattatcatgcttttcgtcgatgtttgtttctgaaattgatgaaaagtcacattgtttttctgaatttgtcactaattgaattgaatactctgtctttcccaagcctttacttatttgggattgctttggcttttgtcaattatattctttcttgatcagattttttcagtgtgatgcatgtagtttcgagctatatagttgaagttgtgataattgagtaatgagtgtttctgtttgggttcaatgacagggttcttactctggaaatggcagacctggattctcccgatgtttttcagtctaacttgacgcagatgcttaacgggtgtccttatctggaggtaatttgttaaagcttgctgaggcattggtccgacgaagcgagaaagtgtgaaattgaattgggttttatattcttgtgatgcttgcagtctctgcaacttaatatccgaggtatcctagtagatgccaccgctttccagtctgttagattctccttgccagaaactctcaaagctctaaggttacagccacttcttgagtctgaggcaattcttctcatgaacagattcaaagtgactggaacttatttatctcagcctgattataatagtgccttgctatctccttcaccttcttttactttgcaaagcctgtctcttgtcctggacttgatatctgacaggcttatcatagctatcacaggttctcttcctcaacttgtcaaactggaccttgaagatcgtcctgaaaaagagccatttcccgacaatgacttgacttacactgggcttcaggctctcggtttttgtcagcaactcacaagcctctctctggttcgaacttgttacaaccgcaagatatcattcaagagaataaacgatatgggtatatttcttctctccgaggcttgcaagggtttagagtctgtgagactcggtgggttcccaaaagtcagcgacgctggttttgcgtcgctccttcactcatgtcggaacttgaaaaagtttgaagttcgaggtgccttcctgttgtctgatttggcatttcatgatgtcacagggtcttcctgttctcttcaagaggtcagactctcgacgtgccctctcataacaagtgaagctgtgaagaaactggggttgtgtggcaatcttgaggtgctcgacttgggcagctgcaaaagtatatcagattcttgcctcaactctgtttcagccctcagaaagttaacttctctgaatctcgctggagctgatgtaaccgatagtggcatgcttgcacttggtaagtcagatgttcccatcacgcaactgtctctccgcggctgtaggagagtcagtgacagaggaatatcctatctgttgaacaatgaaggaacaatcagcaaaacattgtcaacacttgatctcggtcatatgccaggaatctcagacagagccatccacacaatcacacactgttgcaaggctttaacagagctgagtatcaggagttgctttcacgtaacagattcttcgatagagtccctggctacatgggaaagacaagcagagggaggaagcaaacaattgaggaagctcaatgtccataactgtgtgagcttaactactggagcactgagatggttaagcaagccgtcttttgcgggtctgcattggctcggaatgggacaaacacgattcgcgggtcgaaaagagacggttacagctatgatttgtggacagaggccgtggctcacgttgtgcttcgatggatgtgagcttggatgctctgatggttgggaattccacacgccacaacgccactgaagaactcattgtctcactagttcatgtattgtataaaatcgttcagaaacatgattcagtaggatgtgtaattttatttaaaccttttaaaaaatttgattgtaaacttgtaaaagttaaactaattccaagaaatgtattattatctttacttgcattagtaacaagcataaagcaccaaaaccatgtgattcataatagttattaagttttaaccaaaacaattagtaaaggatatgaacgattaaagtgcctatatatattagcctgagcagatggcaacatacacttaaaatctggagcaaaaccaagccaactgctgaagattaatttgaattgtgattggttaagtggtcacattgattagttagttaattatgaataacaagatacccatttatttttatttattcacatacttacacattaacgacaaatgttacctgaattaacatcacgtgtcggttcacaaaccaaacacccgaaaaccagagtcttgtcttctcctttacatatcttatggagttcctattaaaacattattttctgttagttcgttacaatataattatagtcatctatatttttttctagcaattttctagtgtccttcaatatatacttggtccagtcacatctcttgaatattctacgaaaagtaaataaaaaattcttatagtttgtatagtcaccttctttgtattgtatgttaagtaatcgaaaaggttgtagcagagagattcagtgtaatttgatgtaaacaactatataaccagaatatttagcaaagaaaattatttatatgatcacaaactttggatagtataaaaagagcaaaagtaaaaaaagtcaagaaaaaatagattgagattgatggatggaagtaaatagagagtgggtgtgtcgaagagagcatgagggattgcttctgtcagtaagcatatgaagtatttatatttcacctaaaaccctaaatccattttcttttcttttcttctaaattttattttttcagaaagtatattatccataaggccatggatgcttttctaaaataaaaaacttcttatatataaatttttttattcagatacaaacttaatttgttgggtgaagtttaggtttctatctacacgcaaaattgtctttcagcttatgacaacgtacgtcatcttcttcccatctttgttacatatttcaccgtcttgtcataagtaattatttgatgtttgatattcgagtgttattttgaatggtattatcgaccccctaatataatattatcactaatgtcttctcctatatcagcatatagttgactttatggatactaaatatgttgacaaaaaaaaaaaactgatataattttctcaacgaagtattttataattcataatgaagattaggagatacattggaacaagaattagtaaaatgagaagaaaaaaaacgaataaatatatagatgatacatgcaagttcacaattcatttaccatatgttatatatacagatgtatcgtggtgcatatatatggttgatcatgagaaggatcggatctaaatctgatcattgctttttgaattcagacataactagacgcgtgtatatgtgtaggtgtatagatatgtgtgcaatgttttaatcgtatgtgttaataaatcaataaatgtgttagggcaaagagtgaacagaagggtatgaaaaaagggtagatacgggaggcagcgagacacgagagacgagagagatacctatgaaccacgacttgtgtgtttgtgtttcattaataaaaaattactaacataactatatagtatcaagatcaaatagatcaacctttttcatttgttaaaatatactcctataacataagtctaaataagcacacccttttgttttatttttgacaactttgatgcttttgtttcatccgacaaatcggcaccttttagggttttcattacctgtttcttccccaaagacaaatcccttttttaccccattaatttactaactctcgatataattattaatcactttgattataaataaggtaatcgatcagtacctttcttggaactaacgaaaacccatcattttttaactcgacaatgaaaaagaattttcgggaaacaagaggaaaccagtggtggttgtttgattattcctctctaagattttatctgtcgacactaaccctaattatcaattaaattaacaaatgttttatttctcatttggcatccaaattgggtcatcttagatggtaaatcaactttatatatatatgatactaatgtttttaatttaatttggtcagacgcttttataggaattatgtacgtatatacagagaaaaagtctaagataattttcttttagttttgtaaaatatatattatgtttacttatatgattttttttcttactaagaaacagctaaatctaaaaacttaagaactaatttcctaaaatctttgtaagaaaatttaaccattattatttattaaatatgatgctgatgactgatgagtattgggttaacataagaatatgcaaataatataaaatataaacatccacagatgaaagtctggagagaaacaagaatttgtccaatgatcgcagagatcatcctctaaaccttagactagttagtgtatagctaaatacaaactcctattttaccatatcaatgaaaatcatcattgatataatttgacaataaatgaataacgtcttataaatcatctactcttagatacgtacggctcagtctttttggaatgtgattgtggcaaacgtaatgtacccaaccccaacattattactataagatttcttccaacatttgtgactcttgcctcttggttagggagttgtttccggacgatcttcatgatactatagcccataacatatctaacgattaatgtcaactcaaaaccaaacagctgatatacatatttggtttagagttttttggggacggatacggaataatgagtaaaacctcaattagacatgagtgaatagataaatttctttacttttcatatagtagtgttgacttattttgtttcatttgtcgaatcttaacacataatatccctcttgcacagcaaaacaaaacaaagatatcattttttccacattcatctcgaattgactttcattttttcatatttgacgagggaacttcacaatatttttttatcatctggattttgactaaatggcttgtaaaagctacaatgttccattttaatcgaaaactttataaaagaaaactaaagtataggcttgtgagacaaagaggacggtcacatatatattatcaccaagattacatatatataaattactaaaatatatagaaaaataaaagagcatgagaaagtggaatctctcaaaagatcgaagagacagattaacaactctctcgtgcaaattatattattaagccgcttgggtccaaaataaggccatttccacaaattttatggtctctttaaatttataactatgacgtgactaatttaaatcggacgatttcaatcaatttagttaataaaactcacctaacatcaaaacttatcatatcgtgtatcttaaaatacatttgaatcagatcagtggatgcatatatagaatatcaaatctgaaaatgtatctgatatagtagtggatcgactacttgaatcaaataaaataataaaagagacagaatgggattatatatgtcaaaacgatacacctaagattgagtttgacaaaaaaaatatagatattagtaaatattagtaggttaaaaacacaaaagattaggttgtctctttgtttgagcttcccaagaaacaaaaagacacacatcccaagaatccgccggcgtcgacaatcttcgccggagccatcgtcctcttccatcatctgcttaatcattttttgccctaacaccaaaaattatcgatctttttttttgtctactatatacctagatatataggtttttttgtccttctctttggatcatttccacgacgaaacggagaagaggggacgattttgccagccaagaaacaaagaattgttaaggaactgaagattataaccttctgaaggataatgaagtctaagaagaagcttagcttgagacaaagcaaagcttccaataggaacgttaacgaaaccaaacctcttcatcatctcttcccaaatctcaaacctccgatgtctttgctttctctccgtctcttccgccgccacaacatccaaaatctccttaccgaaccaccgttgctctagggttagtctctctcggctatttggcggcaacgtcgcttccaacgaatcaaagatcgccatgtaatgatccactgcctcagagaatctattcaagaacgagtgatctccatgattagcttctctctctgccattgtaacgattctagagtttaagctcttgatcgctgacaagaagtgaccgatcatatctccatcgtcgttaaatattttgtggaggaagtgaacacaattgacggcaatggtctctccttgtacggctgagagagctaacaatcggatctgtagcaaaagtccggcgagatcttcttctacgatcactagcgtgtgaaactggaattggagacctaaagagtcagcgaaccgggttaaccggtctccagttcggtttaatccggttacatctcgaccgcatccggttatgcggagagatggaggtggactgctagggtttgatgacctctctgctagggcttgcatcaatggaggccattgaagtccttgtgatatatctaaatcaagtatatgtagagctccgttatcgtttgtctccgtcgcgtcgaggatagcttggttcgccgttaaatgaccgaaccgaataaacggcgttagttggtttagccaaagatagtaacaagactcgaagtcagaattgttgttcttggttcgaaacaagaactgttctttgcatacactgctcgtgaacaccgtggagttactcatcgtcatttcgttcgtcgtccacgtggcaaccgtttcagccgtctgatcttgttgctgacggttgattcgtacggacaaggctttagtgaagaggtgtacaagtcgctcggtggagtcgccgtgaggagaagagttaagggagaggattgagagtaagttttgagcggcggtgaagtttgactgggagacgaaattcgcagcggtgaaaagaagacgacggaggtgatgtgaggcggaggttgcggccgaggaggaggcgatgcacaaaggaggaggattctcggtggtggtagcggtggcatcttcggaggaggagctagaggatttgaaggaagtaagcatttgaaaagatagaaaaagatgcttttggttcaaatgattctttttctctctcgatcaaatgagtctttttcaatggcaataataaatattattttcctttacctgaaggtatattgcttgtattattataatattatagataatccacactagctatagcatgtgtacacacatatatatataacatagttttatggatagagatgaagttggaccgaccaagcaattgaagggtccatgagaatcctcaagctggtttagggttaattatttttaaaagaaaagtttactataatcccacgtagcttaataacttttactgtcaaattctttttttttcataatctatctaatttttctaaatatttgaaatgattttagaaaagtgaatcattacattatattctaacaaattaaggcttaattatgtagtttaataatttatcattattatgtatttatgttgtaacgttacactctaaaaactaatgctattttggtttaaagtcggtaaatcctcgtgaattgatatcttagcagccaaggaatctttcatttacccatcgacgtgcaaatgatactaattaaataaaaattcactacaaaaatatacattaaaacagttctacatcagtcgtataatctatatttctgcattcacacgtcttcgtcgacaggatattatatataaatatatttgtgcggtggatcgtggagatggcccactttgctaattgattatggcatttgcaggaattatgcttataggttccaatattagatgcgtaaaatgggaattctcgttgagattctgatgccgaggatgccaatttacgagattaaagagaaacttaaagaatgagattttgcttactaagtaaaaaaaatagacaagtagtataatagatgaaggaatctgatcaaaatctcgggatgtacaaaaagaaaagagaagtagctttgcttgcaaaatcgaaaagctaagccccaaattgctaattattacactttttcacttattgaatttaccaaaatggtaatgctgcaaaaagatctctccttgacccttcaagtgaaaggattctctctatcactatatgtatgtatgtatgggagtgcctacaattagagagcatctataattggattggagcctttattgctcagtttctcgtctcttcttggactataaatacgaagcatcttatcgcatgataaatgcatttacatacctttttaatataaaatctttcatacatacttccatcaacgagaaagatgctttcaaatttcaagacttaaaccgtttggtggatctttgtttttggttaatgtaaccgtttggtgagttgttcaataagtagtaaaagtgttcctgaattatccattgataaattttgtttatagctatactcaaattcgaatccaaataccaaaacaatttttgtttaacgctagtgcgatcgaaagctagatatttagtgaaatttgcagtgcccttgctataaaggatttataattttctttttttgtcgtttacaaccggcaaaatagtatcattttaaaactcgatttataacacaagatccattcttaatttgtttgtgtggattgaattggcagagagattattttaaaagagatgagaaatcgtctgaagttggattcaaatcaaatcaacttaataaaaagactacacatatataagtaataaaaagaaaagagagtctacattaaatgaattataattaggagccggtagaagagtagtcgtcaataaggacaaaggagatggatgtgccttttagcctggataacacatagcgatcccatacgtattcgtttgcactaaaaattaagcactttactttgacaagtcctttcgattatgatatttataatttgacttaacattagcatcaatcatccacgtgaatcaatatagttgttgtttaacctttaacgtaacaagtaccatatatagaactttaactctaacaaaaataacatgtaccatagtccatagatgctttataaatttttctttttgggattttgctccaaatctagtttagtaatttttaagattttcagctgttaaacaaaattgtagtcaccaaaataaagttttatgaaatttaatacgtgttttcgatgaatatgactactactactactagtagataaagtaaaaatacatatgtttcaacttttaagtaagaaaaacaaagaattc

SEQ ID NO: 95 - DNA, 106305 bp, Arabidopsis thaliana
gaattcaacgatcaattggtactcaggagaggatcagaaattgcacttgataaagaaaggaaagagctggagggtattaaaaatctgcttgaaacttgtttcacaggacaaaagaacctgaaatcgcaggtgataacatggaaagacaagtacgaccaagggtcaagtattaggaaagaaaaagaggttgctctttctactaagaaactagaactcgagattttcaaacagctagccggatcgtacaaacaagatgcagatgcgatgcgacaagagagagaccatgctctcaaaacagtacaagagatagtggacgagcaacaacctccaccatcatttatctgccctatcacacaggcgagaccatataaactccacaataagataacttgcattacactcaaaaaatcgtgtagagtttttaacatgttaatgtggtttatatttgttacaggatgtcatgaaaaatccacacatggctgctgatggattcacatacgaattagaagctattcaaaaatggattaacacaggtcacaggacgtcgccgatgactaatctcaaactttcacatttcagctttttccctaaccgagctctccgctctgcaattgaggagttgggacgttgattcttcttgtttttcaaaccggtttactcaagttgatattgggccgataatggacccatgaaactatttgtgagccttacttttttttttcttttttttatgagccttattttaaatttgtgatccattgtacgtggcttaatccggaccttgttttctttgataaaatatccgaaaatagaaacaaagccattttttctcagaacgataaagaagacaagtgtgcttttgtaggcacacctaaaacgccatgaaaagccaaacatacgaaagaccaagaaatattaaagaaattaatatgttcccacttttttcgctagctatgaaaaaaaaaagaatcacgtgacaatcggacaatgtgacgtaacacaactctttgagatctcttttattcagagagatagtctgatatttttcaacgagtaatggaatagttttcttcagctagcaagaaattattatttgcttttgttggtccatttaaactccaatctatctttagatggaaacaaggcatgcttaaaaagccaaaactctaatcactgacctaagccctaggtctcctatattttatcttctcaaacttttatttactgttggtaattagcattgaatactatttcttttacaaaatttgaaagcgatctagctagagagagaggagaataataaatattgagagagagagagagagacaaaagtgagagaggaacaagaacaagaaagtacgtagatgtacagagggagataagaagaggacaagacaatggcctgcagattttttttacacatcggtcaataataaacttgcaatatttggctctatatatcgttgcaacttgtttacaccaaaacttatagatacacgcattttaaacactttatattcacctataagacaaactttttcttctttgttttttcaaaaaaatattgtttgtttgttctctttcttacccctttctattagaaacattcaattattactattcaaatctttcatctggttctttgtaacaaacagctaagaacccagctcaagctgtcctatcttctctgtctatgttccgtagcacaaatatttcatccactcaaaatagcttttatatatatttacaaataccattcagaaaatatatagtttttgagttgtattcacatgttgggggtaatgtaatcaagtaatttttgtgtcaagtcaagcatgtatttagttaagtctcaagctaagttttagggttttgattgttaaatatatttaaagtatttttgtcgtttttttgtaaaagaaaacgagatcaagaaaggaggattaagtgttaattataattagcttatgtctttatcttagtttaatcgccgtttgatgtattaaagtaatgtagagaacgattctttgtaactaatttttcttctttgtcggcctttctctacttaagccatttgtcgttacactgtttattatgaaaatgaagacagatgcaaaaagagcagagttaaagtatcaatttgggagagagagaatcttttacagagggcacaacactgggaactatcacgttctctcattcatttccttacttcttttttaattaccaatcttcattattactctctattttcacattatgtaatctttggtggatgatatgtactagtatttaatgatttaggacaatgtatttgactatttgaaatgtgattcaatttagattttttagtagtattttctaaagccaaacaaacgacaagagaaagataggtccggtaaaaaaaaaaacatgcattgatttcagatctatatcgattttatggcatgcaaaactatagtattaaatatagatggtttgtttatttaaaggcagcaataaatctataggcttaaatttaatgtgttatgtcgtttataaattgatattgatagatcctattatttgacctaacggctacttctcactgaagtaaagtatgacaaaatgaagtgagtgattgtctgtgtatgatatgataactctctctatctatactcaaaaaaattctacaataatttctaagaatgtgcattatttgcatgtatacttcgacttcttgtattgtagcgattggggaagaaagaatccaacggatgggatttaaggaacgatgttccagaatcacgagcaactttgaatattttttcgatttatgttatagataacattattgttttgaaaacagaataattcgtgggagctaacttatttagttaccgggactttatatagctgcaaggctagctgcgacgaatgacagctctcttcaggctttgacgacccttaacagtttttgttcattagatctgtcccttaattacttttattaattataccttagttgtctcttcactctcttcaaatcttcttcaatacacagattattttacacataatatatagacattataatattccagaagaatgtgatattactgagaggtttcaactaaaattcaacattttatttttgagttttgaaataagaaaacaagttacaaagttttaaaatcggttgtttaattagttagttgatagatgctcaatgatattatgttaacatgttactataaatcaaccaaaacaatcgaactgccatttagtcgggggttgacaatcaattactcgattttatgtagccgagtaatcgtagtgaaatgagtccattaaacggtcttaatttttccactaatctatagtttagagcacgcatagatcttataataatagaaaagcagtgacttttttttttcttcagaaaaggagtgacttattgatccctaaaatgctaaacacacttttgaaagtttgattagctaggctgccaactttttgaacattgcaataaaaagtaaaagagtctataatatgttttgggaagatcctcttgatttggtccaccgacctattttagtctatatatcctctctactctactgactacacatgcagtttccaagtactaattatctctactttctctgctttaaaccaaattaaaagctgtctttttagttaaagttactaagttcttgtttcattcaaattaaggttattaatttgtgttattattggaaaagttaaaacaattaaagccaaactaaggaggctttgcaatttggattatcacatgcaaaaacacattattaggcaatgatatatcatactatgctttttcgtaactctaataattaaaactaggaacttctcctctaaccagtaattacaaatcacataatttttgctttatttattcattagtcatcttttggttattctgtcaaaaactatttttatacaaagagaaatcttttgaagcaatctccgaacatggcaagcacatcatactttctggtcagaatttttttatacttgtattaacttcatcgaatttatcgtctaacagagaaatatattttaattgctactggttggtctttccgagtaaaatcaacgacgcaatcgatgaggttatgaaaatatgttagagactttgtgtgattaatgcaataaaccgagaaatgaaattgttaaaccgtatttacatattcagcccccaaagaaaacttcagtttacaaaacgacccagtaaaaacaaatgcgttaagattccccctaaaatcatagcggttaacctgctgactaaaccggtttacttctctaattgttcgaatttcggttcaagcctggttcgattaatccggttcttgcttccgttgctctgtaactgagatttgttccccggagacggagaagaagaagacgatgaagacgaagatgagaaaagctggccaaagaaaagccctgatttcagagaacaaaccggaacattaagcaccggcgtgattctgacattagcagagtacgatctaggcattccatggtgctgcttcattctaggtccaccggtgaagcttccgggactactcgagcttctttcaagtccatgaaacacgattttaccggaggcgttgagtctcggactatccgccgtcacggtgagaccccgagattcgatacacgccgacgatgatgatgatccgtcaacggaaggcgtcgacggtggatgattccgtcttggtttggctaatctgattcttggttggttaaggtttcgtgaatgagtccgcgacggagcaaagggattcgcacttggtttatcgaggtcaagcgagagtcttggaagatcatcgatctcgtggctagaggaagacgatgaagagagtgagagacgtgaagatgcgactgagattgattcggagatatctgattctttttgcaacggcgacgatgcggcggtagaagatttagatccccggtgaagaaattgcttaaacgatgacgttttggggtttgtggatgaagaagaagaagaagctttaatagattcttcttgttccttggcgttgacgagtctcttgagacctaaaagctctctccatcgagtcgtacaacgaggagctttaggagagaagaggtcagagatctccatctcaagtctccggcatgatttcagaacctctggtgatcctcttggttcggtggtagttgtgttgactgtcgttgacgtcgtcgtcgtcgtcgtcttagggccagagaacttcaaaggtacgagctttccgtcggagaagagctcatcggcagagagcattgtgaccggatcctcaaggcaaaactcgaaatccacaactggatcttggatttccggtaatgggtcagattgttgcttgtcaacggaggaagagcgtctgttgtcgtctctggttaaagacatccgagggctcgtccatccgtacgacgagaacttctccggcgaaacaccggcacttttaacgcaagcggaagccattaagtttgtgtgttggacttgttgataggagaaaaaagaagaatctttggagcatttgccggcaaagaactatgttaagagttagggagagaagtgggagtgacagagacaagcattatatacacagctcactctcaggtacaccgtacacacttgttcatttaccggaaccattcgggtcggttgtttttaatgggccgggttcacctatcttatgggctcagtattatttgaccctttttttgttgtcaatgcttgtgttattgatagagtgaatgactgaatgttatgaaatttagatctggttcgtgtgagtatttatttttataagttttttttttgttattatgtgaatcgagtattattttttctcattatggtcacctaccaaccaataattgagtctgatcataggcacacgtttcgtgtattcatgcatataagcattgttttctttcaccaaaaacaatccctctttgattaagaaaaatatggtttacatccatagctaatcaatatgagaacacaaatctttttttataagaaacgataacgttacaattctagcatttcaaagcagaaaatatgttctgtcttaaaataaaataactagaattgcaaaagcttaagatcaaagagcttagcggcaagagcggatcaatctttatattatgataccattctaggcaactcttgttgagtttccgataaatggtgagcaatatagattaacatacgtattgcatgcccatattatgctttctaatttgagatgaagccgatacgagacaaaatctacgaataagcaatatatacatatttataacaaatcttcataaaactttatataagtatgcattacacatttcattggtgtaacctgaaaatgcaattcttagtcaaatttgataaaaataattaagagatacgatatacagataaattgttaatagttaatactgtcttttggaacctagctagctcctttccacaacgataaaagattccaaatcacattctatataattatgttgtcatatatgatatataaattatcataaggttgtgtcatattgtgggtattggatattactattcttcaatcgaatatgtaaaatctatgtcaaggaaatatcggaagggactcttggagtgacttgctatctaacataaaatctatatctcacccaccggtcgaatatttgtcttgattcaaaatttaatcttggacatacattaataatagcatatgcatggcctagattgcgatgtaaccatgctctacataataataatgataaaattttataaatcatttcaattacaaaatatacatttaaaatatatatagttgaatgatactttacctaatacgatattaagatgtattttctcttattgttcgaaggcatatccgaataaaattttggcatgcactgtcttttcctacggtgataagccttgatccgttagaaccctcagccgaaataaacttatcaaaaaaacaaaaacaataattcgtatgcatgggctaaaacatacaatattgtatcataatggaatgcacaataccgcacataatccaagaactttggttctatccaatcgaacggagaggaactataactccgatcaaagtacagttgaaattaaatagaaactcaaatagcttttgtctctatccaatattatcaaaaagttaatagaatcgaagtagtttgaccaagtcaactacaaacaaagcttttgttagttgttgttgtggccatcacttctacttctccaatgtcacaaacgacaacatcgaacccaatactttcactactctttcattgaatcttacatctatatatatggaccagcttcttcttcctcttcattattcaataatctctaataaacatgattttagttagttaacattcattattgttgttctaatcgctaataaatatttcaaatcatttaacgactactagcatgtaaacattaattacgatgatctgaggtaatggcgaaaacgacactggctttgttttatacacgaggcacagcaatgaaatagacatatccacaattaatgggcaagtttgagtgtttgtatttccaaaatccatgtataaaaatgaccattggttaattaattagcaaaacttattcaccgattttattaaacatataaatcgtggaatttagtatagggcaagatgaatggtccacgtctttgggccacgcgggcctttcaaatccagctgttcacatgaattattctcatttgattttactcggattatatgttgtttttaaaactaagcaatttgtgtgtctatgactacgtcgacaaatgattatacaattggcgtgtattttaaagacggagattacaatgcgataccataaacaataatcagaaaaaactgacatgtgtttcatagtataaactaatcctactaaaactatttcgaaataattaaaccattcagacacgtaaaaaataaatcaaaacattaatatactaaaagaaatgaaccaatggaagctagtattacattctttaattgttgtctcctgtttcatggcagccatgccactgtttatgtatacagagagcataatgcgttatcaagaaattaaaaaccaattgactaaaccattttaacattttcattatcttcttatgttttgtaacatgcaataatatagatgatatatatcatagagaatgtagactttttcatattattatctatgtgtatcctcagctattaattctgtctaggcaaaaatatgtgagtctgtttggaaatgattattgttttggatagagtacgtaattaataattgatttgaaatggaaattaaatactaacatatgattatagtataaagttataaaaatgatatatatagaagttgacggctttgggtgggcaattactacttaaaccaagggtcttcctcctcggacacacccaaatgatcccaataattattcttctctttatctctcttttcctcttaaccatccactaatcaaacactaaaacctagaaaaaaaaaggatcaaatcatggagacggaagaagagatgaaggaaagtagtataagcatggtggaggcaaagttgctccgggattcagatttcacccgaaggacgatgagcttgtctgcgattacttgatgagacgatcgcttcacaataatcatcgaccacctcttgtcctgatccaagtcgatctcaacaagtgtgagccttgggacatcccaagtacgttttcattcattcttgacaacagtatctttattgatccatatatctctgttttactttgatatggttggtccatatagaagattatgtcatgatcttctttcgtgttcatggttttctagaaacaaaactttagaagttagttaattaatccatatctactaaaacaaaagttggaaccaataaactttaagatgatgatgtcacctcatttattttgcatccagtttatacaatgtagtctatttatcacaaaaaccttattcaaacatataacaatactagtcgatttatataatgttatggattggggtaaaattaatacacatatatacatactttataagtcttttattttcatgatcagatgattacaatttataagaaatttacatatattacgtaataatatgaaattaattcgagaggcatagataattgtatacgagaagttgacactcttggcgttatcctcaaccaaattcttgaaaaaaaagctttggataaaataaaataagagtaacgacgaaaaagtcaatatctcgattttgttggtttatagcctttagagtgtgacatattttaagtttcaaaatgtaaaattcgttgggtttgatcaaaattagtattcttattctctcctttcgtacgcctctaatgggtcctgattagttttcaaatcaatgttaaattgacccttcaactacataataattattcaatgcttagtcgtcattcatttgatcaaagatatttttctttatttcaaacaaaattccacaaaaaaaaaaaaaaaatcaaaatcctactcatttacacgcgttggattcctattcgttgttttggttgaataatcacatgttgacatgctttagttcaatccctcacggatgtatcttttatctatactattaatcgtaaatcctaaaatagccgatatatttgaacatggcatatcttataaagaaaaaaattctcgttatgagattcattaaacttttctatttattttcaataatatcctacaatttttttgttgattaaccaagttaagttttaaaagctaaatgtttctaaacaaaaggacaaaatttatactattgcgagacaaaaaagttggcgctaacatttaatcacatgatcagtttcattatcctgtagtgtataatacaactaagcgtgtttgtgtgtatgtttcaaacaaatgattagaaatggcatgcgtgggagggaaggattggtatttctacagccaaagagaccgaaaatacgcgacggggctgagaactaaccgagcaacggccaccggatattggaaagcaccggcaaagacagaaccattctaagaaagggtaagctagttgggtgatgaggaagacattggttttctatcaaggtcgagctcctcgaggccgtaaaaccgattgggtcatgcacgaattccgtctccaaggatctcatcatcctcccaatcattctctgagctctccaaaggtatacacagttaaataatccagttattgatcgtcagttaatctcttcttagcaaatctgtaacgagtaatatacgtgtttatgtgttgttgagggaatcaggaagactgggtcttgtgtagggtattccataagaatacggaaggagttatatgtagagacaacatgggaagctgttttgatgagacagcctctgcatcgcttcctccactgatggatccttacatcaactttgaccaagaaccctcttcttatctcagtgatgatcatcactacatcatcaatgagcacgtaccctgcttctccaatttgtcacagaaccaaaccttaaactcgaacctaaccaactcagtctctgaactcaagattccatgcaagaaccctaaccccttgtttactggtggttcagcctcagccacgctcacaggcctcgactcattctgttcttcagatcagatggttctcagagctctactcagtcagctcactaagattgatggaagcctcgggcctaaagaatcacagagttatggagaaggtagctcggagagcctcctgaccgacatcggtattccaagcactgtttggaattgctgatgatcgagtgtaacgagagttactattgctatattcctatccatgattggaacaattcttcggggggaaataacgtgtgcttgtctgattgtacaaacatttcctcactcttgtacccacggtagattcatgtaaaataccacttatgacgctagacatacatatatttcatcgtagttccatttgtttcaaggtattaaggacctctagaacaattgatcaaaaagataatatgaaacatcactacctgtgtacatgatgggataggtgattgaatagccaaggcagtggttcctgaaacagaatttaaataaatcaaaatcaattttcggaacaaaaaacctcagaataacaagttttcacggtaggaacatatattgaatcctttgagtctaccaatgcacatagattcatcaacgcataggcattcatctggtatgtatcatcaaataagcagaaactgtcaagataatttacattgcttactttcgtagatgttgccaattaaatccatcaaaaagcactgcgactggcactttcatcgatagaactgcgctggctatcatttctcaaggaacaaagtagagatttaggaagatcacatgatatccgatatgtatctgtttcatcggccgatagagttcacgagggagattgtcatagtcattttacatgattctagtagaatctttatataaatgtttttgttactctgttttgaggtattggggacacactcaatagggtacctataagcagctagaagtctgcaaaagctttgacgctgcagctaagccactgagaattgcaccttcaacatttgggctgacacagaaatctccacagattgctagattcctgtttctatcccaaaggcacctctcctctacggctatgcttttggctggaaacgcacttcccctagagacaacagatcattaagctgacaagcgaagagattaacagaaggcttaagagtcaggacgcttaccatctgtgggctttcatgaaaaaggggagagaactaacaaggcctgagcactgaaactctttgaacatctcttcagatattttgtttagtgtttcactcgatagcttttggaggccggtcttagcaataacactgttggcatagtctggagtagaatgcagtatccacctttcactaaaaaaatcaagataataacactcagaatttagaacgctgaagcaatcttaccccaaaaatttggttgcaacttctcaactactgtaatttcacatttctatattggttagtgaagcgatctacctatcagtagaccgtcccggcttggtgctttcacagtgagcccagctcaaaatctctgaattcttgaaagataagccctttactggtatctgattcaagaatcatagaatatgcaaaccgacagaaatcagctaaggctttcactagattactggattgatcaaccaacattgattacagactggaaaagcaaatatcttaccgaggacaacggctccttgaaagctagcataagagagaagcatggtagaacaggaatgttttgcagcttagtcgccaactccgggactagacttaagtctgtgtaggaaagcaaataaaagtgaatagagataatgtgatataacactgaaacagcaactgcaggaggactgagtttgtgcaagtcttacccagaggcggtgggagtccagttacttgagtaaaccttggagaaacaatgtttttatctgatgcaaccactccatcgaaacgacccaaattttctccttttgaatctgtcaacaaccatggtatctcttcttccaaccattccatcttggcaataccagttccaaacatactcttaacacctacaatgttgatcacggagttgataacagagactgatgtctcagagatttgagttcaagctctcgactagaaagattagaaaaagtaccagactcattacacaaggccttagatatagagttcatgcccggaacacccacatacttctttgcatccccttcctacacacattaaaatcagaaattgattacttggaatcaatcaatcctagtatcaagcatcttacaaacgcatacattgaaacaagtaaatcacacttcataatctactaaagttttaatataagtacaaagactgatgtttcaaaacctgttggatgccaagaaacttgttggaggcacaatcaaaactcccaaaaacttgtttccattcagaaacaaaacctctggattcccactcatgaacaagagccatggcatcagagttgctcacacagaaaaatggagctccatggtcgaacatcaactccttcccatcttctccaatctctctgcttaaacgagacatcatcattcaaagttaaacactttataagtgaaaaggaacattcttaatcaaaaggaaccttctttgagacatgcgtccaccaggtccacgacccgagtcgaagatagtgacggagacgccattccttgccagagtcgatgcacacacggctccagaaactgctccgatttgaataattgaaaacttattttcatgaatgaaacccgaaaaagaaatctaagaatgaaattgaggaaacccacttccgctgccgattacggcgaccttcattgcgacggcaacgctgctcatttgtttcctaatcgccggcgaaattgttgtggctgccatcggtttgcactctgattacaaacagaactatgtctcgtttactattttcgctattcaactgcgtcccgtttctaaatttaaaaacgacacctcgttagaaaagtcacctttctggactccaagcaacaaatgggaccatggcggacagtccatgccacatgttaccgtaatcgtaatgattatacgagacaaatgtcaagccctccaggaggaagccgtctcgttctcagatattatttgttcaggttcttgttgttgttctttaagatatgtgaatagtgaaggaggaagtaaaatgggttgttgggtaatgtgaaatgaccagatttgaagaagaacaaaagctgtgacgacaagacacaagaagttcaaggagaacttagggggaggctataagcaagtaactagattccttgaaacgctgcgtttagtcatgttttgaatggggagagtggatgaatgtgaagactgaagaaagagaatggtttttatcagatgacatgggtgaaatgaaactcgtgaggcaaaatatataaagctaactttatttgccaaagatgttgatgcattgcatgtttgaaaaacgaacgttatcacatctgcgccaacatttgtggcagtttttatcatcgaccaacacatgcgtcttgttttattttttaaatttgttcagaaagttcgtgctagtgttagtctcggcgtcatacactaatgtataatatataattttttgaataattataataaaaattagctaattaaattataattattatatttagaattattttgtggatccgccactgttacatgattattttttaagaaagaaagatgtatttattttgataaattgacaacccgaaatttccacataaacttaaagaattgagatagtgttttactgcaaatttaaactaaaatcatgcacttataccaacttatacgtgcatatatcaaacgtcaccaattttgtttttatattactatgagtaaagaaccaagtaagcactttaacaaaccacaaacaaatgtaaaatacaacatattaataatcaaaaggaaattaaaggtacaaactacaaatcatcaaacgggggtatatatgcgtaattaaccaaacaaaaacacatcacaatgaaacaactcactacaacaatcttatgataaaatgtacatcatcaatcacatgaagtgatgatagttcaaggactcgaagtagttgtagaaggcgggggagagaagaacggaatggatgggagactagtcggaagagagggaatggatgggagattagttggaagagaaggaatggatgggagattagtcggaagagaaggaattgtagttggaaatgaaggcaaagttggcattgccgtgggaatggtgggaagatttggttgtggcaaagctgatggcattggaaatggagacattgcagtgggcattgttggtaaagatggttgtggcaacgtcgatggcaatggaggtagtcccattgttgggataggcagatttgggatttgaggaagaggttgttgttggagaaggcggcgtgaggctgagcaagtgttgatcatcattgaggaagagacgctcactaagaaagcaatgagaaagagcttgtatgatgccatcttggatgtgttgataaatctctaactatggttaagtgggcctctcaatttgtttcacttgttttgctttgttttgatgagaaattcaaagatatgcgattgagtttatatagtggcaagagtctctatggatatgaagaccttttattcaaatatcatatatggttttggttaggtgtactttatggttggcttgagctattgttagttcaacttaatgtgtgtttaatagattattttgacaattcaaggacttttattaaagttagttcaacaatcaaaaccatctaactctaatacgtacacatgttaagtctataaccaaacttttaaatatcaattctaagcttagaaatgcacaattacacataccaattaccaccgtaaagtataccaattacacataccataccaatttatagaaagatatgatatataaaataatctccaaaacatcaaataaaacaaaacgattttatgatcattatccgaatttccggaaagacgaacaattaatggtttgacggatctgaccggtcgaaccggattgacaaactattgaattttgaaaatctgtggtcatttcccaaaagtcaacctaaccagacagaattcaaaatttcgtttctttgatacagaatacgcttcgaaccttctcgagcccgtcggaactgtaactcagtattattctggcgccgatgactctccggtcagttcaatcccgcagtaagcggaaaccgattgatgtattcgattactctgacgaggatgaccgtgttgaagaaactccttcgcaaattcgattccccagttactaagaaaacctcctgcgccatcgataagtatgatttccttcgatgctgtgagtgtttcttctctgaatttctcattgaattttgtttttgggaaggaagatcttatttctcattgaatttccccaagtttaacatgataacacaagagaaggaagatgttatttctgtgttaatatctttctattgcagttgcgaaggatacccaaagggagagtaaagtattgcaacacatagttattgatgttgaaggtaatagtaggaatattatatcttggagaacagttctcaactacaaatgatgaaaattgtgtagaattccaaattttcagatggtagtgtgtgtggtagaatagaaataaccaattatggtttatgcagtcccagtaaatgaagaaccgtcaagatgtgaactcagcggagatggaaatgtgagcctttgtcatgatggagttattacaaggaataagaatggctagaaattttctaatttttgttgtacaatatattgcagagtgacctggttgatgttatctcccatggaaggattggtatcgattcatcaacgtcatcatctttgacggaaaatgatgaaggtttttagcattttagtattctctatctttagtttcagtaattattttctgtttgttatctcaaaattgcttgctctaaagaaactgctgaattcttttagtttcaactggagaagccacaaatcctgcttctgatccacatgaagttgtaagtcttttcgagtatatgctgttcttttaaccagagatagtcaaggatgacaaacaaaatgaaaagcataagctctacttcctctgaaaagttgttgatatgctgtttgtctcaagagctatgcacgtgggtttatatgcagatagtatctcatgttttttctgtttctgcatatacaggaacccgagaatgcattcaggtgtaaactacacaaagcaaaagcccagaaaggtgacttttctaacgaggtgtcgtttttaaatttagaaacgggacgcagttgaatagcgaaaatagtaaacgagacatagttctgtttgtaatcagagtgcaaaccgatggcagccacaacaatttcgccggcgattaggaaacaaatgagcagcgttgccgtcgcaatgaaggtcgccgtaatcggcagcggaagtgggtttcctcaatttcattcttagatttctttttcgggtttcattcatgaaaataagttttcaattattcaaatcggagcagtttctggagccgtgtgtgcatcgactctggcaaggaatggcgtctccgtcactatcttcgactcgggtcgtggacctggtggacgcatgtctcaaagaaggttccttttgattaagaatgttccttttcacttataaagtgtttaactttgaatgatgatgtctcgtttaagcagagagattggagaagatgggaaggagttgatgttcgaccatggagctccatttttctgtgtgagcaactctgatgccatggctcttgttcatgagtgggaatccagaggttttgtttctgaatggaaacaagtttttgggagttttgattgtgcctccaacaagtttcttggcatccaacaggttttgaaacatcagtctttgtacttatattaaaactttagtagattatgaagtgtgatttacttgtttcaatgtatgcgtttgtaagatgcttgatactaggattgattgattccaagtaatcaatttctgattttaatgtgtgtaggaaggggatgcaaagaagtatgtgggtgttccgggcatgaactctatatctaaggccttgtgtaatgagtctggtactttttctaatctttctagtcgagagcttgaactcaaatctctgaaacatcagtctctgttatcaactccgtgatcaacattgtaggtgttaagagtatgtttggaactggtattgccaagatggaatggttggaagaagagataccatggttgttgacagattcaaaaggagaaaatttgggtcgtttcgatggagtggttgcatcagataaaaacattgtttctccaaggtttactcaagtaactggactcccaccgcctctgggtaagacttgcacaaactcagtcctcctgcagttgctgtttcagtgttatatcacatttatctctattcacttttatttgctttcctacacagacttaagtctagtcccggagttggcgactaagctgcaaaacattcctgttctaccatgcttctctcttatgctagctttcaaggagccgttgtcctcggtaagatatttgcttttccagtctgtaatcaatgttggttgatcaatccagtaatctagtgaaagccttagctgatttctgtcggtttgcatattctatgattcttgaatcagataccagtaaagggcttatctttcaagaattcagagattttgagctgggctcactgtgaaagcaccaagccgggacggtctactgataggtagatcgcttcactaaccaatatagaaatgtgaaattacagtagttgagaagttgcaaccaaatttatggggtaagattgcttcagcgttctaaattctgagtgttataatcttgattttttttagtgaaaggtggatactgcattctactccagactatgccaacagtgttattgctaagaccggcctccaaaagctatcgagtgaaacactaaacaaaatatctgaagagatgttcaaagagtttcagtgctcaggccttgttagttctctcccctttttcatgaaagcccacagatggtaagcgtcctgactcttaagccatttgtgaatcttgtgttagctttaggaatctgattttcatgagatactaaacacacaataaaaaaaaaaaaaaaaagaagagagactaaccttaataatttccacaattgtttttattttccaatatttttttgtagttgggcctgaagtttttttaaaaatataacaaaacataacatcttaactttcctagttgattccgtcaaaaacaaaagtcaaactagttgatttatataacttttgtcaactaaataaataaataaataaaataaagggcttgattgattttttggatataaaagacaaatccctattcctcctcttcatgcgtcccatagttccccgtcacaatcgcacgtagtgtagtatcttaactcatcgaccaagaccatcctttgtttctttggtcgtcttcgttctcgttgactgtatttggcttctcaacgctaattaatcaaattgcgaaccttatataattgacctttgttttttgacttaggcggagccctaaaatcaattactttttcttcaggtcaaaaataggaggagctaggaggctttggtcacatgctctgttgaaagaaaaatatgaataataataaagaagttcctcagaactctgttgctgtttcttcgtcatcgtcggcaccaataactgttatttctcctcagcaggatgctaataatttcataaagaagagacgcactgctttaagaaatagaatgtaacataatcatcttcgctctctctttattgcccttattatacatatgttgtctcatgatcttattttaatttgctatattaaccatcatatattctttctccagttatgctatcgtaagacacaagcagaagcagcatcaaatctttctagacaagaagaatcagcagcaacagcagcgtgttgatgatgccacgcaacgtgctctcttagagaagcaggatcaacagtgtattgcggcaacaagaatgattgaggaagaactcctcaagtcttctcgatcatttgaggagtacttcgatttaagaacttttgacgcccgtgtacgaactatattgcaacagcttggaacaatgctttctcagcggcgtgctgctgctgctgccatgaataacggagaggctcaatgtattacatctacccgagcggtccatacttccataagcgttagtaactctttccaatgcggaagaagccttgtgccaattaattgcaccactgcaacagctggaggtacacatctttgatctctcctgattctttttcaaattatactgacatgctgttctttattttgactctataccttatcatctgcagcattttctattgggcctgacatgcagacacaccattctactggtgctaatcaccagatggttgaagttaataggccgaatatgaaccaaattacttgtgggatctctagtcctctgattactggatttaacggcaactgtgtaccagtttctgctaatatacccatgacttctcaagacctcttcaatgctacacatttttcaactttacctcaaccttttctgcaaccaccacctgatcagtcacacatgcatagtaatctctctccctatctcttactatctatttcttttcgctttcacttttcttttatgcaattcatgtaatggtacgtttctgacaagttgctttctcccatgataaggatactcaatgagcaacgttgcttcttttggtcaaagtaatccatatccctgtggagttgttatgtcatctggctcaatggcagttgctcagaattcaattccatggaacaaccccaatcctatgcagggacttgaccctaccgtcacaagttatcactcaaacctgcaaccaatgcaacaaaccccattgcctaaacgtcaactacatcatcccctgtggaataccaatttccaatctgctcccaataacagagacaatttgcctcaggtcagtcaacaactctcaaatcatgggtctcgccagcaccgaggacaacactcccaaaatctttatcctggccaactccagaaccaagatcgtttacttcccaatctgactcagcaagctatggctttagctgctcctgtcatgcatgtaccaagtaaacaggttaatgaagattgtggtcaaacgtcttcgaacaccgttctgcggtggattccgtttatgttccatgcacgtcattgcaaggctaagaaagataagtgtgcgagcaagttttgctttcaagccagaaagatagtgaaacatatagactgctgcaaggtccctaactgcaaatataggtattgtcttggtactcggatgtggttagatcatttcaagcaatgcaaaagcatatcgtgccgtacctgtgtagctgtcagagaatacatggaaaagaataaatacacaattgtacctctccgtagagctaagtgtagctcagctagttcaaaatgtcaacccaagaaatcctcaaaatccaggcaagcatataaaaaaggaggtgctgaagctccatctgttgatgctgatctgcaacgctcaatcaagcgcccgaaactacatcgaccctcccaaaatatcactcccgagacaaagagcatttcggtgacaggatgtggtgttgtctgtaaacctcattccttaatgaatatgcaagagaaagatggtttgcaaagcctcaaagttgaggctatgcctatggacattgatgttcctggtgcttctgagattcccgttaccagggagctggtgaaacatgttgctgaagatactcccaagggtaataattgtggtggttttgctatggttgaaaaaactagttgcttattggcacaagggaaatccaaatgtatgaatgaaatgagtgcaccaaaggaagagaatgtgaaacagtctgtggaagttgtagatgcgtctaagatggaaatctcctcacttgttgaattgtttactcctgagcaagtaaaggagcatatccgcagtcttcgtcagtgggtaggacaggtaaacattcagattttaaaacttcaattcttgtttaacctttcttggttttcacaaggtcttattttcctactctgtatccttgttctgctttttgtttgtttgaaagtaactaagaatgcacatggctgtgaacgatactaatttttttgtttctttgtaattctattttcagagtaaaaccaaggcagaaaaaaacaaagcaatggggtgctccatgtctgtgaattcttgtcagttatgtgctgttgagtggcttgtatttgagccagtacctatttactgctcaccttgtggtatacgcatcaagaaaaatgccttgcactatagtattgcggttggtgagtcaaggcactatgtctgtgcaccttgctacaatgaagcgcgtgaaaaattggtttttcttgatggaacttctataccgaaaacaaggcttcagaaaaagaaaaatgatgaacaagttccggaaggggtatgtatgcctcatgatttcggaaatttgtttcttcctttgtttttttttttctttgttttctttttttgtgtgtgtctgaaccaaaccaatggttttctgcagtgggtgcaatgtgataagtgtgaagcatggcagcatataatttgtgctttgttcaacagccgaagaaatcatggagaatccaccaagtacacttgccctagttgctatatacaagaggtggaacaaagagaaagaagaccattaccactaagtgctgttccgggggcaacaagtttaccagttacttctcttagcaagcatctagaggagcggttattcaaaaagttgaaggaggaaagacaagagagggctagacttcaaggaaaaacttatgaggaggtgatctctaactctttaaggctgtcaactgttttatgcttttgttcttttacgatacatgagctttaggttcacttgaacagcctggagcaaattttgttataataaccatctaccttcattattgatatatcaggtcccaggagctgaatcacttactgtcagagttgtggcatcggttgataaagtattagaagtaaaggaacgtttccttgagcttttccgtgaagaaaattatccatctgaattcccttataagtccaaggtagcaatggttcatggtatttgttcttattcattttcatgatgcttgtttgtcacttacaagatgtattttctttatatatttcaggccatttttctgtttcagaagattgaaaatgtggaagtatgcttgtttggtatgttcgttcaggaatttgggacagactctggacctcccaatgagcggcgggtatacctttcttatctggactctgttaagtatttcagacctttcgaactgtgtctggagaagcccttcgcacctttgtgtaccatgaaattctggtaagccgttttatctctaatcccatcttctttaggtttcgtgttttgcttcacgagtacatgaaacttatcattgttacgaatttgcagattggttatctcgattattgtaagaaacgtggttttacaagctgctatatatgggcatgtcctccacttaagggtgacgattacattctttactgtcatcctgaaatccagaagactccaaagaccgacaaactaagggaatggtatgagatcgcgactgttctgtttttacttgtttgtcagtgttatgtacatttgttggcactaatcacattcctaccttttcaggtatttggcaatgttaagaaaagcttcaaaagaagatgtggtcgttgaatgcacaaacctctacaatcatttttttgtccagtctggtgaatgtagagctaatgtaactgctgcaaggttgccatattttgatggagattactggccaagtgctgctgaggatttactacgccaaatgaaccaagaagatgatggtgagacaaagttacatagaaaaggattgaccaaaaggtcatatcgaaaagagccctaaaagccgttggccagttggacctttctcttaatgcctccaaggatcgacttatgatgcaaaaagtaacttcttatttctccattccactattatgatcttgcttccaccagcttttatttatttgttctgtttttctgtagctcggtgagaccatttgtccgatgaaggaagattttataatggttcatttgcaacattgctgcaagcattgtaccactctcatggtatctggaaaccggtgggtctgcaatcactgcaagaattttcagatctgtgacaagtaagatctctgctacatatatgatcatactcaggctatataatacttcaaatcattcgactaaacaactgtctttcaaccataggtgttacgaagtggaacagaaccgcataaatatagagagacatccgattaatcagaaagagaaacacgcgctatttcctgtaagtttctaatggtggttagagatttaagagtttcattctctccttttgtatcttagaaactgacaaggtgtggatctttgcaggtggccatcaaagacgttcccaccaagattgaagacaaagataacaacctcgagagcgaatttttccataatagacaagctttcctgaatctttgccaaggaaataactatcagtacgagactctcaggcgggcgaaacattcttccatgatgattctctatcatctccacaaccccactgcccctgcatttgcgacggtttgcaccatctgccaacaagaagttgaaaactctcaaggctggcactgtgaagtttgtccgggctatgatgtctgcagtgcctgttactcaaaggactctataaaccattcacataaactgacaagccgttcatcttctacggatagtactgttgtacaacagaacgggcaagctagtcagagttatcaagtcaagcttgagaaggtatcttctgataagccctttacctatatttagattgtttatgtgtgtgtgtagctgccagaaacagaggaataaagctcggtggtttgttgatatttgcagttaaaaaaactgctagtacatgcagctacatgccgctctacacagtgccaatatcaaggttgtcgtaagagtaagatgctcttcagacattgtatagactgtacgactggagattgccccatttgtaagggattgtggagtctcctcaaactccatgcccgcaactgtagagattccaagtgcactgtccccaaatgcaggtacatagagtttttttcacatgcttttacactgattaaacaacttgtcatatatagatagatagctaactctttggtgttgcatctccgttgaacagcggtttgagagcgattagtagaaggaagcagcagcaggcagacaaaaggcgtagagctgctgtaatggagatgatgcgggaaagggccgctgaagccacccgcactggctgactcatctgatcaattacatgccagctgcattctcaacaaaaacaagagactattttgtagactattattgcatagaattaaaggaagactagaagcaaaaggaggagctttttcgtctcttcagcaggtagctaattataagttaagattagaggaggcacataggatggtacatatttgccaaatataagatgtcggttgtggtggattttttatttgaagtctctttcatattctttgttgattgattcttttgtaaataactaaaggaatttgacaatctatttcttttataggatcatatagtaaacacaagtacacaatggaccttatttacaacagatagacctcaaaagtgactacttactactaccttgaaggatgttcagttttcaattcttggacgtttcggggaagtttcacatttgtcggcgttaacttcagatgcattggttttacaagattagtgttgtacttacaagatcttttccaagtacttagtatatatgttcttctatccgtagttgtagtgacatctgtacctactcacccagcagtaacatgtacatgaattggttgagagcaaatcttgaatgaaaccttatcaccaatgttagagttttacctcgagctgttcatgcaattgcttctgtacttccatctgcagacggagcttctgctaactgtacggctctgcacaaaaagtaaacagaaaaacttttaagaaaatgtttgaaaacatatcccacaatccaaaagttattcgaagctgctttcttctcttctcaataaaaaaaaacaatgaatcaataaataaactttctcagatgatcatatatgaactagaagcagatgagggaacaagttaccttgttttctctctggcatatacttggctagtctatacttctgcaaggaaaaaatacagcttcaaagataattcagcttatgtagttgaaatttctgtcagggtcagatggcttttcacttgatagatggtcaaactctcaacattcattagcttcatagcagccttaggagttgtctctacatactatgaattttgacttcgccgttttccgtccccgtttctagttcccgtacccgttttggtgctacttagtcttttaggcccttgaagcttgttcactgcctctagaaaatgctcatggagctcaggactctatcttattcttggcttgtggttaatcgctgatcctagagaaggctctgcggtgacagacaacgctgcaggaacagagttttggtcaggattcacttggtagctagcaagttaaaggagagaaaccaacaaactctttatagatgaaaaagaactaaactcacatcacgcctgtgggtttcagcacggtctgtgatggccaactcaagctcatcagacagaaactgcaattccatttgctctcgagaatgaaccttttgagaaatctcgagtttctaatggcatatttgtggtttctgtaggaccgcgcaaaaatgagttccaacagtttcaggtggcacaatgtggagaaagttatgcaatggagatagagacagataggatgaacgataaacattgtttcatccatccatggataataagcagctatggctgttcatcaagcgacagggaaaatactatgatctaagaaagagtgtattaatgtttgtttgttcataatttcatacactagactagagtgttcaattgcttgaattaccatgggcctgaccattgtgtatatataccataggcccaataaagtaagctcaaactaacgtccaggggattcaataaacggagaagacaattaagcccaccggttagaggcagaatatccactctgaaccgactcaaaccaaaatcacctgtggaattcaaaccaaatcaacattttttttaagaaccaagatttgcagtagccgatatatttgatgcaagaaactattgaataatgaagttggatagatttcaactacaaaatacattttctgttaaattttgaaggtataactttaaagaggaaattgatagtccggtttattactggccatatatcaaattggatcagctattggtactggtgtatccggtcctccttagtcatgaaccattagtctctctatagtatcagaatatttgtttctttgtggttttctccacatatttgctattagaacaagtattgtgtgattgtgattgtcacagaatcaatagagtcaatcgttgccttatggcccttatccattttctctgacacttcatttcttccatatcttttacatgaattaaaacgacaggttctttcgatttcattatgtggcttgcctcaatttatggttctagatcacaaatcgagtctgacctgtcaatagtttggtcatgttcttgttgtatataaacacccattgatttaacacaaagagggcaaagttgtaagaaaataaaaaaaggggtcaaaaagaacaaaaaatcaaattttgggggggcgacaccataaaataaagagaaaaagcagagtccagaatccgttgccttgcccgcatctgcaactggaaaacacaaaaacagacgccacgatggatgaatgatttcgcaaatcgtcgagattttggaattcgatgaagagcgtatcaacctgggctttgtctttcttctccgacgaactttctcggcgagctgtttccgattgttatttatggaccaccgcgatttcgcttctcttaatccttctccttcatatcttcttttccactaaatttcgcttcttcacttctgctccttcttcttcttcttcttcttcttcttcttcctctccctctacagaatcagttcccgcgaactctcaatcaaggtaaaaaggtttctcaatcaaatgtttaattactcactttggctaatgaaaaaaactaatccttttttgcttaaagtgcgtttgatttttgaaatgtttaaactttgaaggattctacttgagtggaattgtctttaggctttatgtggattggtttcattgagctaccagattcctcttatacatttttttgcaggatatccaaactagtctctgatgaagatttgaaatttctgatcgagaatttggaggaggaaacaaatgattccacggagatatgggaacatgttattcacaaaagcaacgatcgcatttcatactctgctaaacgctgcaaacccaaagtagtaacttactttcaaaagtgtctttttagtcttttattattctgattactgagtatccttttggctctattattaggatggcggtggtcctatgaagtacctaagtgtcacggtcttcgagggtttctctgcagagattgtgagggacttttacatggacaatgattataggaaactatgggataagactgtggttgagcatgagcagttgcaggttgatagtaatactggaattgagattggtcgcaccattaaaaagtttcccttgttgacatcgagagagtacgttctagcttggagattgtggcaaggaaaggagaagaagttctactgtttcacaaaggtcaaattcaaccaaaaaacctctctctccctctatctgtcgcaatttgttgttgcttctttacttatcattttgctctttggttactattaggaatgtgatcacaatatggtaccacaacagaggaagtatgtacgtgtaagttactttagatctggttggcgaatcaggcaaggcaagtggattcacctaaaagttctagtcagtgttgtttgaataccatataaccagatattgattgatcatggtgaacacggtccttagtttcttttttcagtttctgttgtcagcattctttctacctttgatacttatctgactgatacctttgacacacttgctgcagttcccggtagaaatgcgtgtgagatcaaaatgtttcaccaggagaatgctgggttaaatgttgagatggccaagctcgccttctcaaaaggcatatggagttacgtttgtaagatggaaaacgctctttgtaaatacatagcaaccagtcatagaacccaaggacccattctatctgctgtcaccttaatgaaagaggtgagattcatatgaaaattctgttctgtaaaatggtatttagtgtcctgaaaatatgcttaaagcaaccggttgggttgggtcttcactgacattgattgttgtatcttcaggttccatcagagttagaaactgggacagataatgtcacaggctccatggaaacaagtagtggtgaaggagtgttgagtcatgttgtagccgccaaacagaagaaaaaaatgagaaagccatcaacgaaactgatagcaaaaggtctagtacttgtgggcggtgcgatctgcttgtcccgtggtccctcagccttaggtgctaaagtcgcattggcttacctcttgacgaagctgaacaaacgtggaacttctctgaatcagaccacccagaccaccaccatttaagtaaatttctcctgaactctggtagcttttggtatcaaattgttgtaccacagtagtactaccactagcgtatacaaaatgcaagtcggtgttgatatgaatgtaaaagcatacattataaacatacaagcctaaaggttatcattcttgtaattgtatgtactatgtaaggtctttatcccaatcaatctttacttgattcttgagtcactacaaattgttcgattgtagttgatattgggacagatgaacattagtgacattaaagttgagactaaagagaaagcttatgaggtctacttttagcccttctttttggaagttgtagcaactatagctcaaccctagatgctaagcggcgagtgaagagtccaacaccacaataaatagaagacctttactatgatattatctcattacaaaactgaaacgtttttttatcttgacaacaaaaggaaaaaaaatgaaaagaataacaaaacttttggcctcccactctctcaaaagtttgatggccaagaaaaacaagcgttcccaacagaagaacaagtgtctcaaaccggagaaagatccatcgacggtgaagagattgttggaagatccgccgaggaagaaaagatatctacaaccattggaaaatccaccgacggaatcttatggcgacgacgagaaaatggagactgaggaagaaggagaaaaatatcttggtaagaatcttccggcttctgcttttatcatcgttgctgctgaaaggcatgactccgattcatattctgaaaccgagctggagaagaagatttgcggttccgttgttgtagccaagatgaatgatgataagatggtgtcaacagataccaaaaagaagtattttcaaagaatattgagtgatgatgataagatcgtcttgttgcaaggcatggttgatttccagaatgataaagggacgatttcttatgatgatatgactggttttattgatacggtgaagaacatcattagctttcaagcgaatagtcgtcaattcactaccaaaatccgtcgtttgaaagacaagtttgtacagaaaaggaacaaaggtgtagatgagaactctctagcaaatgttgaaatatatgaaatctgaatacttgtggctaaagacaagatttttgatgaggtcaactcgatgatcactggagcaaattaaacaagtctgaatttagaattgtaatgcatcctttttcattttcatcccttatgactctgttttttctatttggttcttttttttttggtttttgatatttggattttgttgctaaaaacattatgaaagaacggcagattagattttaatgcatacaattgtgtttaaattgtggtcaaggtttatggtataaatttggtaaaaatactctcattttggttaggctcaatgagtcattttgttgccaagtttaaagattacatggttctttcaagctgatttcaacactcatcaatgtctaagagcattggcctcaaaatccgcagagccaagaagaagaaaaagaaaaatcataaaaacagagaccgtagagtggcagcgaagaagaataagaacaaagatgcacctcatgaaaccgatgcaagtacaattgacaaagctgcaactagtaacttcacaaaccggacattattctttgttgctgcttgaatttgttctactaatttgttgtttctccttatttgcaaggtacatccgacatgcatgaacatgatgatgatggaactggtgactactcaaaccagctttaactcaatttttggctctgccaccacaaacaaagatatgtaagtaaagctaaagctgggacaaactcctattatcggaaaatgggtagaaaaacccccacctttcctccaaacatattaaaaactctcaactttttttttttaaactctcacctattattaataaactaaacttaaattcaaacaaatcattatattaaaaacagcaataaaatttcttttaatttctgatttattttttcaattcgatttgcaatttctaagattaaggtttttgctatataaaattacatttaccatttaattaagattagaaaaatcagttttgttaccactagaagttatgttatgtaaactacaaaaatttataggataacacatttaatattttggtttgttcgagtttttttaggttttgatttaatatatattaacttttcaccttacacacaatgccgtcagatccagcattatacctccagctactgagaaattaatggtctttcggacatcaccctcttaacgaccaatacagagtaatctgctcaattgcgccaaacctaacgacaatgccagagcattgggtctttgtcccaaaacctcatgaagtaggttcatggaaaaaggttccatcagacttttgtcctttcataccggtccgacgaggacagtgtatcaatggggttacatattacctagcttggattgacatgtataattctgtgcttgtgagtttcgacataagatcggaagagctcacaatgagccaaatacctcggagggacgacggagatggatccaggaagaatgtgagtcttatagagtatggtggaaaagttactcttcttgactctaaccatcttagagacaaggggatgttggttttaagggttctggaagatgccgggatcaacaaggaatggtccaaaaagactatggttttgcatccttatcagctgcatttagtccaagtagacattatattcaacgtaaacggtacaagtcaaagtggcaagcttgtcttgataccacaggttttggtttctccctttcacattctttgttatgatctacaaagaaacgatatgagaaagattgaaatcaaaggtataccggacaactggtttcgtaaacacaaattagattagacattttgacgtcatgttcatggatcacagtgagagcgtcatctacttggagtcttgaatttaatcctatcttctttactatctctactaattaatgtatgcttttttagtttgtgtgttttagaatcaatcagtgtttactaatagctaataataatatcaaaagaaatgtgagctgttacgtacattgtgtgttgttatatctttggtggtcgtcgagatctcatagttggccaactaacttgaattaaaatttctatacaaatatcaaaagaaacacagagttaaaatcttaacagtttaagttatgtatttctcttacttatttctagtgtattagtatataatatagttaatcttgtaatttgaagatataataataatagaattacagtagtaacttgtaagatttggttttcttgcatattgcttcctcaaaatatgtagctatttataaatatgaacaatctcattagtttagatattatgaaagaaatgtggggtgttgcactgagttttgttatagctttagtggtcgtcaagatcagtctctggctctatagatgggctaaccctaactgctccggcaaactacctccaggttcaatggggtttccggtgatcggagaaaccgttgagttcttcaaaccttacagtttcaacgaaatccatccatttgtcaagaaaagaatgttcaagttggttttcattaaatctgcaggtttcaagaatctgtctgatttctcttctttcttctctaatctttctctggtttttgcttcaggcacggtggttcattattccggacgaatatcctcggctctaaaacgattgtttcgacagatccggaagtgaactttgagattctcaaacaagagaacaggtgtttcatcatgagctatccagaagctcttgttagaatctttgggaaagataacttgttcttcaagcaaggcaaggacttccacaggtacatgagacatattgctctgcagcttcttggccctgagtgtttgaagcagagatttatacaacaaatcgacatagcaacaagcgagcatctcaaatctgtctccttccaaggcgttgtagacgtcaaagatactagtggaagagtataattaataagacctaagtccatctagttgacgcgatcaaatgtctaccttaatcacttttcttttttgataaggtttatatcttgtttttattaatgcagttgatattggaacaaatgatcctgatgatcataagtaacatcaaacctgagactaagagcaaactgatagagagttttagagatttcagctttgatttggttaggtccccttttgatccttctttttggaacgctctttacaatggtcttatggtaagatctcttgtccataacttgtcagctcaaggattttgtctggttattaaacattctggatccacttttctatgtaaaggcacgcagcaatgtgatgaagatgctaaaaagaatgttcaaagagaggagagaagaagcaacatcggatgactcaaaatatggagacttcatggagacaatgatatatgaggtggagaaagaaggcgatacgatcaacgaggaaagatcagtagagctaatacttagtttactgattgcgtcttatgaaactacttctactatgactgcattaactgtgaaattcatagctgaaaaccccaaagtgcttatggagctgaaggtaacttacttagagagatatcgaagtttgaatctttgttctttgaaacgagatgcttaagcttatttatgttaaacagagagaacatgagaccatcctccaaaacagagctgataaagaatctggagttacttggaaagaatatagatccatgatgaatttcacccatatggtagctttttgttttcttattatatacgtacttgttaaataaatgaaattccaaactcaacatttagttgattgttgcaattgcaggttatcaatgagtctcttcgtttaggaagtttgtcacctgctatgtttagaaaggcggtgaatgatgtggagatcaaaggcaagtttaggtctctcttttgcgtcataaaaataactataagtttgttaccaaatgatctaattcaaaatcgtgttgtggttgcagggtatacaattccagcaggatggattgtattggtggttccatctcttcttcattatgaccctcaaatctatgaacaaccatgtgagtttaatccatggagatgggaggggaaagaattgctttctggctctaaaacgttcatggcgtttggtggtggtgcaagactatgtgcaggagcagagtttgctaggcttcagatggctatatttcttcatcatctagtcacaacgtatgacttctctttgatcgataaatcttatatcatccgagcacccttacttcgattctccaagccgatacgcataacgatctccgagaatcctttaagttcatctcatcaaaatgcaaatcttttttagtattgtgttatgaatcctaaaacataaaagactcatgtggaatattcatagttatcgtaatcctaattaatctctaacgtaatgaatcctaattgcatcggtgagcgtgtgtataaacacatacactgcctagtgaaatatattaactttctttattattctgtcaaacaatttcttagatttgggaaacctagctagctagctagaatcagacaagtatgaagtcggaagacctgaaagctgctatttgtgtgctcatcggactttttctcgtattcctcataaatttcgaataaattgtttcccaacatgtattaagaaggtatagttactactttctggtgaacattataacgagtctttctatacatgcaatttaaacttacaacacctctttcctcttttatcattattctttcttcatactttcagtttctgcaattagatgctcatcaaagacggcattcttggcttggagattaccatcggaatcttcctcactgctccattttcttacgaatttgggaaccatgttttttacatctcgggcctctgacacttgatccatatcactaactcgttcgaaccggactgcactcacttttctggcattccctgctagtatctgtccaaaaatctaagttatactatgaatgtggtgcaaggggaagtagtactatgaatccatgtacctctagtctataaatttggtgcttctccttctgatcttgacgctcgtgcttaccctcgtcttgttcatcattctcttcccagttttccttttcaagaactaccgtcacactctcacctgtctttgggatatacccaaaggcctcacagacaaaacctgagactgtctcatactgatggccctgcgaaaagggaaacaaaaggatagtttatactctgccaacaagcaatcttaaagatcggttcttccttctagagggacacactaaagacacggctacagagtatattacctctgccatctttatgttgagttcttcagataactggtcaatcgaagtgttggcatcaacatcatatatcccctctgctctcatcacgatataacccgttttcttctgaatttcctcctattgagcccaaaacaatggaagtgagaaatttgaatctcctctgctctcagatataacccgttttgttctgaatctcctactattcaacccaaccttgaagaatggcaacaagctgaaactaggatgagcttacctttgaatcgttttcatcaaatatttcaccaacaatctcttcgaccacatcttcaagagttactatctgcatggagagaaattagacaacctttcaagagagcaggagagaaaaaataaagtaaagaagaggacaaccagcaacatactccgatggttccaccatattcattaagaacaactgccatgtgaacctttcttattctaaactctctaagaagattccaaactgacatcgaatctgcaaattattgacataacatcaaagattattccatgtgaacaaagaatgtcaaaggtatatgtattagattaaaagattgaatgcatctatgattaccagggacaaagaatgcaggtttatgtgccatgtccaccacagtggtactttcaagcaatttaccctgcaaaacagaagaaaatatataaattcattccacaaaagtgcacaactatggtgtccttatcagtgaaaagaaacaaacacaagaaacagaaaatgaagcagccagacctttggaacataatctaggagatccatagcatatgcaataccaactatgttatcaatcctctgctcaaaaacaggaaccctgtgaagaaaacatttgagcataacgaataatcctaatggacgaaaaagggtcactaaaaaggctgtgaaaatttatagaccttgagtattgatgggtcacccaaaagttatggaagtcaaccaggctgccgctgccatctattgcaactacatcaacaagaggagtcatcacctctcgaacatgcgtatcctttatctctaacacattttcaatcatatcctgcaatatgtatcatgtgaactatcacaagtctatggtatagactcatcgaaaatccatatataacaaactcatacctgctcttcctcttctatagccccacttaattctgcaccacgtagcattagtttcaattcatcttcagtaacatatggttcactggcaccaaaagaaaaatagactataggtaagttgcgttaactctctctcaacaaggaaaaaagcacactaatatattttgatttggacagaaaactctaatctgatgcatacctccgtcctttcaaaccaagaattttcagaattcccatcgaaagatatgttactactcttccaacaggatataatatcaaggaaagccacgccactggtctgacctagatgcatagtaagtcaacataaatcagactatttcttttatcatgtgagcatattctgtctgtcaagtctttgctaatgataactaatttaaacttaccacaatcctggcaacctcttgagcattgtgaaccgctacacttttcggagttatttcagtcaggagtaatatggctacctataatcattcacgactcaaaacttccatctctatctcagtcaagatagtaacaagtaaaatttatatgtaccgtcatcactcctgtggctgcactaacaccagcttcaccaaaaatagctgttgccgctttagtgaccaaggcagtcgccgcaatattaacaacactaagaaaaatccaaagaacaaagttaagagacaaaacgattcaagcgaacattaaaaaaaacaacattctaactaatagaaaaaaccattacgttgttccaataagtatggttgtcaaaaatctggtaacatcactgcggagcatcctgaaaacgccattttcaggctctttttcagccaactcgcgcacctgatacaaaacacataacactaccacatttaaagaaccatccaagagacaagagcgtgaagatacgaataaaaacagaacagcttatcatcattggcattactgaatccaggagaggagttatttattaccttccagggccagagagtggtgatggaagtctctgccatggagaagaatgctgataaaccgagaagcacagctaagattagaccttgctctctaagaaccttaagaacctgagaagtttttggccaagcattcttcaacaacaatatactcttactaaaagccacatccaccacacttgttgatgctaatactttcccacatccataaaacaaaactccacacaccactgcccctaaaacgattccccgtttcagcaaaatcctaatcgaatcgactttttcggtggaatcggaatgtttctgactaatacccacatgatctccagtcgcactcaacacaacaaactgacatctatgactaaagtcacatcctttttggaatctaataaaactggaattggacggattagtggagaaacagagtgggcgatgcttgtttctctgaagaactcttactgaaaaattcgagctttggatacatggtctcgtgatacttgagttccttctggtgacaatgaaagaacgacctagaacagataaatcaagttccatacgaataggaggataaaccgaaaattctccggcgatagagtttaccaatttcttcccctttttaattcttgagtactgagagtataacttatacaccaaaaaagattgtggctgttggtcgaaacaccaatggaactgagagttaagatttatctgagttcggagtcactcgtgaaatgtttgcagagaagaagaaaggcggcgtcttttcctccgtcgagcaggtgacagaaagatagtaaaatgacaataatacccttatgcgccgttcagccataccagaccggtttaattggtttggtacccaaaactcggttgtcgaaacaacccaaataatttacagttggtagttccttttctaacaccacagggcacagacagatggatgtgtgctctaaaaaaaaattacttgaaaagatcaaggaaacgaagaaagtgtgaatctaattttgtgaaattagttctaaacaatagtttttgtgataatcaaaagagaattgaaccaaaaagtaacattttattgaattctacaagacttgcaaaactattcttctatttttgcagtgttggtaagtggctctcggctcatgttttgctgcccctttgattgataagtctctctcttctgtggcatctgaattcatcttctcctcagatgctacgtgctctgcttcttgcagttccacaattatcctacaacttgatccaatatctctggagtcaggcaacactaccctctctggtgattctgttttcatcttttcccttagctcctctagcttcggtacttttctttgctccttgagcctctctgtctctctagctttgatatctcgagctccaaacgccacatttttcccaatgttgaagtagaaatcactcaagtccttcttctttgtaacatcatctttttcctctccaagttcacgcaatctttcttctgagagccattgatctcgttcctctagtttccttttataactaccggttacaaccttaacttgatctggaaaaagatgttgctctttggctctctctttcgcaagctttctctcgtaaactatctcacgttctttctgtctccggtctgccttttccttcataagctggttatatataggcttattgcactcttgacgttcatgtagtcgtggaagaggtgcttcctgtttcgtgtcatcataaacttcatcgtaagcaaaagcacaagggtcttcctccaaggctttcttatgctgctcctcaaatttcttaagagacttggtctttgaagcttgacgagaaatctccttgtccacatcgttgtcttcttcatcttcaccaagtattggagcaataggaagaactttcttggacagggtcttcctcagttgcaatccaaacttgttcatattcaatgtttcttttttggataaagtcgtcatctttcccagaacaaccaatttctacgaaatcagaaaattagggcacctcgaaatcgatccgctaaagctacaacgatgagcaaatcctaattaagagaaaatatgacccaaaaacgctataatatccggcgtaggggggcttgatcttgatacaatggagctagaatcgattagggttccaaatcaagttttcttgccttagacgttgtcgacagctaatgcaaatagggcaaaattctacgagcgaaattagtaacctttgaatgagagaagagaaattcgaacctctctctcattcgtgtgttttgatatagaaccaaaaaaatggaacctgaagcaatttcccaaaacggagcccattaagtagatcaaagcccaataatattcttaccaaatattaactggacctagaaaacttaattgggcttttaagaataatttggtgagtgtagacaaagtgggtgaggctgtgcttcatgggatcaactttacaacttcacatgacaaataagtattagctagatgcattgacgttaagaaaatcctataggtaataccaagtacaagcgatattaatccacatactaaacattcatctcaacatagatggtgaaatgttaaagcctaaatgtcatcatgcattagaaaaacaaaaaccacacgaggaaacaagtttcttaaactagaaaaagcattaaagatcagcaacgtagagaaaaaagaaagacagaaacgaggtcaatgatgctcatagtagagcattgtttatctcagatgagagatacttaagcctactccacaacgtccgaagattgtttcttcttcgacttcttgcttgatttccttacaactttgtccacattctcctgcgggtctccgataacaacatcgtggtcaacgttccaagaactagaagccactttagtatcttttttagccggggccttctccttctttgtccttcctttcttagcaacctttaaagatgtagtagcctcatgatcagcatcttttccaccattgttctttgtaccaatctttttctctacacagattaaacaatttacgagttaatagaacgtccctcgtaagaaaatgaatattcgaaaaatactgaaattattgtttggaacaggcgccattaatacaagaatattggtaactggcttttctcctgtcgagtttgggaaaagattcgggagttgcatcaacaccatctttgtttagcccttcgttctctacatcagcagattgattgatgtctaaaaattcagcagttaaaagtttatttgcagcacttggacctaatcaaggtataatattgtaagaatgtctagatatgaaaatcagtaaacacaaaaaagtttaccttgtactattgctcctaaacgaacatcatctttgtgactctcgttctcatcatccacaagtgcaagatcattctcttggtcagtcgtagcagcacttttttctcccttttcaagatctatggaacatagaaagattatacagattaagggcactctcacgcctcacaactaattcagtttcgaccgttacttcaagaataacatcaccccttttaatgtcttaataaaatcagatcatacaatcgaatgtaacttgactaatactctccaataacatcaactatatactccatagacaacaatagagaaagaaaaagatagaggttactttttcctattgttcctgttggtgacattgcaaaaggttcaacctctcctttcccacttgaaagatccccaagagatcgtttcttacgacttcttttggcactatccgaactttttagttttattatcaccagcttgggttaccggagctttcttaatagtcagatcattggtctctcaagtaaattaggatttgacaaagcagtttctccagtcagcatcttaccattctcctcaactctcagcacatccacaaatagaaacgattcgttgctccggaaagccgtgttcaaagccagcgaaccaactaagtaaaaaaattgaccaccacagttaacctataaaacaaaaaacaaatcttccttgagttgttgtttcttaaacaaaaaaaatgtcggtgtgtatgaagaaaacattgttaccttcaaagcagagatagtgatgtttcgaaaacttgggaaacactattcatactctttgcaaattttcgctgtaaataaacaaccaaaaaaaacattggttttgttagaaaagaaatgaaaaactcaaaaatatagaactgagattataaagagtcacttttgaaatagatacactatcatactcatccggacgttctcatggacaaagatgatagtgtatctactttcaaaggtgactctcgataaatttgatgaaagtaaagaacacaaaagtgtttagatgatgaattatattagactctcatgagaataaagatacaagttacaatctcttagggcatctccaaccctactctattttagagtaaaaatacaaaagccttctccaaccccactctataattgactcaaaaatagagatttatgcagattgactctatatatagagcaactctattctctactctatttttgagttcaatttttttatttatactttagtccctcaaatttaaactttttatttaatacatataattattttacaaacaacaactacaacacataattttataaacttaacaaacaattaagtattaaatttaaaataattttataaacttaacaagaaacaagtacctaatttaaaataaacaacataaaaaaactaaaacatcaaattaactagtgatttaatagtccggtaaattgcttgtggatccgccaagatagtcgaaatattatccaaatgaagtagatggaggaagagtttcttgatcttgtcgttggacacatcgtttttgtaaaagccgtacttgttcactctcaaaatatgcccgaacatgtgagttttgaaaggaatccaaatcacaaaataaaaatttgtaatgttttattattgttatatgatgtaatgttttttaataaataagtagtgtttaatttaaataatgtcatattttctggaaatttttgcaaatctataatatatgaggtcaaattgtaaattatataattaaaaggaattagtatataaattagaaatagaatatttttaagaatattcttttttagagtagaaaatagagctatacattggagagaaacccacctcaaaaatagagtaactctattttagaggtggatatagagctatacattggagatgatctttatatagagaaggaagagatctaagtttcctaaactaaaataaacatatatgtaaataatatttttagagataatattaaacttcctaaactctaatattaacatttattaatattcttccaaattcttctagaatcatatctttttgccatatcttggctttgtgatctcggtcgattttcggttctctatattccaatggactctttataatctctgtttcttttttttagtttttttttttcctgtgaaactaatgtttcttctgatttagcgatggttgattgtaagaaaaaactagggttttgaataagtttagaacaaatgaaaacttctctctatgtttgagttttataagcgactttctttattagagaagaaatatcaaaagtcatttgcattgggaaatgaaaacactttaattacgaaaccagaacgtcatcaatactatagtaatgatgctttgttctgcctcgtcctttagtcttctttctagtttacgatgactcataattacttcttctgtgagattttcccatttctccaccttccacgactccggcgacgaaagtaaccattagaaaactattgttggcgtgagttggttatacatggcccatttaacagtccactttaaggcccaattcacaatccatgttattaacaaatatattaatccataaaagtgtacacattcttgattcgcctcgagataaactaatctctagtttcttcttaaagatcgatgagcttgatttcaagacttgtttgattagtacatagtaaaatattaagaaatagacaagacttgtttcatcatcatcagttacaagaaagaaagaaatacacatttgtgttaaatcacataatcagaccactcggttaaatacgatgtctggtccatagtcagacaaggaatcttatcatgttttctcggattctctttcccaccaatcaacctcgccggatttccaaccgccgtcgtacgcgccggcacatccttaaccaccaccgaccctgatccaatcttagctccctcaccgattgttatattccccaatatacaactcccagctccaatcaacacaccatcaccaatcttcggatgccgatcaccactctgtttccctgttcctcccaaggtcactccgtgtagaatcgaaacattgtctccaaccaccgccgtctctccgatcaccacgcccgtcgcatggtctaaaagaatcccttttccgatcttcgctccgggatgaatatcgacggcgaaagattctgatactctgttttggatcaataaagctacgatttttctgttctgtttccagagggtatgagctattcgatgagcttgacaagcgaggaagcctttgaagcccaagaagcaatgaacgtagcttatacaagctgggtctctttctttgactgctataagatcttgcttcgtggattcgatgatctcagggctttcttctaaaacgcttatgaacagttcgaagagtgtgttgcttggtaggtttaaattgctgagctttacggagaggatgtgagctaaagcagactctaaagatcgatgagatgtgatcgaagcgtagtagtagtttgataaaatgggttcttgtttaacatcggatttggcttcttcaagcatcttgatccagacatcatcgtcatcttcgatttgggtgtggtgaatcttccggtttacagagaaaccgggtcgaaagaaattcttgatgcaacagaaccgggaatcatcgtcttgggtattaccggttcggcatgtgtctatgcatgttgccatggtttatgatttggaagaagaaagagtttgagataaagaagagaagagagaatggttgttgagtgaagaagatgaacatagcttatatacacagagagagatggcggcgacctttgactctgacccaaaaaaatctcaaaaagtaattacagtttaattagcgctctctaaatattttattctttaattatacacatttttctgcagattaaggaggtaatgaattatatagtaagtgagattaatatatatttttttccatacacaattttattttggaaatggttttatgtttttaattttatgatttattgtccagacaattacgatgtttacaattttgtatttatttttgcatgattagtctgcttatctacacatatctaagggtcattagccatcacatgtttttagtgccaccaactttttcataacaataacatcaactacttattatctagctattttgtatgatatgtaatataatttttttttttttgttgggttgtagaatttagaaggcacttgtagtaaaatggttataatttccaaataatggggggaaaaaccaagaaaattggatctattattaaagttgccaaaaggaggaggttttcaaaaggaggaggttttcaaagaaaggtgacgttagtaatgacgtaagtctaaagttacgtgaagcagtcgccctttgactttaactccttattttcaaggttgtctgaatctaatcattttttcacactttaataatctaatgctaatacatgattaatttatacataatttaacttggaacttttttactcattaataatttgataactacgtacgtgttattgactgttagtcataatagagtgagtttagtttactctacacactccatttgtgtatatctttttttcgcgtatggaaattgtgaaagctacattatggttgaagatatctctattcagtactcaatactcaataatgaaacttgtgtaacttttatgataatcaaattattcaattgggcaacgtagattacgtgacattgtcatttgcctaatattgtcctttgtgcacacctttatgttgatggatggattcaaataaataaaattatccgtttttcttactgcaaataagttatcttatcttagttggaattttggatgttttgaaatgagaaaacaacaacaataaaattcaaaaatattaaacttttttttttaaatggcagtagaatagtggtgtccattgtttgaggacccaatctttcgttatcattgtcccttattagggtttctttcaattttcaaccagtagtcaagtagatttggctcttcaaaatcatgaaaacacaaaatactattcagttagagaattcgatttggttcacaaagaatatatgaactttccctttcgagttacacaattttttggtttctaaaatttatattgaaaaatgtcgaatatctcttagaataaatcatatgaataaattttatctatttagctaaaatataattgtgatgtgttgaagaatggagaatgacatgatgaagaatggacactgtgaaacgtcaggacacacaaaaaaacaacacaaataataagattggaagaggataccaatagactggaactttagtagcacaataaggagctaagattgagcatgatgcttaatgaggttaagtatctgcttccttgagtcctctatcagataaggggcactcgatatgatcctaagctttttgatttggtaccatctgctaacaaaagcaaaagcaaaaacatcaccttttatgaaactgaatcgctgttgaaccttaaacatcaattgatagacaaagagtttgtcaaaagatcttcagaaccatcccatttgatgcacactatgatcagaaacaacacatgcatatatacttcagactgaagatactatctactttagggaaactcatattcatcaacactctaatgcttcaacaggttttttaaacctgaaagtaaaatagcctcaccattgcctaacaaaaagaacagttttataagtttcacaattctaacaagtcctagtgaaacatacgtaatctatttcaggagcgtggacattaacgcacatgatatttgaacaattcttcatttgtgttattgtagcttgttttaacagccacgaatcatgtctgaattgatttaagaaagagctaggtacctgaattcacacgcgcagacacacacacacacaatgtatgtaaatgattgttcacaagagcagacaaaaacctcaaagtctaactgggaagtttagaccgcttgatctaataccaaggatagaaaagcacaattctatcaggttagctaaagattctgcaaagcaggattagaaaaaagtatagcattctagaaatcaaacaatagaggctctgagaatggttaagaagaagagcatacctcggaagcctcagagacgagtttctcatttgacttcaggcaatgggtctaaggtttcaagacttggtagacgaaagggagtgtttacaggaccagaagctgaaacagccatagatagaagatggaagcaacgagaacaaagagactctctgtgtagaacaagacgccgacgacgtcaaaattagaaaaccaccatcagaataccaacaaagaatcttattttcattcagcttcctcaaaaatcgttattcaaaggaaaaaagaaaaccttttccaatttttcacatcattgagtttactcatctaactttgtttgagtgtttgcaaaatgaaaatactatttccacctaataaagttaaaaagcctactactctacataacacaacgtagccacaagtccaagtttggacactgtttatagaacttggagaatcatgtccgttggctaccaaaaatggctaagagtttgacatttagtccttgtggaagactggtaactccctcaagtgccgacattaggagcaccagttgacaatggtgctccatacgagtacctccactgaccacaagcctcacatttctctaacttcacctcattttcaagcgtgcagaatttgcaagaccagactttgtgcttcatctccctttcctttggctttgcggcagtgcatagctcacatattggagccaatgactggtaggagaaaacaagaccgataatgaaaaaacagtatagagacaacaagaagcttcaagtttatacactcttaaggaagacttaccgggttcaataaggtgcattctgcacactcccacattgtggattcttctctgctttggtttgcattgtaactcgtcgatggcaaaggaatcgatgacttcatgacaccagcgttcggtacatctttggcacaagaaggaccctgatcacctgggctgcgatttcttttagtacatcttatttcaaaagattcttcagtcaaatcaatgacatctgatccctgttgatgactggaagatggaggacaagaatgggcattggaccagctattacatcgttttactgactttccattcacgctcgtacaagtttccctgatggaaacaggttccttatatgtgtcactatcattctcttcatcttctaaagcatctgtggattgggaaccacaccaaatatcatcaagtaaacgcctttctgcagccattgcagcagcctgaattggactaagatctgacataatgctgctatcaccaccaagacgttgaggtcctgaaggtaaaagagttcccgcacgcactcttttttctgctgctgtagctgcagttgctctgagaaatgatagagaaggctgacgagaaagtccacccaaacgcttaccaggcatatcaaatccctgtcccgtccctgtaataccctttgacatcaactcctcgcattcctagatgtaatggaattagtttaacactgtttccccagagaaatgaagcattggtaatgcaactagaaaagtagccaaattttcaaatcatttttcttcaatagccaacagactgttatcccctagataagaaacatttttgactattgatgcatctcaaataagccatggtggtagaggaactctaaactttactagctcttaagctcaaaatgtatgttaatttcttaaacatcagcttcaatgatggagtggtcaaataagaatcgagatacctttcgaagttcatcccaaagcttatagaaacttgcgttatgaggaccatgagcgttgtggcaaagctcgtggagcatggtgtcgagaatttcatgatacgataagaaatctaaatcatggtttaccctcctaagcctcaatttcacttgcacgcctctatttacattcacccccaaaagccttggatttgttgggctgcaatttcgaaatcgaaaacaaacatcatgaacaatggaaacatcatgaaccctaaaagtcaatactttcaatcattcttccacaaccacttatcgattcaacaatactttcaatcattcttccacagccactaatcgattcaaatctttaataaatagacgatttgacaaaaaccctttaaattaccagaattcagagagaagcttgacgcgccattttcgtctagtcataatcggctgaacctgattagctactttctccagaatcttcctcgcttcatcttctctaggtttcctcttcaaagcctttatttcccagaccttgttcaaatcttccaaattcgccgaactcatcacaatttcacagatgcccaccttcaaatatctcaaaattcgattcaaaaacccaaacaattctgaccttcccgatcttcgatgcaacaaaaaagggattttgaaatgtgaagcataatttggtctaccagagagtggcgggacaaacgcaccattattcatgtaagccaataacaacacctacacgcccactataagcccacttcaagcccaatccacaggcccatctatattaagtaccgcttagataaaccgtgcttgtccaaatcgaacaagaaagaaacctctcttattggtgtgttatctttgatgctacaaaagtacaaagtacattacaaaacgaggattgctacatgctataaacatacaaaaatcaacaagctttctttgcaaaccagaaaaatctaatcagtattttgggacaattgtagtgtttttcaagtgtcccatatcataacaatggcaatgacaacaactccaaacaacacagccaaaaacttataacgaggctcatcaacatgaactttcttgtttggtcgatacccttttgccaacaaatggttcacagatacatacacaaataccccacacgccaagctcatcgacaatgcgaatatccaatccgcgatggacccttgagtcgttgcatcgatgactatcccgatggcaacaccaattgggctcgagatggcgaatgcgaaagaataagtgattgaggagaataaaggacggtcagggatcatacggagaagagctatccccattgcaatcgctgcaaatatcttatggagtgttattgtccagagagctctccaagcatctgatttagtctctgaaataccaatagctatgccttcgaagacagagtgaaaacagagagctacgatcaatagaatgctatctccaatcgaagtttcagttgttgctgacctctgattcgatttgtcttctcctgaaacgaaataaagcacaaaactttcaacacaacataattctaattcttgattgagattcacaagttcgaaacttttggtaccttgaagctccaaatcgttttgggtctttgagtagatatgagcgatgacagaatcagcaagcatggtcaacataaaaccagcacaagccaacatataagcaaatgggtaagccggagatggctccgactctccttccgccgtcaacaaaccacgaaacgtctcatcagcgtccgacaagaaatgcatcaaggcggttgcaagaaacacgcctccggcgaattgtgtaccaagaaccaaaaacccttggctccatttcaagaaataaggagatacaccgcttatgaacgtgaggacaaagatgatgacaagacatgcgatcttgacggagattaaggatttggatttgagatcggaactcttaacgtgcgaagcctcatcgtcgtcgtggtctcctccggttccatgggagagacaagggacgaccaagacaagaaagaggaagaagaagacaagagaacgagacatttgaatgttcagtgggtttgtgtgtctgaaattcgaagttaagcgatatgtcgtgtaatatataagtggtgtttaagagtcgtactttaaagtcatggagttttgttttgtactacaataaatttatggtttttggttggttgattacgacacattgaaaaggattacgggtgaaggagctttgtaagtggttgttagacttggaccctctttatgaattcaaatttaggaaaaagtacaattatttggttcagattaacaagaaaaatctgtaattgatttacctaattgtaaacctgatattgcaccttaagacacgcattgaaacagacagataaatattaagcgtactagaaaaggtaatttactcttttttttagcaatacatacaaattgacgtttcaaccaataatttctcaaagttcataatcataaatcatttgtcaaaccaagtaaaaataaatcagagaaaaaaaacggtatttgttagtcaacgaaaaatgaaccttccatatgataatttctttttcgttctcatagaaattttctatgtaaagcagagagaaagacgaggaaaattgggtaacataaaaactctttgatgacaaagacagtattttaattcggattttacctaataaatccatagcgaagaacggtagctcatgttcctattttatggtgtgcaccatcaatgatgatataattgtctctcgctctatacataaatcttagatcctttaacgcctccagaatcgaccttgtcccagttgtccttgctttcgcctgcatagagatatgacactcttagtgggacactaccaacagattttgcattgatacgatagggtaaaaaaaaagctctgatcgactcacttttgatactctatggacctgtcaatgaactctttggcaatatcttttctctcaaaagaggccagaaccggtctgatgtctgctggactgttacgtgcaacatctgcataacccaaacaggaagatcaaccaaacaaaattgatacaggcagttcacggactggaacagaacttatccctcagttcaccaatacttacattcaaggaagggtatcaggtcaactagggctgtgtcatcagcttctagtttgtaaggcttgattggcacgctattttctggctgaagggttgattcaaaggcatttgcgctaacaaacagaatcttcttcggatctctgttcagctttgacagatcctgcagcaggaattttaatagttagttgagaaacagttactcgggcaagtcagaaagtatgctttgacaagataagctagctgcttacgtaccctatagtgctttccattttcatatttagtagcgcctcttgctagcttataacgtatgtagccatttgggtctaatttctcacagaccgggagtacatactacaagtaatgaaacaagcgttagtagtcgcattactatgatattacaagcaaaaaaggagaaaaaagaaaaaccaattgggactttaccatctccatctggtcagaatacacgacaatctcatagaatttcccaagatgctccaagaatgcatcgacacctggtcttttgaatgtcctccaccctctttcccgctagacatttttgtaaatgaaaaggcaggaaaagttaaatacagcactacttaagaaaacaaagtagttcaccagaactgctttgtttcataacatagatactctgagtcacatattcacatctatgatgcaagtattttgatgatcagtaaataaatgaaatgttaccttccagtcagtgtaaagcagtgtctcatttaaatcaagaactagagtgaagacatgctgttctgcggggtgcagatccggaagaagcttttccgagagaggttccgtgaagccctataaggaaccagacaaaaaataagaattctagaagaaaaaagaagatgcaagaaaaagaaaagttgtgtctcggtgaaaggacgtactttcacttgttcctccacaatttccctaagctctaaatacttatcaatggctctagcagaacctgatcaaaattcaagcaaaccaactcatgctatgcttaattaaagacatactattagttatgatgacagaggcgcaagaactatacctgtcattgcagcagagtacaacttagtctgatatttctgcagaaagatgagtataaagggtattaattcagagaagcttataaacaataccttgaagcagagaaacatggcagcacgcatttgaaagccagagactaaagaaagtcaactaatacagaagcaagttatgatcaacattaatttgacagcgactcaaggctaccaagcttactcacatcaatcacatcaatgccagaagatttaataactggtgtcttcgtagctgattctcggaacgccttagtcttttcattcacttcatctatcgtgtaagctgcataacgaaacaaacaagtataatcagaactaaaaagagtcaacataacgaagaaagacacagttctaccaagtgaagaacactgaattcaaaagactgatatgtgaaaatgtaatgcaatgccacgattaagcaaaccataacacatttttactcgcatttcacagcaaaaacaactttgtactagaaatctacgagagggaaaaaagataattcatgaatgcaagtacataccaaaacttgcgtaaccagtagcagcggtagcaccagtgagtgcccagaggagtgcgtaaccaagatacttaagacctttcctctcctttcccgtcgcagccgcggcagcagcttccacttgaggaggaggaggaggtggcggctgatttggcggtggaaaatcagaaaacatcgactgggtagaggtgactcccgaatacctagatgtagaattcgtcgaagatgcttccgcagagaaacatctcagattacgagatctgagctttgctaatcttggcaacaggcgagatcgaagaacaatagacgccatttccgatttcggcgttttcttcaaactctgtgaatgatgaatgaatcgcagggttgaagtagggttttggaattgatcggagaaaaggaaaattaacagatggactgtttggaaacaggttttatgggctcgttttaactctcttatccactgtttggtagtcggtttatttctactccgatatttttctattttttttgctgttttttttacttgtttaccaagaagagaatctattttattttatttttgcatttcgggcttttaataactaattaatgaagttattttacactatttatttaccaaataaaatgaaaatatttttccaacaaaaataataaattcattcgtgtcaaaaagagaaaacaaataaccaaaatttattaaatttgtagggtttcttctgcctaaacctcgactacatgctgttttttgcaccagtgaaataagcgaaactacatagaaagaaacaagtcttacttccacagaggaaagtttagagaagtagaaaagccacaaagcaacaccagcaaatacatatagcttaagctgctcagacacaattcaacgagacacttagtgagagagtagcaaatgacttactcttcctgggacggcaaatttagcttcaactttaagaaatcattggtctttgcaatcttcacaatctcctcagcttcttctctcttagaccctttcaccaattcatcaactaactgctgcaacgttgtttgaccgacaagataccgcttactgaatgtctccttgaagagctcaatcgcagactcaaagtcacctgctttacacatagcaggaagcaataaagcaaaggtagctttatcaggacgataaccatgcttcacaatttctttgtaccacgcttcagcttcgtccatttttccttcgttgatagatcctctaatcatagcattgaaactgaaaacatcaggtttgagcccactagccttaagttctccaaagagatttactagctctttcgatttcgcctcattggctaatccaagcagcctagcattgtaagtcctgatgtctattgctacattcttctccaccattttagcccatatctcttcccctagctcaaactgtccctttagatacgaagacagtaaaagtgtgttgaatgtaactatatcaggttttagtcccttgttctcaatctcatcaagcaatgcaacagcttcaggtaaagaatccttctcacacaatgccttaatcaaagtattgtaagatacaatatctggtttgattgataactttccaggtaactcattgaaaagttcttcaaccacatcgaatttcttggaaagtctatatgcactaagcaaggcattgaaggacaacactgacctcttgcagtctctgtttggcatttcttcgaacaccttctgtgcattttcaaacatgccggcttttccatacagagaaatgatcctcgccgcgaatccctcttttgacatgtcgcggtacttcttctgctcctccaaaatctcttcgacatagtgtaatctctttgcggctacgagacggcgcacggttctatcgtacacggctatgttggtccggaaccgctccgactcacatgccttcttgaatttctccacgatccgtttggggtttcgttcgccattcacgagactggttagtgacttttgaggaggcgagattgcggcagtgactgcggtgggttcggagactacggtggcggcggaggaaaaacggcggatcgggcaagtgttgaaggtgccacggagaacgcgagatagagacgacatcgttttgggagtgagagcaaagggtttcagccttcaggagacgagtttaagaacaaatcaaatgaaggacgcatctgataatttaaaaaatgttagtgccttatttttaactaaaggaaatattgggggctagaataacaaataatagaaatagtgttgttttgccgacgacctaattttacttcaccggtttgattacgggagaaggcgagcttgagcttcaatggcgcctgttaatatgactggcgctgttgttgcagcagcggcgttgttgatgcttacttcttacagcttctttttccgtctctccgagaagaagaagaggaaggagaagttgactatgagaaacgggcttgttgatgccattggcaatactcctctgattcgtatcaatagtctctctgaggctactggatgtgaggtttttctcgatgttcttttgctattttctgtttggtctgacgaactgatagtgtgatttatgagttaaagatgtaattttcattctacttgtttcgtctggtgatcagattcttgggaaatgcgagtttttgaatccaggaggtagtgttaaagatagagttgctgtcaagatcattcaagaggtacactatgattagcattgtaaaggtttcaacttttaaaagttttttgatcatcataaacctctcttaacaatgtcagtgattgaatcatcagcttggctatttatattagtggtttttgaaatcgagaagcaagtccattatgttttttttgtttctctgtttaggctttggaatctggtaagctattccctggaggaattgtaactgagggtagtgcaggaagtactgccattagccttgctacagttgctccggcttatgggtgtaaatgtcatgttgttatacctgatgatgctgctattgaaaaggttatatcttttaaataccttgatgatgattcaaattcccttgtatgcattattgtacatacactcaaatttgtatcgtgttggacttattttagtctcaaataattgaagcccttggagcttctgttgagagagtgaggccagtgtcaataactcacaaggatcactatgtcaacattgcgaggcgacgggctgacgaagcaaacgagttagcatcaaagagaagactagggagcgaaacaaatggcatacaccaggagaaaactaatggttgcacggttgaggaagtgaaagagccttccttattctcagattcagttaccggtggcttctttgcagatcaatttgaaaacttggcaaattatagggctcattatgaaggtactggccctgaaatctggcaccagactcagggtaatattgacgcctttgttgctgctgcgggtacaggcgggactttagctggtgtttcaaggtttcttcaggtataattactcagggcttatactaatcaaagatgtaagaatgagtaattcgtggatgttataagcaaaagaaaaactcataacttgttggtgcatttatacaggataagaatgaaagagttaaatgttttctgattgatcctcctggatctggtctgtacaataaagtaacacggggagtgatgtacacaagagaagaagctgaagggcgtcggctaaagaacccatttgatacaataacagaagggatcggaatcaacaggcttactaaaaacttcctgatggcaaaacttgacggtggttttcgtgggactgataaagaagcggttgagatgtcgaggtagtgctcattcctttatatgttttgacataactgttttagagagtactgataaagatttcgtaaaagttggatcttgatatctttctcactatattatgttcccaggtttcttctgaagaatgatgggctctttgttggaagctcctcggctatgaactgtgttggggcagtaagggtggctcagacccttggtcctggtcacacaattgtcaccattctttgtgatagcggaatgagacatctaagcaagtttcacgaccctaagtacttgaatttatacgggttaagtccaaccgctatcggattagagttcctcggcataaagtgaaactacaaatctgttacaatatcttcagatcaatcaagcctgggtggtctgcagtggttttgttttgattatgttttagactaagggtgatatattcttggtaagacttcagattagaagacaacaactatgtctagagtcaacggaagaatgtcaatgcaacaatgcatgtgtctgacctctaaaactcccataactgcatcttacacctgtcttctcaattgtttacaagtcccgacctaatggggccccttacaagattatgggaaacatgtattcagattttgtctttgtacctattagattttgtctatgttcaatgcattagactggaaaactcaaaagtgttgataaacatagatttccatgtttttccataaataagtcggttgtgtaaggtctcatgatcccaataatggcaagaaatggagtcaataagacactattgatcttatcactttctttcttgaagaatctatgcatgatcccaatcttgtttctctctaacgttctccacacgattgccgtgtgtaacaaggaatccaaatcttatcgtcatgatcaggaggagcttaaaagtctggaaacggaaaccaacctacatgaagaagaagagggtttgatagagatctgtctggtgagagaagcaaagttggagagtgtgaagaaacgttggctgagtagagaagattattacgaggagatgatgatcatggagatttgggaagaacttgaagcagaagataacttgattgagattgacatctccaacagatcaattgtttgactttattagtactgatagttctagatgttttatccgcacattatttcatatgtttcattatcaaaattttggtcatcgcaaaacatattatcttgtattatattattgcgtttcacgttgacaaaaaaaatgttagatggcatagttaattactcgtagcagtttcgacttcaactctattggccaaaaacgcatcaatcaaatccgatgctttgtgagtcacagtgactgtgttctcctctcttgtctcagtctcgcattgtgcgttgggtcttgttcttgatttgacaccaactgtttcagcttggtcagagaacatgacctctgagacgtgtgagctgcaaatctctttgtatgcttcgtagtctgcagctccagtgtttcctccttcaaggatcttggataaagggtgaagaactgagactggaccgtcgcttgactccagctgccgcttgagtgctaagaagtcccagacaagttctgagttcttaaacaggacaaaaaccgcagagtgtccacgtggtagacagaggtgacagaagcagagccaaaggctttgcatatgcattctttgatccctctcgccttaagttttcgtgggaagttccagatgaggacaatgttctcgtatttgaactttgagactcgccagttatctgcattactatggcctgttcgaaggtcgatgatatcacctcttgtccagctgagataaagacggttgatgtacttttcaagtttctcgttctgggcaaagtcatctaactgcgaatgctgtttgaagtcaaaaccgagatgattgcatgcctgcgcaaagatgcaacctgtcatgaaagcatcataaccggcttcgtgttttcctcctgcattccagttagaacacctgaaatagagaaaacagccgttaaaagcagtttaaatcagaaaacagtcaagtgtcatgccaaaaatagggaggaacaaacctaacgttgtctatttcaacgtcaatattgacacgctgctgaagaaacgagtcagagcttcttgaagaaaactcgatttgcggacataacgaggaaaacgcggaagacagtgatgtactggactttttcatccgctgatgcaacattggattcacgtttaagagtattttggtgtcaacaatataaggaaagtgactgttaatggaggccacgaatttctcagctgttgaaggaagaggacccacaaatttgctgtatacatgtgcaatatctgtatcagatgaacaagatgttagagttaggcatctttaagttacaaaaccttcacaaacgtatagagaagcaacttgctagtttaccgaggaaacaattgtgaccaacgatcagctttttctctgaagcaagcagatcaatcacttgacggaacccgattgcagattgtatttttctttctgccaatctcttgcgttcgtcctttgcctccttctgtgaaaagagacagtaatggtatctaaatcaaagaaggcctttaagtagaagaatcagttactacactatagctacatcatctctcgagcctgaactttgctatcatcaaataattcacttcaacactctcagttaaaatccaaaggacatgtaatgtttagtaacaaatctttccagcaacgtaaatgctaccttaccatgaggttttccttgtcggaatctgaatcagtatacacaacaatgtctcgtgaagaagaacttttatcatttgaatgtatgtacacaagatctccaaaatgctttcttaaaacctacaaagccaaatccaaaaccaactgattaaaaacaaatagcctgaagaaaagatgtaaaacagagagcattaccgagttaagaactctgagctgatgagaagtgaaacccttcagactgagagcaggacgcatatggtgaaacacagtttccatactctggtttgaaccatttgaaatcctcggaaactcagaggacgcattcccaccatgtaacaggccagaccgccattcattcagcaatttctccatccttgcagcgaaaagaacatctgccaatcgcaccaactttaactcttcagtttcacccgatgaatcaattccgtcctcgccgtgtagcattttcaaacgcttacttgcctcttcctcttctcgtctggacaaataagatattcctgggattatttaaatatatgtgaattcctcacattctggaaacaaacttgaaattgctacactttttctctctttagaatcaaaaatgaaaaggagaaaggaagcaccttcatgtatgcaggtgttgaaatcaaactgatacttggcaagaaaatccattgatgtagtctgacagagaaattcatgagctggtggatcaaatgtgagttcttgacgaggaaatacaaagaaattgtgcctgcccccaaaacgagacccgtttagtcaaagctacacaattgaagctaaagagaaagagaaagagagactaacgggtaggacacgaatgactgagtacgagaatcccaacgaaagggacagacaccaaactgaacgacggcgaatttctcggcggagtctttgactttgaggtatctgacgtcgtagcggtcgaactctaaggagtctcgccacggagcgcttgtcacgccagtcatctcaaggtcaatcgccacgaaatctgcagcctttacgagtgagcgtagatcattcagcgtcgtctcgaagttcgaccttgtcacatgcttcaacggaaaagccgccgtcgctgaagctgccgttgaagtagtaactgtctccgccgcagaggagctgaagctgcagacaagagacctcaaaggccatcgcttgtgccggcgcatttttgaacggagagagagagagagaatcaaacgaccatttttaggttttgctctcggtggaaggaaagagggaaagatgatgattccgaggaaacggtaccgttttgtgaatttcagtctttcgaaatatacacttgcacagcctgccgtttctaggttaataaatactgcaaacatttgtcttaacatgacttgaaacagcgtgatgtattttattttcccgatgaacaacaacaggaaccaaattctcgccactgctctctcacacaatggctattgcagaagaagttactgtctttgctgagactagcttgggaactcgaatcgtcatggcggttcctctggatatcacagcagcagatttcaagagtaagctcgataccaccctctaaagaaattcccttttggtcttctctttcgaatgttgtttcccgtagcctactgttcttattaagtttttggtcttcctcggtttctcaatttcgaaacttagcttataggtgaactgataggattctctaattgaatctttctggatgtataatgtgttggtctgtgaggaaactgatttgcatgcgcattttgggatgaaaattttcaaggttgtgaattcctatggtgagcactaaaagaaatgttcttttcacattgccttctgcatcattggtgtttgttttcttttgaagttctgtctattacacacttaaggactggcagggcacagtgcattgctcatttcctttgaatgtgaatcattgcttatatgttacttcatgacatcttgagatgagattggacatgtattgtttttctttttcttccttttgccttaaatttgaaggttaatgatctttcgtttgtgttacactttttatttaagaattcagagcatgtatcaatgcaaaatgctttctttttttttgcaggaaaactcgagaagacgcatgcaagttgcttatcgagcgtaggggagatagaagttcatggtctgatggtaatgaaaatgagctagcaattttattttctttctactcctgtgcttttgattttgttaacctcaaaccattgcagcaaactcattctaacttctccttctctcttagtataggttaaacgaaagtctcgcttttaccaccttgtggagtctgtgcctataaggtacatcttcctggataaccaaaagccttggtttatccatgcagaagctagagttgtaagcagatcacaagagtcaagcgtatctaacagtattgataaaacccacattagacattgtcacggttctgataactccatcgaaagagtcactgcattgatccaaggtaaagacaagaagataaagaaatctcgggccaaatctgattccagaaatgttgcatctggacaagaaacttgccttgacaagagggaatatcttggtccttccacatctgaacctgaaaccataaagtctttgccgtcaatagcaagagttgctgagatgaaaaactctgaatgtttcaaaagcttcacaccaaaaccgccggagaggaaacctgtagactctgaaagcgaatcgataggcaagagaataactgtggctgcaaacaacatcagaatgcaaggaaagactcataattcatcgtcactatcatcatctattttcagaagtaattcttgcagaaacagatctttagatggtaagataatcacctctcttgcaaaatttatggtctttgaggtacctgaaaatgaggattgagtctttaagcaagctctcctataatgcctcaatgcacaagaagtagcattgtgtagatgtgcaaatgatcatgattctttttgacaaatacgtagtgaatgtaagatatatcatatatattagtaagttttgtatcactctgtttcataaaaactataatcatgagaaagaaagaaaaaagcactaagaagtgaagaaaagaatcacagaatttgtctttagcttttgcttctactctttttctcaaggattctcttttatactttctaatctaactcgtttaagaattaataaagatgctttatataataaaacaagacataactttggctatatctaagatcaaacaaaaatatttgtcatattgattttataataattttagttagtcatgttaatcatctattgtgtatgaactactctaaaattgataaaaaaaatattacaagatatatgttaagatttaatatgtattttaaaaaatattcaatatattttgcctcgaatattaccttagtcaattaattaataaaattgcaaaattgcaaaagaaataaaataaatgttttagttaaaccggcactggaaaaaaaaaccgggcattggaacaaaatatatcgtcatgtataaaacacaaagcgccttagcttgttagaaatcttctccacttctctttctctctcacaccgtctttctctctccctatcaaatcccttctcttctaatacgcgatcctcttttaaaccctagtttcggatcgctcttacacttggcgattatctccaggatcgtcaattcttctctccttctctttttcttcttctcgttcgtcttcctcaacgatcgccatcaatccaaagtattggaccagatcacccctcgttgatatttgtgattcgatatccacaagtgattactgatcaattctctatcgtctcgaggatttgatcactgcttaatcctttagtgtttgctttaggatatgccctgtctgactgtctctaaatcatcatgaagcttagaaggagaagagcttcggaagtggttagtgttactaaaccacgtaattaaaccttttaatcaattgtataactatctgtctctttgcattactctttttaatatctgctacttgttattcatttatcatttggaattcagttttttaatctcactcaaaagatttatctttttgtttcgtttgtctgtttctgatgtcttggtgcatggttattgttgtgatcattgattggtataatggggtttgagttcttaagccaaaccttggagggtttttttttaatctcactcaaaaaaatttatctttagttccgtttgcctgtttctgatgttttggtgtatggttattgagatgatctttgattggtataatggggttttatttagttcttaagccaaacgttggaggctttggtaaattgttttatttgatgttgtatatgtattggctgtgttaacccttttttatttatttgtaaccagccttcgaaaatcaaatcgttcatcaatagtgttacttctgttccactcgagctaatacatgaaccccttgcatgttttcgctgggaattcgacaaggtacgttttgaaatccttgtttgtgaacctgttttccctttaattctgtcatactcttgttttgatggttggcggttttgttttttatatagggtgacttccatcattgggtggacctcttcaattattttgacacatttttcgagaagcacgtccaagtaaggaaggatttgcatattgaggaaaactttgaggagtctgatccacctttccctaaggatgctgttctgcaagttctccgagttatcagagttgttttagagaattgcacgaacaaacatttttacagttcttatgaggtaaataatctgtgtgccagaatccccctaactatcattcatatttgcactgtttcttttttattggtgccacaatatagtgtcgttactgatttttatcaactcttattccatgttgatttctggttgttctgctagatatgttgctttatatactgagatgtctacctgcatgattctcacacactttttttcttcataactgcagcagcatctttctctcctacttgcatctactgatgcagatgtcgttgaagcgtgtctgcagacgttggctgcctttttgaaaaggcaaattggaaaatactcaataagagatgcttccctgaattcaaaactattttcccttgcacaaggctggggggggaaagaggaaggccttggcttgacgtcatgtgccgcagaaaacagttgtgaccaggtttctctccagctaggtcgtactcttcattttgaattttatccttctgatgaatcaccaagtgagcttcctggcggtttacaagttattcatgtacctgatgtcagcatatgcgcagagtctgacctggaacttctgaacaaattagtcattgatcacaatgttcctcccagtttaagatttgcgttgctgaccagaatgagatttgcaagggcgttctcctctttggcaacccggcagcagtttacatgcattcgcttatatgctttcgttgttttggttcaagcaagtggtgacactgagaatgttgtttctttctttaatggcgaaccggaatttgtaaatgagttagttacgctggtaagctatgaggatactgttccagagaaaataaggatactatgcttgctatccttggttgcactatcgcaggatcgaactcggcagccgactgttttaactgcagttacctctggcgggcatcgtggtttgctatctggcttaatgcagaaagccattgattctgttgtttgtattacttccaagtggtctcttgcttttgcggaagccttgttatcccttgtgacagtcctggtttcatcatcgtctggatgttcagccatgcgagaagctggtcttatcccgaccctagtgcctctcatcaaagatacagatccccagcacttgcatttggtcagtgccgctgtgcatatattagaagccttcatggattacagcaatccagctgctgctttgttcagagatttgggtggcttggatgatactatctttcggttgaaactggaagtctctcgtactgaagacgatgtgaaagaaaaaaattgcagttctgatagcaatgggcctgatactgaacaacttccctattcggaagcattgatttcgtatcacaggagattgttgttaaaagcgttgttacgtgcaatatcccttggaacttatgctcctggtaacactaacctctatggttccgaggagagcttgttgcctgaatgcttatgcattatcttccgaagagcaaaagatttcgggggtggagtattctcgcttgctgccactgtcatgagtgatctcattcataaagatcccacttgtttcaatgctttagattcagctggtttaacttctacctttcttgatgctatatctgatgaggtcatctgctctgcagaagccataacatgcataccgcagtgtctggatgctctgtgtctcaacaatagcggtcttcaagctgtgaaggaccgaaatgccttgaggtgttttgtgaaaatatttacttctccctcttatctgagggctcttacaggtgatacacctggttctttgtcaagtgggcttgatgaactcttgagacatcaatcttcgttgcgcacttatggagttgatatgttcattgaaatcctcaattccatgttgattattggatctgggatggaggccaccacctctaagtcagctgatgtgcctactagtgctgcacctgttcctatggaaattgacgttgatgagaagagcttggcagtttcggatgaggcggaaccatcttctgacacttctccagcaaacattgagctgtttcttccagattgtgtgtgtaatgttgctcgtctctttgaaacagttcttcagaatgcggaagtatgttccctgtttgttgagaagaaaggaattgatgcagttttacagctattctctttacctcttatgcctctatcaacctctcttggtcaaagtttttctgtcgcttttaagaacttctcccctcagcattcagctggtctagcccggatagtgtgctcctacttaagagaacatctgaagaagacaaaaatccttttggtttccattgaaggtactcagcttcttaaattagagtctgcaatccagacgaagattttgagatctctttcctgcctagaaggcatgttgtccctctccaactttttgttgaaaggatcagcttcagttatctcagaattgagtgctgctgacgctgatgtactgaaagaacttggtataacatacaagcaaacgatttggcagatggccttgtgtaatgatactaaggaagatgaaaaaaagagtgttgatcgaggatctgataattcagtttcagcttcatccagtactgctgaaagagagagtgatgaggattcaagcaatgctttagcagttagatacacaaaccctgtttccattaggagcagtagttctcagtctatttggggtggggatcgcgaatttctgtctattgtgcgttctggcgaaggtattcatggtcgtacgcgacatgcaatagcccgaatgaggggtgggagaactcgtcggcacctggagtcttttaattttgattctgaaattccagctgatctaccagtaacgtcatcttcccatgagctgaaaaagaaaagcactgaagttctcattgccgaaattttaaacaagttgaattgtacactacgtttttttttcacagcccttgtgaaaggatttacctctgctaatcgtcgcaggattgatggggcatcattgagttcagcatctaagacgcttggtactgcgttagctaaagtatttcttgaagctcttaacttcgacgggtatggtgctgctgctgggcatgagaaatctctgtcagtgaagtgccggtaccttggaaaagtggtagatgatatcactttcctttcatttgatactcgaaggagggtctgttttacagctatggtgaatagtttttatgtccatggaacgtttaaggaacttctcaccacatttgaagctacaagtcagttgctttggacagtgccgttttctattcctgcatctagtactgagaatgagaagccaggtgagagaaatatatggtctcacagtaagtggctggtagatactctgcaaaactattgccgagcgctggactattttgttaactcaacgtatcttttatctccaacctctcaaacgcagcttcttgtgcagccagcctcagttggtttgtcgattggactttttcctgtaccaagggaacctgagacatttgtgcgaaatctgcagtctcaggttctggatgtcatacttcctatatggaaccaccctatgtttccagattgcaatcctaattttgttgcttcagttacctcccttgttacacatatatactctggtgttgtggatgcaagggaaaatcgaagtggtgttacccggggtataaaccaaagagccttgcctctacagcttgacgaatccattgttggtatgattgttgaaatgggtttttcaaggtcaagggctgaaatcgcgttacgaagagtgggaacaaacagtgttgaaatggctatggactggttgtttaccaatcctgagcagccggtgcaggaagatgacgaattggctcaagcacttgcactatctcttggaaattcatctgaaactccaaaacttgaggatacagaaaagccagtagatgttccgcaggaagaagcagagccaaaagaaccacctgttgatgaagtcattgctgcatcggtaaagttatttcagagtgatgattctatggctttcccgttaatggatttgtttgtgacactatgtaaccgaaacaaaggggaagatcggccaaaaatcgtgtcgtatcttattcagcaactgaagcttgtacaacttgatttctccaaggatactggtgctttgactatgataccacacattttagcattagtactctcagaagatgataacacacgagaaattgctgcacaggatggtattgtgaccgtagcaattggtatcttgacggatttcaaccttaagagtgaatctgaaactgagattctggctccaaaatgcattagtgctttgcttcttgtattgagcatgatgctgcaggcacagacaaaactctcgtctgaatatgtggaaggaaatcaaggtggatctttagtgccgagtgattctccgcaagactcaacagcagctttaaaggatgcattatcttcagatgttgctaaaggggagtcaaaccaggctttggaattgatttttggaaaatctacaggctatctgaccatggaagagggtcataaagctttactaatcgcctgtggcctcataaagcagcatgttccagctatgatcatgcaagctgtgcttcagttatgtgcccgtctaacgaaatcacatgctttagctatccagtttctggaaaatggaggcttatcttcactttttaatcttccgaaaaaatgttgtttccctgggtatgatactgttgcatctgttatagtacggcatcttgttgaagatcctcaaactctccaaattgctatggaaacagaaatacgacagaccttgagtgggaagagacatatcggtagggtgttacctcggacattcctgacaacaatggcacctgtaatttctagagatccagttgtttttatgaaagctgtggcttcaacttgtcaattggagtcatcaggagggagggactttgtgatactgtcaaaggaaaaagaaaagccaaaagtttctggcagtgaacacggattctctttgaatgaaccccttggaatatctgaaaataagcttcatgatgtgtcaggaaaatgttcaaaaagccacagaagagtccctgctaacttcatccaagttattgatcagcttattgaccttgtcttgagttttcctagggtgaagaggcaggaagatggagaaaccaatttaatttcgatggaggtcgatgagccgactactaaagtgaagggtaaatcaaaagttggtgagccggagaaagcaagctcctcaagagttggtgagccggagaaagcagaaatacctgaaaaatctgaagaactggccagggtaacatttattttgaagttgttgagtgatattgttctcatgtactcacatggtaccagtgtcatactgagacgggatacagaaatatctcaacttcgaggatccaatctacctgatgattcacctggaaatggagggttaatttaccatgtcattcatcgattgcttcctatatctctcgaaaagtttgttggacctgaagaatggaaggagaaactgtctgaaaaggcttcctggtttcttgttgttttgtgcagtcgttctaatgaagggcgtaaaagaataatcaatgagctttcgagggttttatccgtatttgcttccttgggaaggagttctagtaaaagcgttctattacctgataaaagagttcttgcttttgctaacctggtttactcgatcttgacgaagaattcatcttcatcttcaagcaatttccctggttgtggctgttcacctgacgttgcaaagagcatgatggacgggggaactatccagtgtttgaccagcatccttcacgtgattgatcttgaccaccctgatgctccaaagcttgtcactcttattctcaagtctctcgagacactgacaagggctgcaaatgctgccgagcagctaaaatcagaagtaccaaacgagaaaaaaaacagagactctgatgagagacatgatagtcatggaaattcaactgagactgaagctgatgagctgaatcaaaataatagcagtctacagcaagtaacagatgcagcaggtaatggacaggagcaggctcaagtttcctctcaaagcgcaggtgaaaggggttcgagtcaaacccaggctatgcctcaggatatgaggatagaaggcgatgagacaatactgcctgaacctattcagatggatttcatgcgagaagagattgaaggtgatcaaatcgaaatgagttttcatgttgaaaatagagctgacgatgatgtagatgatgacatgggcgatgaaggggaggatgatgaaggagatgatgaagatgcagatttagtggaagatggagctggtgttatgtctcttgctggaactgatgtggaagaccctgaagatactggccttggagatgaatataatgatgacatggttgatgaagatgatgatgatttccacgagaatcgtgtaatagaggtgcggtggagggaagctcttgatgggctggatcacttccagattcttgggcgatctggtggtggaaatggttttattgatgatattacagctgagccgtttgaaggtgtgaatgttgacgatctgtttgctctgcggagacccttgggctttgagcgtagacgccaaacaggcagatcttctcttgatcgatctggctcagaggtacatggttttcagcacccgctcttctccaggccttcacaaactggcaatacagcgtcagtttcagcaagtgctggcagtatatccaggcattcagaagctggcagctacgacgtagcacagttttacatgtttgatacaccggttctaccatttgatcaagtaccagttgatcctttcagcgctcgtttagcaggtggtggggcacctcctcctttgactgattattctgttgtgggtatggattcatcaagaagaggggttggtgatagtcggtggactgatataggtcatcctcagccaagtagcctatcagcttcaattgcccagttgatagaagaacattttatttccaacttgcgtgcttctgctccagtaaatactgttgttgaaagggagactaataccacagaaatccaagagcagctgcacccggatgttcctccatctgttggaagtgaaactgttttgggtgatggtaacgaaggtggtcaacaaagtgaagaacgtgaactactaaataacaatgaaaatgttaataatccacctgatgtaatggctgaaagtttcgctcaaggtcaagctaatctagcttctcctgtcagccaagatacaggtgaaagtctgcagcagcttgaagttatgcagcctcttcctttgaacagtacaccaaatgagattgatagaatggaagttggggaaggtgatggtgcgcctattgatcaagtagaccacgaagctgtgcatcttatctccactgctcagggtcaacctgatacttccagtattcaaaatgtgtctgtaacagctatagctcctccagtagatgatcccgattctaattttcaaccaagtgttgatgttgatatgagtagtgatggtgcagagggaaatcaaagtgtacaaccttcacctttggacggtgacaacaatgagctttcgtccatggaagctacagaaaatgtgaggaatgatgaacaagttgaggaaggtagcttggatggtagggcacctgaagtgaatgccatcgatcctacatttttggaagcgctccctgaagatttgcgggcagaagtccttgcttctcagcaagctcagtccgtccagccaccaacttatgaaccacctccagtagacgacatagatcctgaatttttggctgcgcttcccccagatatccaaacagaagttcttgctcaacaaagggcgcaaaggatggtacagcagtcacaaggacaggcagttgatatggataatgcttcaattattgctactctacctgctgatttacgagaagaggtttgtatctctttatttgaattaggtaatttgaattgtcaaatgtttataacaatctgaaatatgctattttcaggttctcttaacttcttcagaagcagttttggcagctttgccttcccctttacttgcggaagcccagatgctcagagaccgagcaatgagtcactatcaagctcgtagtagtgtttttggaagtagtcacaggctgaataatcggaggaatggtttgggatacaataggctgacggggatggacaggggtgttggagtcactattggtcagagggctgtttcatcttctgcagatggcttgaaagtaaaagagattgaaggagaccctcttgtgaatgctgatgccttgaaatcactaatcaggctattacgacttgcacaggttagtggcattcctgttttaccctacccccttctaacaaataaacaaatcaatgattttggttcttatttatcaacgccgaattgactattttaattgaagtatcacaagcacttttttaggcttctaacaatgatgttattttaatgtatcagccattgggaaaaggccttctgcagaggcttctcttaaatctatgtgctcacagttttacaagggcaaacctggttcaacttttactggatatgattaggccggagatggaaacatcaccgagcgagttggcaataactaatccgcaaagactctatggctgtcaatcaaatgttgtttatggtcgatctcagctattgaatggtagtacttcttaccgaaagtctttgtctgttattctcgcaagcttccagagcactgactgactttctttgttcttaacacaggtcttcctcctttagtgttccgccgggtgcttgaggttttgacgtacttggctacaaatcattctgctgttgctgacatgttgttttactttgattcgtcacttctatcccagttgtcaagccgaaaaggtaaagagaaagttactcatgtgacagattcccgagatctggagatacctctggttgtcttcctaaaactgcttaatcggcctcagcttctgcagagtacatctcatctagggctggtatgtttagcatgattttcagaaagtaggcattttctcacagcaatgtcctgaaaatttctttggttattgtatctgtattgtttcaggtcatgggcttgctgcaagtagttgtctacacagcagcgtcccgaattgagggttggtctccgtcatcaggagtacctgagaaattagaaaacaaacctgtcggtgaagaagcttcaagtgaaacacgaaaagatgctgaatctgagctagtgggtgaagctgacctatctgttgcaagaaggaagaattgtgctgaaatatataacatattcttgcagttgccacagtctgacctctgcaatctttgcattcttcttggatatgaagggtaagagacgccttcttttctttctttctttgcgttcctgaacttagtctcttatatagttatatttatataggtagtagtctacacaacataggtcttttcttatccttggtctcaattatttccttgaattgctttagacgaactcacatgttttattaccgtaataggttatcggacaaaatttactcgttagcgggagaggtactgaaaaagttggctgccgtagatgttgctcatcgcaaatttttcaccaaagaactctcagaattggcaagtagtttgagttcctcaactgtccgtgagctggcaacactaagcagtaaacagaagatgagtcggagtacaggttccatggcaggtgcttcgattctccgtgttctgcaagtgcttagctcactaacttctcctattgatgagagcaatgtgggaaccgaaagagaaacagaacaggaggaacaaaacattatgcagagactaaatgtggcattagagcccttgtggcatgaacttagtcagtgtatcagcatgactgagttgcagctcgatcatactgcagctgcatcaaatataaaccccggagatcatgttctagggatctctcctacgtcctctctctctccaggaactcagaggctcctccctcttattgaggctttctttgttctctgtgagaagattcaaactccgtcaatgttacagcaggatacaaatgtgacagctggagaagtaaaggagtcctctgctcatggttcctcatctaaaaccagcgtagattctcagaaaaaaactgatggttctgttacattttcaaagtttgctgagaagcataggcgacttttgaattcatttattaggcaaaatccgagtttgctggagaagtccctttcaatgatgctgaaggcaccaaggctgattgattttgacaacaagaaagcgtacttcaggtcaagaataaggcaccaacatgatcaacatatttctgggccattgcgtattagtgtccgccgagcttatgtgttggaagattcatacaaccagttacgtatgcgctccccgcaggatctgaagggacgtctgaatgtgcagtttcaaggtgaggaaggtattgatgccggtggtctaaccagagaatggtatcagttattgtcaagagttatatttgacaaaggagcgttactcttcactaccgttggaaatgatgccaccttccaaccgaatcccaattctgtttaccaaactgaacatctatcatacttcaaatttgttggtcgcatggtaatatttcagaaccttctcaatgcactcacctgattgttggtttttggttctctctgatgtgtttgtgatgtcactgcaggtggcaaaggcgttgtttgatgggcagcttttggatgtttatttcacccgttccttctataaacacatactcggtgtgaaggtgacctatcatgacattgaggcggtggatcctgattactacaagaatttgaagtggctattagaggtttgaggacctagcctttattaatctttatctattacaaagctcaaaaatcgaagtcaggtcctgctttttgagactcatatttgtgcctttttctgttcatttagaatgacgtgagcgacatactcgacctcacatttagtatggacgcagatgaggaaaaacacattctttacgaaaagacagaggttcgcttgatgtgtttttgttttttgtttttttggtgctttatcccaaagtgccactgtattgaattgatcatattatctttgatgaaaaaggtgacggactacgagcttaaacctggaggacgaaacatacgggtaacagaagaaacaaaacatgaatatgttgaccttgtggccggccacatacttaccaatgctattcggcctcaaatcaacgctttcctcgaaggctttaatgaattaatacctcgtgagcttgtatcaattttcaatgataaagagcttgagctcctaatcagcgggttgcctgagattgattgtaagttggattctattgatcaatatctatgtgcttatccattaagttattataataacaatctttttatttgttttagttgatgatctaaaagccaataccgagtataccagctacacggcaggatcccctgttattcattggttctgggaggttgtcaaggctttcagcaaagaagatatggctagatttcttcaatttgtcactggaacatcaaaggtagaccaatattagcagcttctgtccaagtcacttgagattctctttctgatatatatgtacttgtttttttttgtctggttggtttgatctcgattttgatctccttcctctattccccttttgaaacgctagaaattcatagaaaagggaaactttcatatgttttacaagcggtgtttctgttttcaggttcctttggaaggcttcaaggcactgcaaggtatttctggccctcaaagattacaaatccacaaagcatatggagccccagagcggctgccatcagctcatacatggttagaaatcattacaaagctcttttttattttaaaattttagttgttggcgtaatttaacaaatcttgttctgttgcagttttaaccaactagacctccctgagtatcaatctaaggaacagcttcaggaacgcctgctacttgcaattcacgaagccagtgaaggttttgggtttgcttgaagaaagcttgtcgaaaccaacccccgtcaccttaagaatcagtgaaaacccatcaatccttcattcttttgactcctctgtacatgtaagctagctttcatacttgtacattctttaagattcaccataaattgcttagtttggaacaataaaagtctcatgatttctgttgtggcagatctcgaagattttcaggcaggataaggagaaagagcttttgattaagactgcagaatgaatagaaatcgcaagtggctatttttgtctgtccatattatgttagtattagtctatttattattagggtttctctctgtccccttaggattttgtatatcaaaaatcttttgaaatagttgcaaactctcaaatattagtagttgatatttgctatccattctagtaagcaaaataagataagaaaattacatattataactgctggtcattattttgattacttttttgactgttgttaatcaatcttacaaaaacgctaaacaggtacaggcagataaagctaaaacaactgatttaactgtaacgctcattggcatctttcctttgtcttgcctcaacaacatacctttatacagaggccagtttatgacaactagtactcctgttatcacaaattgcatccccattgttttcaaatctccaccgtctccggaaacaagtctcgcaaccgctgcggcgaagcagaagagattgagcataccgagtgttccgaggacgagaaacatgggagactccactccaaactccattacctcttccttgtatctctctgctgcttcttcttctgctacttttgctgtgatcacaaacgcagactcagaaactccaagtagcttcttaatcgtgtccataaatccgaaaagaaacgagcttgttcttctataaagccacatcctttgctcgttccaccatccacggaacgtccctccgcaccacaagaactcggctaggctatatgcggtagctgcaacagtgacgtatccaaacggaataaaccacgagctcgagacctgaattcaaaaccggactggtttcagattccaagtttatacaaaaaccaaaaaaaacagaggaaaggtatatatattacctttggaacagaagaatgcctttgagagacagagagaagtcaaaccgagtaaatgagcacaggtagtgaagatggagcccaaagacaatagcaacagtaaccaagtatcagtcctaaactgatctttccttttccataccaaaccggactatacttcgaaagcataatctgaaagtctccctctgaccatctcctctgctgcactagcatttgatgcaaattggtcggcgctaccccgagaaatgcttgcttttccgggttcaggtaggctgatttccatccgcgacactgaatcgtcaaaccagttattacatcctctaccgggcaaccatatttcacacccatctgccatggaaacaaacaaccaagaatttgaatgaaattgatagtgaacgttttaacttcattacaagaaacagtcataagtaagtgagtactaatcgctgccttacctcctttccccattgagtgttttcctcataagtgcagctcgcgagagccttaatcatctcaggctctaaattttcgtgaattctctcagattcttcttcttcttcttcctctccatactttcttccacagatcacatctcttctgtgaaagcatccagttccaatgtataacggaccaccatttccatccaatccaagaaattccaccttttttgttggttagttttcacattacaaaacataaaaaattagttaatagcagaatcaataattcacaaatccagaatctatcttgtgtttttgtgcggtccatctcttttattacttacatcaattcctactcgcatcatgcttccatacaaatcatttcttgtaacattgtcaaaacactgcggaaactgcacgaaagcaatctcttttccctctttctcatcgaggaggatgcagagcgcgtcgcgtgttgactttgagttgtttgcgtacatatcacagtccaagtttagtatgattttcccacaagtaattttcgaagaaaccctcagctgtaagagagtgaaacggtcacataaagataccatgttgccttgtggagcaagaaatttgttacttaccaatgcgttcattgctccagccttgaagttatgatgatgttgaggtctcttttctcttgataaatacaccaacgttggtattgctattgtattcccttctcttccatctaccaaaacctgacatttaatgaaaccaaaaaaaagaacacttagatttagttttatcgattgttgtaataacagaacataactaaaaagccattacgtacttgaagaatggttccatggtttcttcgagtagcgtcagcatcccactgtgaaaacccgtcaccgtacttcacccgcgcctcctccggtattcgtcccagtctcgccgccgtttcaatcctcgccgccatttctctatacagcttagccacctcctcagccgcagaatcaagacagtttgccttggaagacaagtaagcagcgggagatgttggctcaacgttgaacttcttgcagaagggaacccaagttttagcaaactcagctgcctccgtgagagcatagaacgtcagctcagaaccaccgtcatctgagagataaacggcgagtttctccggtgggtagtcaagagccgtcacagataagactgtgtttaccaccaacaacggcggctcaatcaccggatccgccgtgcaaacgaagacgtcgagcctcggaaggtcgcttccgtatctccgagagagtctatcggagaagggaaatcgccaaaccggattccaccgggaagattgtgtgactacccaatataaaccgaaccaaatctccacaataaacataacaaaccagattaatcgatctaaaacggtacggttatcaccaatctcaccaattctgtagaaccaaatcaaacagatacacacgaaaaccgaggctgagaaaaaccggtacgcaatcactctaccggttcttctcctagtctcaaaaagcggttcaccgtcggcttcatgaaccggtctaatccggtcgtctttgtttaccatgtttggttctctctctgcaacggtgccaagtgagaaggtgagagggataagagaagtggtctctcagacaagtggaaaggttaagccttttatacaagaagaaccgaatttagtggcggctataactctggacattgtcaagaacaagtgtggatctcgagacactctcttacgtcattggaactgtcagctactatgtttctactttctatttcagtcaaataaggacagatagatagcgtcgacgatcatcttgtttgagagtacaattatttatttatcttatcaacaaccaaaaagactaatggttggtgatgaaaagtcagagagtagctatgttaatctctatttctttattgtattatcattgaatcaaatccactcagtgtatgaccaatgatgttgcagagatcttggtttcacaattgagataaaagggtctgcaacaatggtgatattaaagaacactctagtgactaaagaagaatgcagagaattgcaaaaggacataaatagaaatgagttctatatatataatggtactagatcaaaagatccattccgaggaaattgtgttccatcttctttttaaacaaaacctgcatcgagctgatgcaagcgaaactagtaatacaagtaaaggtgattgattcttatcttaaatactgctcatcaaccagagacaaattccggtttcttatgggcaattcgtgttataagggttgtagatcactcagatcttctggtcatttccaagcttctggaactcattttctaaggtatcgaagatcttgttgccttcggtgtctggctcagggaacttaacgtggactgaaccatgtctgatcggtgcacctgatcctttaaccagagcctgctgcttgacataatcataaaggtcttggtggaaagagtgatccagagagaaacaattgtctactgttccatttgagatatgcctaccagatccagacccttctcttctacagaaatgtgggagagactcatagtccattatctgcaatatcaaaaaggttataagaactttcagtcttcttgcacaagagtaagactacttcttcttcatggggaaactgaattgcttacctttagcaactcatctttcccgcaacctttcagaacttgaatcttcttctttgttctctcttgcaacagaggctttatggttttccaacaagcagagaatatgtacgggacattgacaacatagtatgtctctgtcttctctggatagttcaaatcatctattgttgttatagcagtcattaactgcacacagaaatgaaaaaaggaaaaaaacaaaacatgtggtgaagacaagaatcaaagtcataaaatcacacaaggtaatgcaattattaataccttaatttgacttaaagctgaaagctttaaaccagacatatccaaaattttcaaacaagtgcaaattggtcgtccctgtttctttgaagcagatggctacagaagagaaaatcacaaaatcaagataggaaaataaaagtagggaggaaaaggctaaacccaaatagagttttggtcttaccaatacaacacgatcccggtactcattcatttgaatgtgagactgtacatagtagtgaacctgaatgaaggataagaaagctacggtcagagagtttcaacttcacaacaagtctctgagtggaagatgaatagagatgcttacggaggctttatcatatgtgctaagccccacaccaatggcaatgacagggagaccctaaaagtcaaatgattcaacaaagtttttagttggatcaaacatctgcttttaaaattaaaaaaaaagttaaagaaagaaagggactcaaaatagtagtacctctttagagtaaccagacacaccgacaagttgtgtgtctctgattcctctgtacaggtcaacaggaacaatgggtttctgcaaaaatcaataaccaaatgagatcaaagggccacagaaaatcgcagaactggacaccaaaagctgaaagaaaactcacagttagtatcttgtcaatctcgttttgagtcctccattccaaacactcgagcaactgtaacacttgcagtcattagttttaaaccccaaaacaaagctaaaacaagaaacaaagcatcaaagacaatctaaattaggtgaaagcaaacagatttaaaccattttatgagctttctggacattcccatccctggctttaagaaagcgtaacaaattctctgtcggatacccttgatgaatgttctgcagcataacacaagcatttgtaaatccaccatctacatcacaaaatgggcttttctatagccaagaacaacaataagatccatgttacatatgacactcaaccaactctagatcagtatatgttttaaacaacaactccacagatccaacaatactgaatcttaaataactaatgcaaagagagagactttgattcaaatttagatccagatcactgaaaccaatatacatgccgatcaaattacacaggacacgaaaaaaggggatatttttttcccggttttcccagaaacctatttatagaaaatcgaaagtatcgatctttggttcaataagcaaagacttgggagttgaatctttcaaagcatctaaaaaacaagtgaatttactaacccgatacgactctctgagtgaatcatcaactgtcaataccaaaagtaagtaaaattagctcaaaatttgagatttcgtcagcgatcttcaaacaaagcaagcttaaaagttaaaacattgaaaacccaaataaagacacaccatcttccattaaagcacgcaattgcttcactgcttcttcattagtgatgctcattttctcactctagagatctcagctcagatttgacgaatacaaaattgtgggcaaaagtttctgcgcaaaatctaaagagggtgaatctctgatctcacggacaatagtgcatccgaggagaagtgagagagagagagagagagagagagagagagaaagaaaagagagaaaaaggtgcactttttatggagccaagcaataaacttttagagagagaaaccaagttcttcttctctcttcttctccaacaccaaaagacttgagaaaaatatcatatcatgatgtttctttccttgtaataaaattgaaccagagatatagatttccgattttacacattatcgtatttcgaacatgcttctttttaccattttcgtaatttaattggatttattaggaaatctccaccattgaagaaaagtcaagcaagaatctatttttagcactattttcctctcaaactttactaatttcttcgcatttttgtataatagtatatattatttccaaaacaaaaatgacttttgcatgcttaatcactaaaggtaattatttcgtagactaattttaattagagcctaaattgaagcacatgctcctaaataatatgccataatggaatctaattctttcgaatgtgattgttgataatccaatacatacgcactaccaaaaaataaaattagatcatgtccacaataaatgtatgtgatacttcttttgataagaaagatatattttataagttggcttgagattgcaacaaaaaagagaataagatgcatgctccatgtaatgttttcataaggtaaataacaaacttcactacttttcaaatatattaaatgagattcaaacaaataaagaaacataaatgtccatcgtcatgtgttagttctccctattcaatcaccaaaattaagaccccattatgagtcatatgacacatgcatcgtgaaccatcttctttactttttctctacttattatatttttctgtcggttatttttatttttattttatatataatgaataaaaaattatgatttagttatcctcagaacatattcccatattctcttttgatgtataaacaatgcttctaaaattggacctaacatgcggcacaagtaaaaaatatcttagttggcaagaagaaaatattgtcgtacccttcaagaaataattttctcctaaagtttctattaaacatgatcttctgatgccccctcaaaaactgaatttgattcaaagtattaaattcaattcaagtggttaattattacgcatacaaacagtataagcagaagcagaagaaatacaacttttgtatgcatgcatatagatagtttaagttatagctgtctaaaactatttgaaggtcaatttatgaaacttacatttgatgttttaacctgttttattttttattttttattgaatgtgtaattgattaatatgagtaaaattatgtatgagagtgttttgctttgtctaaaaaaaacatcagtactatgaaaccaaaaaagaaagaaaaaactgatacaagacttagtaataaactggaaaatagtgtacaagcctctttagctccttcccgccctcgaagatgagaccgagaaccagcgttgcataaggtaccgtaaccttggtttaatagtatagttcagagatgttatcatgtatcgaatcatctttcctatgcttctggtaagttcagaggctgatgaaaaaccgatgtggtggatgcgagtgttcctttaccacacaagataaatagttgtttgaaaatagagctccaggaggatatcttctagataattccctgagcaggcgataattaagactggtaagaatcagctcccaatcggatctagaatttgtttgaacctgtttttcttttttcttctaatagttccaatttatgtatatgtttataattttttcatagtaattttctgaaagagagattgagataatatttgaatacatcccttgcacatgtaaaacgatggtctttataatatttataaattccctataagatagatgatagatccgatgatttggtttgttattacaaattttgcttgcaaggatgaattttcacattggacagacaatgattctgttgcggagagattagtaaataaatagacgatatatatccaaatgaaagatgaatacttcagccagtgcgtaaactttggtatgtgatatatatttaaatattaataagtttatatttatgatgataaactattagtagcttatgataagcttagtactgtagtaattaagtgctagtgcatgaccgtctcaaactattcaaagaccttagcttgtgcaaaagtttgtaataaacgtataaaatttacatagaaactttaaaatttaaatatcgaaccatgtgcgaatgcatgctaaaatgatcatgcttaccttaacataatggcctagtgggaaaagaaacaacataagtagcaaagaattaataaatcttaccagctccttttatgctcaacacttaatcacctaagaattcatgcaccctagctaacaactcaacaaaacctaaccaattagcattaaaccctaattatcaaatgtaagaaatcagtgtccgtacttggtttgttgtggccatcaataatattgtcaacaatgtgaagaggaagcatgggattgttctcttaaatcagccatgcagtagccagtagacaatgacgacgaagtatattgggtatataaaatgttgttattatatcacataatgtgctacatatgtattctacatacttaatctatacatgtatatcagctttctttctttcactagatagatgatcttttcaaagttgaattcgcgtactcctaacattgatgaagtcatgaagatgtccagaatgtaaatgttggaattgtacctttgattgaaactgcaaaagagagaagaagaatccatgagaagaagaagatgaagaacagagaaagaagcattagcaaaaggaagaagaagacgttgtcgcataagagacgtcgtgaagagaagagtcaaaggaagagaagaaagtcaacaaaccaaatgggtttgtgttttgtgagttgggcccataggtgatgagataagacccatacgaaataaaataagtgttttgtggttgtttagttaaggtccaacaagaagaggttgtaataactaaaagtaaactaaggcctagttagagtctaaaagtgtgaatcaaggaactagtgttccattgtgtagggtggctacttgtcttgtcttgtgtaagagtcatgattaggcctaagtgaaaatgtgtaagtgtgttgcaagtagaaaagtagtagtatatttatgagagtgttgtgttgtgtaagatgatccagtgtagtcattaaaattcttaaaacgtgttcttgtttctcaaagcaaaagagcgagaaagaaagtgaacagagatacaagagagtgagagaatgatggaagaggtcagaattacaacagtaaaacatcgtcctgttgagtaatagtaagccttaaatgccattatgaataattaaacgttaattattcatcacaaaacgacgtcgtgttgagtgtaggtgacgaaacagttgttttcttctcccttccattgttggtctttgaagagaagcagaaagttttgagaagaaaagatggaggaggaatcgcgagatatactgatgacgacgttgattgaatctggggtttcgattcccggagatttcacttccgttagcgaatttactccggaggcgttagtatcgatttgtgctcagctgctcaatctcattgacccatcggcgtcgttttccgatgagctccctgattctctccccgaaaggtttaggatctgcaccgatatcgctcattctgtgaagaatctaggctacatcaacgatatgagttattataaggtaccatttcatataatccctctttggatcgcaaccagaatccaatttccattggttgatagagcgaattgttttgggttaaaggaaataactttagtgtttaatagttctcaaggaacaagcttttatagttcctgagagctgtgatagtcctttggtcttcgttagaatgttctgaagtttactttacgttctggcttgtgtggcttttcttatttgtgtgaaaatcatgctgaaacagattgtatgtgttgcttgcggcagtttctgcatccatctgaagatgattcttataggttggttaggtttctggttgagaggctttcggagattagtgaaggaagaaaaactttgacggctggtgatatagctagcaggccaaagatggagactttcagagatatttcagatgacatgatggtgaatgaggacaaggatgagactttcgatatgcatatacagaaggttgaagctgtcttaaaagatctcacaatgactagtgaaaaatctcattcatctgactctctcgcaaaaaatacctcagccaatgttgacttctcctcccaaaagacagatgatcctgttactgatgtacgttctgatctttctttgagagattcatctagatgtgaagaaaattcttatgaagacccgtttgaggtactatttcttctacttattgtgaccttatctcttttctctgtacatgagcatcagagcatatgtttgaacatttacataggaatagtgattttaaaccagttttataaatgttgaaggcgtataaaccttttatcattttttatggtttgtagacaaattatgagactgttgagttacagaatcaacatgatgtactcttggaggaactggaatctggatcttcacagctatgcagtcttgaaagcgagctggagttgttgcagatggctgcggagaggttattggatgacaaaaagccgggtgggtcatatctcgaacagcttaatcaacaactagtggtcaaaaggtgtaatatcatggatcttaaaaagcaatggtatgaacaatattatatttatttcaagttgaaagcatccatgcattcagtttcatggacaacatcaggacatgatggaagagttatgtatcgcatgataactaagtatatcatgtcttccttcagggacgatgtaaggctgactctggaaactaaaaagctacttctcttggaccaacttcatgtggaggagccagaggctaaagagaaattccataagttgagaaagactgaactggatttacaatctctctcatcagaaattcaaaagaggtaaccagaaactcttactacatggctcttcactgtctgtgactttgactgtgtgctattgattgctactttatctcttttaattgctcttcattttaatgtgttaatcttttccggacagggaagatgaacggtgtaacctttacaatgaacttgagaggcagccaaaagcagcgccgaggaaatcatatatacatgggattaaagaaataacaaaaaatagccgtaaactggacactgatattcagaggatttcaggggagaccagggagctacaattagagaaaaactcaatccaagaacgcctgcaccgatcatatgctgttgtggatgaaatggttacaaggtatgagcttttgctctgacatatttgaatcgtcttgtcagatatacaccaaaagaaacgttgccatgtcgctctggctttagagaacatgcatacccttttataatgtggtgatgaggacggtttctctttctctgcagggaagtgaagaaagacccagcagtacgacaagtctacaagctactgaccagtattcacagtatatttgagcaaatctctgagaaaattctcatgactgatcggtttagaagagaaacagttgattatgaaaagaagttggggtccatcacagctcgaggcatgagtttggagaaattacaagccgatctggatgccataaggaaagaaaacgaaagccttaagaaataactgattatgtggcctggggaaggaggattaaattacacatttttgtagagaatcatctgttcatgtgcttccatatctaattgtttgtttataggaatgtgtaatctttttctcagatacatggaaaatctttctgttctgatcaatctcgactactaaagagagcctaaagctgattcagctaagtcacagcaaatagtttgtaaaaagctaggaatagagagacaaactaggcaggcatatagagagcagtcacagcttcaaaaaacgtttccaaaaggatcttcccaaacattctttatgtattttctgtatagtctcacaacaaaaaataaggtaaaaggtttgctacattgatgcacatctttcttccctcttgtaattgtcaacctaaatttctctggggatgatggttcctaagtatttacacccaaaaatccagacttctacatctcttttacgcatttgatgtgtatctttatagctgcttccccttgacctaatagttgttaacccaattcgttagagcagcttgaggttgctgataagcaatgtgcgggtgtcctatgggttcacccatagccgttgttgtgtgtggcggtggtggtaaggtctgatatgtagttgaagcagctgccatgggctgtgttggttggtgcattcccatgaggccaccatgaccagcctgcacgactggaaaaccaagtggctgaccttggtatgctaggttatacattggattcacctgcaggttgccaaatccctgcccaatccatgcagctgcactttcagtctgcaacaacaacatcatgtacaccaatgttaaactatatagtctacaattatatatcatcgcaaggatagaacagtaaaaaaactgaccaggtgagatgccttttcttcactatggatagaatttaaggtggttgtagatgggatgctgctagcaaccatgggagaagtgtgtaggtaagggtttgtggtgggagggttttcagtgttgtcaactggttttgcatgagaaggtgctgttagagcagctccttgtggaaaataagactgctgagggatcccgtttgggctcaagaactggtgaatgtacggcggtggcatataatacggtgagtaatagccgtaagggaagaaattgggagggtattgctgcctaagaaaatttgtctgttgagtggctgctgctatggagctctgatctggaggatatgatactaatgaaataggtggagagttggaatttccgggctgcaaattagagaaaagcagttatcgaaaaagtagagaatagatacagggattgtttagagtgcatatactgtgacaagatataccacatacctgagtctccgctgcttctgtgttaacgggttggcctattgctgacaacgaggggacaagaccaaacacactgagtggagcttcttgaccataagcaatttgatgagtttctgtgtttgataaagcttcctccttcggtacttcttctacaggtgggacaatgtgatccgagtgcaccacaggctcagctccagttgcagaatttgatatcccataatccttatcttcagaaactgttgatgtttcttctctgcacaagaagttatggtaatgagaatgagatacaaacatgaaaattggagaatacacctctactactatatcacaagacaaaaccttctcatttccaaaattgaacttaaaaatgcatatttttatatttcactcaactgaaaccagacaataactaaagcagacaatatgtagagtgaaagtatctcagtcacgaacctagccgaagcaaccccagtaataccattggtagtgggagaagattccctctcatcatcccctgtcccgtgagaagactcaaaatttgagtcatatcccccactagcaccattgctagaagatacctctttcacaaaattggaatcaaaactgccaaacgtcagaccattttgcagtcctttggcaacctgaaggtggaaagggaatgttacgtgtgactgttcgctaacatctggcttaggaagcgattgatttttgccttgtttggacgcagtctcaatttcaatggctgttaccaaaagaaaacagaagctgaatcaaaactaaaaactacttcaatgaaaaatttgaggcaaactaaaaattcatgaaaaaaagtaaaaataccttgatctgacttgctactgcaacgtgaagcagaaatcaaagaaggatcatcttgagctttatgattgctgacctcactcggaatactagcaggaccagaaaccctgtaaaagttatcctataatacttagcaacctaatagaaggaaaataaaaaagcatccataatcttggagacatagaagaatgatatggaaacatactttgtttcattaggtactgtgatgttgcttgctttgttagtggcaggctgagcagttctagaacctcttgttacatgattagctccattttcccttttaaaagaagcatttcttccactacctatatcggaacgttaacaaagagcttaatacaggaaagagcacgacaattgatatttgaaaggtatcaacaaaagaacacaaactaccttgataagagttacttgaagcaaagttcctccgaccacctctgccacttggttgtgtaactggcactataggctgcagaaagtaatcatatgagataaagataaagaaagctatagacacaaaactgcagataaagaaagtattcataacaaaaaaaaagaacacttgcctccttctttttctcccttttacttctcacctcatgaaatgtatctgcaaaatttcaaaattaacattgtacataagaaaatggctcataaagaccaaagttgagccaaactaaaatacaagagttttcacgaggctgacccaaaatctgaatgttttgacatgtagacacataagacaaatagtacctacttaataatccagatcacgcccaccagaatccttgaaaggtacgaactcatccccaaagtaaagttacaaaaagaaaacaagatctctttcaataattctaagtacctttccagttaaatggtaaggaactatgactttaggcataaaatctgcatattcacacaccaggaaacaaagattcgataaccgaatagctcaaggcaacaaaaagaaactcaaaacagtagcgaaccaaaagcacatcacatgatcttcgaaaacagatacaaaccctatcgtacaattcaaatctaaggagggcaaacccaagagtcacgcaagtcacgctccatcaaaacaaaacaaaccctaagctgagaaagagacatagatgatgattcgtacctaagaagaggagcttctgagcggtctcatgaggatcattgaaggaatccttatagacggcaaagatatcctcatccgagtgctgctttccggtatactctctgattttctgaagggttttgcggagatggtaaggaatcgaaaccctagaggagccgccatcggaggagctcatggttcttgttaagggagagaagcagaagcgggaggagagagaaattgagagagcaattgaaattggaagcgcgagtccctccgtatttatttatttacttaccaagataataataatgtaccgcttcactgtcggtaacttttatacgctcacgtcacttcattgcacaccaaaagactctttaaagttttacattttgtatgacttcaacagtcacccaattatagagagacacgtggacgatgacccaaaaactgtgaatacgttcacactcagtttgttttgatattaccgtatacatatgtgtgaatccgatcataaaagtactacgtataacagttgaaacaaaagaaatcaaaattttcgagggaggcaaggcaagctcgcactctctcactcatcatcggttccaaaatagcggtctccaaactcgcccataccaggaacaactcggaactcgtcgtttaaaccgagttctatctctgaagtcacaatctttatccttgggaactttttgcacaccacatttactccttcaggtgcctataccatacgtaaccatacattcattttgactgtttaggctatgcagataagttggaaaaaggttttggtttgttaaacttataagttgcaaaaaggttttggtttgttaaacttacagatatcaaattgagaaatatgatgttggattcaggcacgcctttacttatgagcagtcttatcgcttgcaccgccgagtttcctgctatacaaaacatgcttttgttatgtttctatgtacatagtcttttactctaccagtatagtacagagttcacaaaacaatgagtcagacctgtcccgaggattggatccagtaaaagcacatgcctttctgaaatgtctgagggtagcttctcgtagataagctggtgagtgccatttgttgttagtaaatagttaggagaagtgatgagcagagaaagaacacaaacctgttgaccattgtcgccttctctatgaatcagaatcttcccaattttgatgcctttgcagcatgctctaagagcgttctccatactctcaccgctatgttcagagacaaaatcattatatagtattgacgttaactattagtgtttaagctgatttctttaccttctgataactgagacaccacacagtttcttacagaagtccacacccgaatacacagatcctacaattacagaaatccaaaaactcaacatgagtttataatattactatgattggagagttcttctccaagattgtagtaaggtataatctttttcattagcttacctgttggagtaaccacttgcttttctgtaaagggaaggtgtccgaggccatgttcaacgacctggcgagagctcattgttagagtcagcaaacatggtgaaataaaacgaacagaaatcaaatcttgcacccaccaaacgtatcaatcgatcggagtagaagataaagtcatgctttgttgttttagagtcgcggattagagtgtgcataccacgtatctgcaagcagcggccaaaggatcagtcttttgggtgactaaacaagaaaatgattgttgttgagtagacgagaaaaggggaataagtaaaacctgaaaagttgattgaataacataaagatttggataaattttacagagatcatgttgaccgagcttcgtatggatgtgttgcacaatcaaatcaatagcaacatggttatcaccacctcggggaattattatatctgcgtatttctttgttgggagtatgaaatcctcaaatgctggcttcacaaactttgagtactgcataagagtttcacacatgaaaacataaataaagaaattatttgcaaaacaagaatatacagccacacaaaacctggtcaagaacagtggcaatatctctgcccttctcaacagtatcgcgttttatccttctcgctagacgcacatcggcatctgcatagataacgccatgatgtaaaataagagaccaatgtgttaccttcatgagtacatatacaagtgcagcgtctcatatatgctacggatttgactacataagtgttaacaggtttggtatgggaaagacctgcgtctacaaatatcttcatgttcatcaaatctcgcacccgagggtcatggaaaatgagtataccttccagaattataacgtcagaaggattcacctgcaaatatatcataaacagagaaatattagtataagcatgattcttatataggctatgatgacaagtttatgtatctgacaaacaagagtgcatgtaattagtatggaatacacaagaaagctaaccacttgatcatgagtttgagcttcagaaattagcagaaaactttaaatgtcagaagtgactaattgacaagtaaagattcttacccttctaggtggaaaaacattgttcttgtaacttttgaagtcataattaggaatatctactgcttgtccttttcttaacttctccatggaagacaataattgctcagtatcgaaagcgtctacaagacaaggaagcatatgacacacaattcgtagattcaaaaggctaagggacacagaacagcgtgcattagatcaaaagacccattagtttttcaaaaacttactaaccaggatggtcaaaattgtaatcatgaactcttacaagctccacttcatttacattatggtagaaagaatcctgcaaacaaagatcaacctcggtgcattatatatcgacttacaagagctttaaaaaaatggtttatattgttgcataatcatatcgaggacaagaatcacctgatttacaacaacagctctctgatcatgcagttgctgcataatcatatcacagacagttgttttcccggatgctgcacctccagcaactcctgaaaacaacattttctatttaacattttctgtttctaaccatctttggtaaactaaaatccaccacgactctcaccgatcacaaaaggttgaccatgttcttcttcctcagccatttgctctggtctatttgaagctaaaccatccatttgatgaaatcctgagaaatgaacctttgaggatgtctctattatattcacatccgactttgaagccattcctacaacacaaatatgcaaatctaaattcacatgaaatatgccaataaggaaagcaaagctacctttgttgtcaccatccaggaacaaaaaggaacactttccagtcaaaaaacaattcctcaaaagaatcaaactttttagtgatattagttagatgccacaagtgccaatgccgtgatacccattttctcaaatccagtataacacacaaaacaatcaaccaatcatgataggccaccagataatagtaacgccaatcctaaacatgaaaccgtaactttttcccgggtaaaaaagggaaagaacaaaaagaaaacagagatcagaagagaagaaagctagatttttttagatcaatacatgcaaaagaattataagaaacgtttcatcatcatataaaccaatataaaccgaatcaacatgaagataaaaactcacgaaaaaagaaagagggattgaataagcttcgagatcaccgattagatatagctaacaaaagagcttccaagttccagataaagaatctaaacatataaagagagagagacacgagcattgcctgttaaactcgatgcacagacaaaaactggacttattaaaaataaaatatattgataacgtatataagtgtatgtatatgcgttgaaagagagaaaagaatgaagggaggatgcagcggcggtgacgggtttttgcggaaaccggaaagtggtttttttggttttacgaaagtacccttcccactgagggacgtggtagtggcaattctcgtaaatgtgagagtgtttgagtccctaaagtagagagtgtgatcaaggatccacgtcagatccgaataggatgtaggacctactatcgaaagctgcagctaaaaacgcagtgatatagatgcgtgtggtcgaatgcaatcttacgttactgcaaaattatttattttatactattttggattacgtctacaataatttgtttattctgtttttatccataacattttaacttcatatgtttcctccaaatctatttacctgaattttgtttttcgaaatatataatttaccaattaatattagttttctcaacatctacactaccaaaggatgctacaatgtaaaatattatacacaggaacaaaattagcatatttacaatttaatctgcacgattgtttgtctataaaatttgaaggatataatcaatttcttcttttagttccgtagatttttttatgattcattaatgaagtttagaccagagattaggatccttaaaaaatttggatgagcagcttagaaccactttaaaaattaattttgtacatccaaaattatcgaaacaaactattacccaaatcaaagatattgcctttacttcaaaaactgattacagttttgggtatgttttagcactataccatcttattcttatcataccatgatcttcttggagaattcatctaatactattttggtcataaatcaacatttcaaaaaatatccacgttacaattgtaaattgttattacttaattatgtcttaagttttttaaccacaccaaaaaaatattaaatcatatacacaaacatttttcgaatgtatttgttatttgatttctcacacaaatgtgaagaagtatgagggtgtttcgatacacttttagagtttgtttgtttttttgtaatttttttctcacaaatgtggggtgatgttattatatttgaaaatttgtggaccttaatgcaaataacgcctctaatagtagattcgtgaagatgataagctgacaaaacgacagcgtctaatatagtttcgagtttcttcgacagtggcaatgttttcatcttcgattaggttaatcgtatctgggttccaccggactcaacccctaaaatcgccggtaaattctccgagcgtcttcatctccgtacctaaattcttcaactctgagtcaaaatcgacgggaactggttcaagatccgtagcaatgagcagcgttgagaaaaccgggtcggattctggagcaatagagaatcgagcgagcaggatgagagagaagcttcaaaaagagctcgaaccagtggagttagtgatcgaagatgtttcgtatcagcacgctggtcacgccggaatgaaaggtagaaccgacgatgagacgcatttcaatgtgaagatcgtttctaaaggattcgagggaatgaatttggtgaagagacacaggttggtctatcatttgctccgggaagagttggatactggattgcacgctctttctatcgtctccaagacgccgtctgagtctccttctaaagactagtgtactggtactgtttaatgtatcttctgtttctgttatcagagtttctcatcaaactctgttcgattcaaagattgaatttttaccatcaaagtgctctgttttggaatttattgcggagccaaagtcttcatttttacatacgcttgaggttgtgtgttggtgtttctggaattgtgtgttggaacaaagacacttgcttttagttcaattcgagttctgtcttttctagcattcaaaactataatggtcatagcttgatgaattgaattaaggctccatttagttgaaagtccaatcaatggtcatgtgtttgaattctcaaaggaagctcgattgtgccgtgtttgttagcttggagccaaaagggttgtttttccatgtttctgtctctttcttcttcagattattctcccattgtcatcaatggcgtttgcgtcttctaatcgctaacgctagaaacaaaacgccttttccaatagtccatgtcaccttcctttagcaacaaatatatgtactttatgggcttaaaccaaatctaatcagtgatcacctttttcttttgtgggtaaagtgaatcgtcatttccattgtctggagaagctaaaccgtccctcttctatacatcaacagagcaagttacgttagtatatgtccgaagataaataaaacgaaaaaaaaacaactttccaaactatcatcattttcactacattggcgatgagggagctctcggagcttaacagagacagagacggtgatgaagaagtgtgggtcaaacactattcatccaagcaccagatacttctcgtaggcgaaggagatttctccttctcttgcagcttagccacttgcttcggctctgcttccaatatctatgcttcctctctcgattcatacggtaacacttggtttacttacattgtaagagttattaaggttttgatttcgttatcacttccatttctgtgatcacttactaagtttttgaacttccggtgaatgatttgattattcaagatttacactgttttactctctgtttatagattataaacctgttaacaaaggttgcagctttaagctcgatttcctcagttgttgcatgtcttttatggtaattaaaccagatgatgtggttagaaaatacaagaatgcaagatcaaatcttgaaacattgaagagacttggagctttccttttacatggagttgatgctaccacactgcattttcatcctgatcttcgttatagaagattcgatcgtgtcatcttcaacttcccgcacaccggtttccacaggaaagagtctgatccctgtcaaatacagtaagttcaacattttgaaattacaaacactttcttctcgcagttgaatgtgtagaccagctgctgcaactttgaggaatttgtttaaagattttttacatggtgcaagccatatgctaagagctgatggagaagttcatgtctctcacaaaaacaaagcacctttttgttattggaatctagaggagcttgctagcagatgctttcttgtgttgattcagcttgaggcgttcgagaagagaaactaccctggttatgagaataagagaggagatgggtctagatgtgaccaacctttccttttgggagagtgcagtactttcaagttcagattctctcgtgtcgccaaggaactttatgcagagaaggtgaaggaagtagaatcaaagtgtccccgagagttatcaactcgggcgatgaataagaaacatgcccgttttgaagacagctcgatacatcttgaactgccaagatgcactaaacggttcaaaagagtttctcttgaaatgcataatggagaattacaacgaatggtgatacggacgaggtttcctcatcactacactaaagaatcatcagaaacacgccgcctactttgtcaagactatgcagtacaagctagccaagaaccgttccctgaacgctctctccgattcagaggagtttctcatggaattcataacgggagagtacgaaaaatgttaatacggaacagcactggagaatcaagaaaactaagaatgaggaggcagaggaaccttaaaatcaggtaaatatatccttgatagttgcttatattatgaaataaacatgctaaatcgatattgaaattttgtaggtgactcatatccaataaacttcaaggagcttctgaggataactttgatggaaagaagatgactgaaacttggactcactaacaaagctgcattctatgttctcttttgtttattaggctgattactgacagctcaaaaccgcaatgctctatatggagataatcttttgttgtaattgtgtgtatttatctggatgttttccttttggagattatgtagttgaaatgattgtgagtctcgcgacttgcattgtggagaaaaatcccataaatctcttgtgatatatccaactaagaccctacgccagaaggtttggtaggacgcattcttaacgtaatacagtattcggagtaacttgaaaatgttattgtaaccaattcttgtagtctgtagactattatatactaagcttaaccactattccgagttacattggaacaactcatagggttttgaatggaggttgggtacaaaacgaactaaaacatgagcggactaaagtatcatatttttggggcgggcactaacacacacaacctatatacagaacgcattagcttaatcaacagaatcaattttgtgatggccttttgttttggtttcgctagatgagaaactgaaccgtctctcttcttaaatacaataacgttacttttgttattttgaaaattgaaaattgaaaataaaaccttccaaagtagcatcctttatcgctgcaatggcgatgagagagctctcgcagcttaacagagacagcgacggtgatgaagaagtatgggtcaaacactattcatccaaccatcagatacttctcgtcggcgaaggagatttctcattctctcacagcttagccactctcttcggctctgcttccaatatctgcgcttcctctctcgattcatacggtaacacttggtttacttacattgtcagagcttttagggtttttttatttcgttttcgcttcagttttctatgttttaggttttagggttttatgtcactattttagcaagatatcatcactctttcagtttgatcaaacttgtctctgagaagaatcgaaatcaatttctagtgcaattgtggagcttccggtgaaagatgtgatttttatactttgtactgattataaacctgtttaaaggttgtagctttaagcttgatttcctctgttgttcatggtgattgaagcagatgttgtggttagaaagtacaagaaggcaagatcaaaccttaaaactttgaagagacttggagctttacttttacatggagttgatgctaccacactgcattttcaccctgaccttcgttatagaagatttgatcgcgtcatcttcaacttccctcacgccggtttccacggcagagagtctgattcctctcttatacggtaaagttcaacgatttggcgttatagattcgtccttcttgctgctgaatgtgtagaccagctgctgcaacttcgaggaatatgtgtgaagagtttgtacatgttctttatttgtttgtttgttgtaggaagcatagagaactggtgtttggatttttcaatggtgcaagccgtttgctaagagctaatggggaagttcatgtctctcacaagaacaaagcacctttttctgagtggaatctcgaggagctcgctagcagatgctttcttgtgttgattcaacgtgtggccttcgagaagaacaattaccctggttatgagaataagagaggagatgggcgtagatgtgaccaacctttccttttgggagagtgcagtactttcaagttcagattctctcgtgtcgctaaggaactttatgcagagaaagtgagatcgagagaagtgaaggaacgagaatcaatgtatccggaagctattttaaacaagcagccagtgtcatttgaccataggtatcgcctccaaacagaatttgaaggtgtaagccaaagaccggttttgtttgatctcagctatcgcggggactataaccttaggcaagtccaagatcctctggttaagtcaagagaaaggacatctccattggatctttgttactaccaagaacgtagatgtttacagctcgaagattcccggtttgctcttggaagaaaccattcccggttcaagacaactcaatagagctggacaagttcagatactctgaaagaagcagcctgctttctcaagactttccttttcaaacaaatcatcatcgtcaagaacagttccatgaaagctctacccgtcgcaccagagtttcgccggatatatatgacgagataatacaaagaatgttgacacggaccagttttcctcatctgtacgctggagagtcgccagagagacatcgcctgctttgtcaagactttccagttcaagctagtcaagaaccactatccgaatactctaaccgctggagtggagtttctcgtgaaatttataactgggaagtacgaagaatgtcaacaagtaccagctttcctcatccgtacactggagaatcacaagaacgaagcttgagtaggcagagtaacctcatcactcaccctccacagcattggtaagttaagttattattctttgcgtgtttatgacaaaatggatatgaaaattttccaggtaacttatcttcgaaagaacttctcaggatacggtgatggaaacaaggtgagtgaagcttggagtgactcaagcatctctaagaatggcgtgatttatgttatattctgtttcttagcatggcagttagttaactactgacaactcaaaactgcgaagatctcgatatggagatgttattttggggtaattttggagaatgttcagtagaaaattgttgtcactgtgagtcttggcttcttgctacttgcattgtcttcaggagataattatctttgtcgctgtacttctggaagatcatttctcagttaatgattcactcgaagacattacatggaccagagggttagataacttacaaatatctgtatgtttttaaaagtaaaatatatcatttcttgtagactaatacaaacgtgtaagcttagtcgacaaggcatcaatcactatcctaaactcttcaatttcaacttctaatcgaagtaattgaaaaatgaaaatgtcaagcaaattgctaggaaagtgatagtgaaaaaaagaagaagaataattatacatagaaactgtttaaatttgtttacgactgagtctatagttccgcgtgaatgtacacgtctatcatataaattataaaaaaataatgatgattgaatttactacgaaacagtttctatcgtttcaattttaaaacttccttgtgttattaaattatgtcaaatctataaagattggaagatcctcttctgtatttatacaatcataagtcaataaagataaacactcaagcaaatcttggtatctctcatcaatcacacacaccgatatcggaatattctctctggtgattattttccggcgatatgacgacgagggtaaatgcagttatttccttctatgtttctttttaaaaatttatattcggtaaaactagtttcttgcaaaacacgaaacttatactctttctttcttcagcaacgcatagttttgaaaatggatatgagtgatgagaaatctatgaagaaagctatgaagatcgcatctgcaaaacctggtaaacatacatctctactctatggctttaatttgtgagccaagttaggtcacacgaatcgtttcatcaactttgtttttttttttacgcgaaggtgtgagatcggtctcgattcagggacagaacgatcagttggttttattgggagaagggattgacttagccgagctaacacgtgagcttaagaagaaagtttgcatgacgactatcatcaccgttcaggctgcgccaccgcagcagccaccgcaacctcatcctatgggccagtacaaccagatgcctccggcgagaagatgtacctgtgagataccgaattcaggtttctgcggattttgtagatctatgagtcaacccaattatcaggtggtaccatcgccgtattatcccccgatgctctattgtcgagatgagaccgatggctgtagaattttgtgatgtgatttttgttgagttttctttattgaaaaaagaaaaaaacattttcttaattttctgatcatatgatattgtaaatagaaaattgttaaattcgtggtgctgtaaatgttttttttttttttagtttttgattaattgttgtaaatgttgtgacagtggatattaagaaaataacataaagtctttggttagtgagaaaagaagaatatattgaatcgttggttttcctattacatttgttgttgtaaatgcaaatatagaaaaggttgtttacgtatagtttgtttatcttaattctttcatataaaaatgtaaggttttttttttttttttggaatgcgatgaagacaagtccccgaccaactaatgtcatatttaaaagactttgctttgttgacatctgcaatttaggactagatcgtggtccgtggatagagatgtccaaattccaaattccaaaaaaaaaaaaaaaaataccacaaaaaattaaataatgtttttaagtaattccttaaactttccgtatattctctgcttcaaacacgggaagcgttaccatgtcacatcgtcaatatatcaaagattctctcattaaaagaaagtcaagaaaatgaatgaaatgaaattgtaataataactaaaaatatgcaactataaataaataattataaggaaaatgtattcttattgaattgaaattgggatttgtagtggttaatacatagtatgtgcagattatcaaatactgtgtttcacaaacataaatgatacaacggcctttttgtagagaattttcaacacaaaattctcttatctgcatcattggtttcaatctaggttcaggactagtaataggcccattagtgataataagcccattatcatactagcccagtcaattgatatttgctttctgttttgcagttgcatatttcccgcttatttttcaagccaattccgttcgtgttgaataactaaaaaaaaacagaattcttcaacaaacaacaaaaatcgcttcttaacttcaaatattgttttggaggtttcattttttcctcaaatataaatgtctccatcataaaccacacaatcatcaatccaaatttcaatcaaatatgaagcaatcagccggagttctcttcctctgcatcgttctcatctccttcgtcaccggaaatgctaattccggtatgatatccgatctctgcaaacactccgacgatccaaacctctgtctctccagcataacttcacgtcccgagtccggcgaattc

SEQ ID NO: 96 - DNA, 96489 bp, Arabidopsis thaliana
aagcttgtcttcttcaacaagggaggagccaacggaaagaccttgcgccttgtagaatgtaaagatcattccaccaccaagcagaaggatgtcacatttctcaagaagcgattcgataactccaatcttagatgagaccttggaacctcccacaatggcagcaaatggtctctttgggtttgaaaccgcaccaacaaggtagtccaactcctgcgaaatatataagataaccaaatgtgattcaattcaaactcataactcaattcaagtcaatggactcctccaaattgcagttgagaaacctattgaaccttgagtttagacctcttacatggaaagacaaagatgaacaagcaatcaatcaattatttcatgatcaaggatatagtggcggcacttgtggtgcttctaaattcctcaataatcaatttaagaaagaatcttgtatcaaaatgtcaccttttgcaaaaggaaaccagcaactgatggcttcaagaacttagtgactccctctgttgaagcatgggctctgtgagcagtcccgaacgcatcgttgacataaaggtcagctagagaagcaagcttcttagcaaaatcaggttcgttcttctcttcctccttgtaaaacctcacgttctcaagaagcaaaactccaccttcaggaagggaagccaccaaggtttccacttctggaccaatacaatcatcagctttcacgacctgcacatttcacaccccaaaaacctcaagagatttccacaacaagatgacagattcagatccgttgaaaatcagggtagtacctcaataccaaggagctctgataatctgggaacaagaggagccaagctgaactttggagtgacaccctttggccttccctgaaaattagagatgaaaatgtaaagacttttgtgtggatttgagttgattagagagatgggtaaactgtgaaccataccaaatgagtggagaggatgaccttagcaccattctcaatcaaaaacttgatggtgggaatggcggctctgattctagtgtcgtcagtgatattctggttgtcatcgagaggtacattgagatcagctctaacaaacaccttcttccccttcaaatctacagaattcagatctccaacactcttcttcgccatcgtaatcactcccctggcgccctttccgcgcacggagtggaccttggacgccacgtggaccgagaaacgagagtcaacgacggcggagaagccaaggcgacgtgcggagacagatgtggagggaatgtgtccaaaggaggcgcgggaggagcgtgtaacggcggcgccaccggtggatttgatgatcgaaagagctgcagttgcggcggtggaagccatgtgaagtcaacagatagtgagagtgaaagtgagggaataaggaagaagtgagaggattggatgatattactagtttatggattttgtcttatcgttgatgagaggttatcataattcttcgccttccctctgcttacaatcgttgcccacattcacaaagatcatgtcttttgatcgaaaagtttacttccatatatggaaaagacaactctaaaaataaatataatgaagttaaataactcatttgcaatatttaaatagctaaatgggctttactcggcccaatgaatttctgtcctttcgaatataaacgtcgtttattttattttggaaatcccggcgagaagcacctctaatggctttatctccgtcgtctcctccatgtctcagatctctttcgccttctttttctcgccaaattggcttccttgttccacgcgtacagtctctagtctttggtagcgtccggaagcatgagttgcggaggccgagcgcactcagggaatggcgggagtacgaagatgctgtgaagagaaaagatctcgccggggctcttagattcctcaaatctattgaaaatgatgaacagcgtgattcggttgaatctattgtcacggctaagttaagcggcttgggagctcttgaattggagagggattggcaagttttagatgcgtgtttgaatgcagatgatatgagacttgttggaagtgcgtttaggtttcttaaggagagaggtcttttggccaacttcggcaaattcaccagtattggtactctgttttctcttctttgcgccttcaaaatcaacttctgtttagatagatgtacaaaagtaatgtttagctatgtgtgcgagcatttgaactgattaatttgtatcgtttcataagtttcttgcttctgtatcactgtgatgcagttttggaaggaacaagagaggtaacacctactgtcctgaagtctgcaactggcttggaaggtgtgtagctcaaatttctctcttcagtcatctttgattactcagtgtgtggcgatggaaacttattttactgtttatattggttagtgactaaactttcaccgaagaagtggggactttctggtggttctagcattgctctggctgctttgctgggtggagtctcctatcttctttcacaggagattgatgtgcggccaaaccttgctgtcattttgggtctagcttatttggattccgtttttcttggtggtacctgcttagcccaagtatcatgctactggcctccacataagcgtagaatcgtagttcacgaagctggtcatcttcttgttggtaagacattcgtgatcattagtatttttatgaaatttctttctcgttttgtggctaacgattgcagcttatttgtcgtgcagcatacctcatgggctgcccaatccgtggtgtgatattggatccggttgttgccatgcaaatgggggttcaaggccaggtattatttagattcactctagtgttatactattctattttgtagtgctgtgattctatgttcttttagctacatatggaaccgagtacataaatggattatcatgtgtttctctaggctggaacccaattctgggatcaaaagatggagagtgagattgctgagggacgacttagcggtagctcatttgataggtgattattagtcaaggtgttgttctctccctctgagttttctctcattcacaaacctaatgctggttcagtttctcttaggtatagcatggtactatttgctggtattgcagctgaagcgctagtttatggtgaggctgagggtggagagaatgatgaaaatctgttcaggagcatctcagtccttctggaaccaccgttatccgtagctcaggtcaggactaatgaaattcatatatatctgatttgactagtataatatgtgcttccacttttcttgcacaagtgtacagattgttaagcattgcgaatctgtgcgtttgatcatacagatgtcgaatcaagccaggtggtctgttctacaatcttacaatctactcaagtggcacaaggcagcacatagggccgctgttgaagctctccaagtgggaagtcctcttagcattgtgattagaaggattgaggaagccatgtcttcaagcaaatgattgaagcaccagcattttctgtaatttattactaatacggacagcccataaaaaaaaaactcatttggaatgcatggagaccgaagcagataagctctcggtatctcggtatataaaccacctgactgcaactggaatggcgagaagggacttgtatctttggatccatgttcaagtaagttaaggttttatccactaagggagatgtggaggatgacaaggtttaaactttaaaggaataggagccaagcttttaatagcataaagaaaatggttgtaaagtagcaatcacatgaaagctgtatagttgaattcctgtgaagtaaagttttgggcattactagtagtgattttctttctatcattcttgttattatttaatgcacatgagaacagaaactgcattgccatagatatagactggggatatactaacatgtcattacagaacacaatagaaatggttcccagcagagcagagctaccttactacgatacaaccaaacaaacgaaaggggaaaagttttaagactcatcagggtgttgctcctggggccagtgttgcatcatcccctgttgttgcaagtaatagtatggcggggaacccaccaccgatggtatggtccctttggtcacgcctaaaccttcttctttcagctcgtccctcgggattatgtccacaaggaaatcaaacacgtcggtcctggaaatggcagcggcgatgtcgttcttctgcaaggtcctcctcttgttctcctcggtgtggatccaagcacgtagagtgagctccaaaatgaacatctcacaggccttggcaaaaatcacaggagcctccgcagagatcatcctcacatcttcatcagctttcatgatcttcttgatgcgggctaggggaagggtgtggttcttgaaatcagtggtatgctcgatctcttgcatttggttagcccagaacatctgaagctgctgctgttgttgctgctgatggtggtggtggaagtggtgagcttgttggaatgccatatgggaagctgcatttactggcccactctgataagcatgaggaggtacataatccatcactccctgttgctgttgctgttgaccctcttctgactgctccattgctaagctatctctgttaatataaaattgtagattgacagttaatccaaagttaagggatttagaaccaaagtctaaaaaaaatcagaaaaaaagaagcgcatgcatgctcgaattaagctcagatatgctggtttcaaatccggatttgggagtcacgacccaagcagagcacgattcacaacatggaccaaagatgataacttttgatcctttactacggttttgtcaaagctaaaggatcaaagaagtgaagaaaacgaaattggagagagaagtttccaatagaaacagaaaatggaagaagaaacacagacataccagtgagagtgagatctcgcgaaaccctaagataaatgggtttggggcgggttagctttttatcaagcgtttctggtggtgcgtatcttccgcctagttgacacgtgtcgaaaaagcgggagtttttacgttacttccacctgtatgcttttcattggttatgttgtgttattccagaaatttctttatcggacggtttcgaagaataacgaagaacacgtgaagtgcgcgtgaacaaaagtcacgtgacatttgcaacgtcgcgcaaacttattttcgaagaagcccattggaccttgtgggctgtaaatcacccgggccggatcaaaacttgaccctaattgtcaacagagtaaagggaaacgggaagcagaggaaaggaaaccatcgaaagaagttgcagaggcaaaggatccatctttgctatcgccactcttctttggggttcgaaagagccagactttgtttaattatgccgataattatgtgcagagtcgtcgctagttttgttctgtaaggagcagaacagtctcctccatccctctatgtgaagtccacaattgctccacttttcagaagccaaggtatcttcttactgctaatgtatttaccatacgtgtttaacttacacaagctctcttctttgtgttttaatctgtaagagattggtgtagttgtcggatttctgttaatcattgcgtgctcggagctgtgaaatttgtagtttttgtgattctagtgtgatatgtgatgatcccaaacaggtcatgtgctttaataaacggttggagcaagaatcaaaagtttgtgtattctttgtagtatttgttctgtttttttcttttcttttcttcttctgtttggtctcactgagaccgtctcagtctctcaaatatgtatggacttaggataattcagaagcttttgacattgaagcccttacaggaagcaaatatcaagtgattgaaatgatgagtacagttggagtcatatttcttgttgtttgtatctaggctaagaaacttacacacacctaattcgatttcaggacttgatgcttggtgtggcgcctgatctcgacacaccggaagcagtcgatgctgccattgccagccatcaacctgcgacctgttttggcctctgaaaacggagactctgagagcagccataagagtgatcgagaaggaaaagagaagagttgtttgtgtgaatctagccgaaaaacgaaccaatatcatagagctctcataaaacatagcatcttctcaatgcatgggcaatccatgtaaaatagtaatttactcaacattcaaaagtggatacaacactggtcatgcatatattattgacattcatagacatacttctccgacgaaattaaaatcatcaaagtaagtttggttgtcaatgaagttgaaccactcgtcgtactcattgttaggtgtggttgattcaaccagctgtctcctcaagtcggattcttcgtttgtgtcttcaaatccgcatgggatatccggttgaggatgatcaaatgattgcgatttggttacctctcgagtcatttcttgggttgaaatgtgagtttggtggttatgaagaagagagtctagcggaaataagatatcgttatcctgaagaaactcagaggttatatcatcaaagtcatcatggtcgagcaggaactggatctcgttgagtccattaacctcatgaagctctggttttgtgtgcatacactcgccttggtgatgtgacgaagtagctgagttttggctctcatttaaccctgaatgtatttcttcttgagccccgtcacagttcttgtcatgatctgcttttgtgctttggtcatgagtgctagagagggatgaagaagaagaagatggagtgagtcgtttcttgagatgcgtgttccacacgtttttgatctcgttgtcagttcttcccggcaagaaggacgcgatctttgaccacctgatgatcacatatatcaattagtctctacatactatatattgtcttattataaagaaattagatgaataggtagagtacaaacttgtttccaagggtttgatggtagtgaatgatagcatcttcctcctttttgctaaagttgcctcgcttcacgtccggtctcagatagtttatccatcttagtcggcaacttttcccacatctcaacaatcctatgtatatatatcaatcattatttctcttagttatttaaaactttatagtattaccgaaacatgcatgtgaataaatactaaccagcaagcttgggaagagatctccagttttgatggccatgtttttgaataaaagtgatgagagtgagatcttcttgagggctccatggccctctcttcactttgttcttgtcgcagcatggtgctcttcctttccccattcttattacactactttcttctctatagctaccttcactatatctttctctatatatgcaatgttatgtttttgattattatcaggagctcctatatatatatcattgatataacccggctctttacgtcagaagatgttttataattattagttagagattagattttccactccattcaataaaactcttatttatttgaggcacttcactcgtagagagagacccaaaagcatggaacgtacggaagttaacggcagattttaactagtaatctcttaaatttcttttgttactcatatgcccgtgtacagatcatagtgtccattaagtataattgtgtaaacaagttatgcatgattcattgacgagttacgaaaaatatgtatattaatttgagcatcacggaaatatttaaatagtttgatacatttcttgattattcagttttaaatattttatacaaaaagattttcgactttagattttgatatgagcgagtagaaatctagtatattgtaaactttagagcggttgtttgtgtgcgtgtgtgttaaagaccacaagggccatgccacaaacaaaagtaacaccaattggagaaataaatagaataaatctgtagactgtaatcctaattaattcagatcagtttattttttattaatcctgacacttattatttgacatttagttcagaaggagaattcaataatccttttctttagcctattaacttatttactcgtcttcgtatttcttataaaactcaacccacatcatcatcatcatcatctaagtttactcttatttactccttttatttacttcttaatcactttgtatctaatgtttaaggtttttacgcataaattaagaaaacacaagacattcatttaatttatctcttttacataaaaacatcattaagttcagttttcagacaataacaaaaacatgatgtaaaacataattagccaaaaaaattaagatattaacaaattgaaaacatcacttataatgaatcaagaacaaaatacccttaaaacatcacttaaattgatgtggagggaatattatttacttttttttgctatgaagttttaatacaaagaataatgaaagttcacatttctattagtaattagagaatactggtatatatagacattgcgttttaaactgaacataaatgacttatctttaaaacaccacttcataaaatttcaaaatatttatatctaacgtataaatgacttcataaatgacttatctttaaaacaccacttcagaacgcaaagttccttatttgaaagagaaaaataaaataaaagtttaaacacgaagttgtacatccaaatcatgatgtatgatgattaattttgtagttgtttagactataagttgtgatgattaaattatatattggtgttttccataaattaaaatatggcatggcatggttagacttcaaatccacgccacaaggctctgatgtaagattgcgcaaaaaaactaatgatcattccatccgtataatacatatgctatctactttatataaatacgtaagtatgcaattttatataggtttaatgcatgatgtacaaaaacatgaatacataatacatgaataccttttagcatacgttaggcaagcaagagtctcgtaactcttaccttttagtgaggttaaatgtaatatgaggtaatctaaagtgctaataaaatgtgtggaagtacgaataatatccatgcttccattcccaacttccaatcaaaatcagcatacgtacttcttttgtacgtacgtatacggatatatattataaacacattagggtcctatatatatatatataatatcttatacatacatatgaaataaatatcgataaaagagattggacataaggtaaagttttaaaacgtgacgtagcatgtgtgggtctaagtaaaaacttgtaatgattggcaatcacattatatatgtatcacatacgtctagatatatacaatagaaatagtttgtttatttgaagtggtcaacttgtatgacttaattcacattaaaaagtaaacaaaacaaaaaggaaattaagagcttgtgagtcactgtatgtttagcacttcttcctcgcgacgtcgtgttacttgtgcaattctacgtgtgcctgacttcaactctacacgtgttttgacaatggataattttgtccgtacgtaaaatatcgtccaccaactttattgtaattatgaatttatgaaaagtagaataatggagaatgaaagtcattagattctcgagattaagattaatctaaatgccgttctggatatatgcactgtgatttttaagaaaatctgttatttttcaacctttaaaacaatcagttggtaatttagcatgagaataaaaggataaagagttatcatcctcacattcaactcaaatcacagaataaggaagtgcttttcgaaagaaaagatttggatgacccgaaagctggacaaccaatatggaaaacgatttcgtattattagcatgacttctataattatagttatggcaggttctggcttggttcttaaggaaccgagcactagctagttgcttacacatgttcagaaatagtcgtctgtaatagcatctttatgatagtcttgaggttggatatggtagtgtgaaagaattggtccaaacgagaatgtcggagaatatggggctcttcgttttgttttgtcgaaggaaaaataaaaaatagtagcacaatataagattactggaaaaaagatggtcttgatctcctcgacataactagatagaaaacaagtttatatttcaaaagcaataaactacatagaaaacaacaacaatagacatagaaggtacaattttacaaagaatctatgcttgtgaagttttcgttgtaattttgttctgtttctgtttgtattgcgttgtgtttctgtaacttttagtcttatatattctttattctttgtaatttctgttaaaactgcaaaaatagtataaacacttacattgatgtcaaaaataataaaattgcaaaggatctcagtacatgtggctactcatgaagtaaatgtgtcttttggaatatgttatgtaaaatataccaagatgaaccaaaagactaccaatgaatcgtaagtacatgtggctactgtggatgtcaatttccgtatccggcccattgtgaggtctgggttctgtagagagcccatcaggaaggtcaagcccattaagaagcccgtcagttcaaaattcgattcgctattaattcaagtaacggaagaatcacgaattaaagacactaattaagttgctcgaggtggcggatcataacgtccgaagtaaatggagcgagattcccggcgagagatcagctcgacgtttaattcacgtgattcgaagtgcttgtataaatatgtttcgtttatgattgtagaaaaaaaaggggatttgacactgaaactatacagaaataaacaaacacttttccgattgatttttgttcgtttaacaagtcttaagatcctcgaaacacaaccacaaaattctgattgtggattccgacatccacagttaccatgaattagtatttcatattttatgctaatctagcagttaaaatttttattgtgattttattcaaactttggaagtttagaataaatcaattattttcattctgattctaacataattgtatattgtagatttcaatcgccgtgtggaccatggtgactttgacaatgcgaaacagagaagcactaatgtatggtttgggaatgcaataatcataatgtttttattactttcttgtagttcgattttgggaatttaatagcagaacataatttatttaattaaaaacatagaaaacgtaataaatgaggggtttgtaagatttttcttgttattcttatggtcataaaattcaccatccgattgatgaaccatgttcgaatcttttttttttttgtaagcaaaagttcgaatttgtatagtatggttttaatcatgattgattgttgtatatatctagattcataataaaaaaaactctaattattcacaatcacataaaattagctgtatgatcggtttctgatcctttgttagaaaatgaaaaaaataaatacaaaagctaataaatatgggtgactacgaatgtggttgtggaggtgaagtaacatgggatcatacatactccctgccacttacttatctggaaaaaaaaaaaaaaagagtggcacattttgtttttctgtgagcttatctattgattttgtgaggttatctattcccccaagtttgggaagaagctaatgatactgttgccatacttatgggaaacatcttgcggcggtttctccaaaccaaattcttcatgcatgtgttgatgaaaaccagaaaaataaaagccttaaatctcgattatttcacttatatatataatcccatcttcaaatagatctgataaaccaattagataaagaatatgtaatttacataactctgtttcccctatagctagcaagatactataagacactagaaacttcttaaatctcaaaagagatcgtgtaggtcatgtgactcgatcggcgagtccgagacggagagactccaagatgcgttcgaacacaagcacgtggcaagggatgcgaagcactccttgttgctcgtatccatactcttgagccgactgcttcagcaacgctacgaaaacggggtggttgagcagctccgcattcaccacgaaccgctccatctcgtggcctacgtaaacaggcacgtgcccctcgggaacccaagatttgtgtttctccttcttggtgcggccacgctgggattcagaccggaggaggctatactgtgttgagtccgcgacacgcgataaacggcggattagttgtttcatcgtccaaagaacctctaaagagccgagtagtgtgatttacaagaggcaagactcaagagagtgagaaggtcttataaatagagagacgagggtaaaactggaaaagtgttgtacttgctaggtacacttattaacatatatttttaattttgtgaattaaagtagacaagtccgattcaaaagaaaaaaagtccagtcataaatatatttatttcttggtttcgtggaaaagaggtcgtagcgctctgcatttgccgtggacaataggaaaagttgtgaaagagatgttgcgtggaaatgtatggtataattcataaatttaaatagataaatccagtctgaaatgtggttatatatttcaacggaacataaaagaattaggaaaagagaggcgtaaattgcgggggacgtacttggagtatacgaagcagggacagtacaaaaatatgtacaattccgtgactccgaatgtctcgtgcagtgtcaatttgtcactattcttttctctctttttacagatttttagaaaccatgcatgattaatgttcttttaaaaagttgttgcatggttgtttttattattgcaaacgtagtagaaggaagaacagtgtcaagtctattagtgcatgcggttatatataatccaaatgataaatacggatatagtactgctttctaaagatgagttagtgaaattaatgaattttgggggaaataaacgccgtactatggtccattcgtacagaatgacccaccaactgactttatatttcttccatttacgtgtcataccaataataccaacacgacttttcttctaaaattaaatgcatgtatctgttctttgaaatgatgattttcttattaggtactgcatagagaacaccactatttgcttcatagttcatacaacgttttaaagtgaagtttagtttggtaaaagttgcatttacatactcaataatttaacagacgttgtgctacttgcgagtaatcactactggtcaattaatatataactcttccggagttactcaaatagtgtgtatagatatatagcaaattagcaatggtttaaatgcgaaagcgtgggctgccccaactgtccagccgtacgctccatgctacggacactttgctttcaacttcgacatttatgtttcttatttaataccatgagaattttggatatgagtttgtcctcacacatcaaataaaaatcatttagacaatcatacaaccaaatcttatctaactgaatcaatttgaatacttgatcctaaaacattgttagctcgaagtctctagttaagttccatcattgttccataaacacaatcttgaaatcaaacatttcaccacggtgatctctaaaagtagaccactagtttgtgcctcgctcaaggccagtgaaatatctgttagttatgtagtcaaaatttcagtcggactttgataataatagccaagagagattgtcaagccagaattttataatgaataactaaataatatgagaagatttagttgttcgttacagacagctctctgcactaacagttctatttaactgacttgaacaacgaagaagacagattcttaatgagttcttgggccttaattattagtaatcgattaaaaaaaaaatagaatttctactgtgaaaatttcaatttatgagtttagtatcatcgatttcatattggaacattcatatgtttgtcgagtgaaatttttaaaagaaaataagactccgaaatattgagatcactgatacaagaaattaaatgtcctcatcaagttaagagaaaccaagagaaaaacctagagattcaacaaagttttccaacctgacactgataggtcatgaattgggcttgtgggctttatattgtttaaagcctgttattcttagtattgctttctatttaagtttgttgtcttgcttggtaaacgtttatcgattaagaactcaagaatgtttatcttcttcatcatctcctttcttcttcctttccttctctgatttcttcagcatctcaacctatttcttctattatctcatctcctttctgttactaaaattgataagcaccattaatttatatgaacgtttacataataattataacatatatttatacttaaccttatggatgtgcacaattatcaatgttgtattcacagctcaaaaccctatttgaccattctttcgacaaaattggctatgcagaattgtttttaggtgtaaggttttagctttgttttttggatgtataaggaggctaattttttattttttttacggtatattataatttatgacattgtacggtttcatagtttattcacatacataattagtaataaaaaatgttttactaaaaatgatattcaaaccaaaacatctaaacgtttattttggaaatcggtcattttatactcgacctaaatttaagtggtcaattcatacaatatttttcttttcttatgtgctaatatattcaaattatatatccaaatttaccaaatcatacaagattatacattctagttcattctactgatgtagatgccacatttttgattattttgatgacgtagttaccacgctcttgacgatgtccgtgtcacgtcctcatcaccttatttttttttgtttcttcacctttttcttcttatattttttattttttgtcttctttatcactattgctcgaggaagctgtaaaaatattatgtgtttgatgcatgtaaaaagactagaaaaattattttcgatactaatgagtaataaccattatttaaatgaaagaacaaaaatctaatagagtttatagtcaattcatcaagtcattcagataaacattgtattattgttttcgttagaaaagtagtaacggcaagaatgtttttaaaacatggtcaaacctattaacttgtatttgacgtccttgtccgaatcataactctatcgcgaaatggtcgtttagtattagcaattggattgcatcagacgtatgtatctttgcgaatattttatacaaagtggaagaaaagaaacacgtatgtattttggtttcaaaatgagacaactggctgatgtcattgatatgtcatatacggttcgattaatcaactctatttaacccggttccaccaaatcagcagtttaaaattgaaattcggaaataacacttgatcacctaattcattagtttaatactaatgattaacaagtaaacaacgactaatgataaaacggccagggctttccgacacactttttttgttttattcatttattggataactaaatacaggaaaaagcttacccacatggcgacattatttatcaaaaaaaagtaattaggctgttaaattctaaagttaaaaccatataatatacatttatttatacgcataacaagaacaaaaatggctagttggtttactctggatccctcccgactctctcacatctttggtcgtcgacgatgctgagattaattctctccttggtagtttggtttgtgttcatgtctggtttatttcatgtggttcgatcacagaaccgaaccactgccactactgatcctgacgaaggttctccaaacttgctaatttcgttttagatcatcatcgaccctttctttttttgttactttcattttcaaaaaaaaaaaaaaaactccttatagttcgaaagagacgatgatgatgatgacttataaatatcgggtttttttttttgagtttaaattttaacttttgattttttttgaaaaattggaaatgatttggcagctcgggcgttgaacaagatattcaggacgtggaagataacggcgacgaaagcatggaacataagcggcgaactatgcagcggagccgccatagacgacagtgtcagcatcgacaatttagctttcaatcctctcatcaaatgcgactgctcttttgtcgattccactatctgccgcatcgttgctctgtacgtctctcttttctctaactgccttccacctgttcgacgctttgcctcactcgaattcttgtgtctcacaggagagctcgtggtatggatgttgctggaccgattcctgatgatctctggactcttgtttacatctctaatctgtatgattcttcacttaaccaaggatttgcacttggaacacactcactcactcactcgattttccttctttttttttgcaggaacctaaatcagaatttcttgactggtcctctgtctcctggcattggaaatctcactcgaatgcagtggatgtatggcattgaacccctttaatcttcttatccccagacaagcttatatcttatgtgactttgtgagcaaatttttatttcttaggacttttggggccaatgcattgtccggaccagttcccaaagaaattggactgcttactgatttaagatcattgtaaggacttcgagacattttcaactgtctggttatttttcgcagatagattctaatgtcttttcccttatttttgagctcagagcgattgatatgaataatttctccggttctctaccacctgagattggaaattgcacgaggctagtgaaaatgtaagtgtttgcaatgctttgctcatcatactcaatgtaactttgctctaaaactgtggtgacatttagtattgcttgcatcaacacttgaacagactaaatgtccatacactgaagtacttctgagatgcatcaagtttattgtttctcatattttatgacaggtacattggaagttcaggacttagtggtgaaattccttcatcgtttgctaattttgtgaacttggaagaagcgtaagagttatatctattataatctcgtgggttgttattgtatctggctattcatttagaaacacgaagcatacttctaattgttcataagttttggattgacttttttttttttcattttgtttcagttggatcaatgatatccgacttacaggtcagataccagactttataggaaattggacaaaacttactaccttgtaagaagttttcatattgcagcgcttcaaaactttctttctttctttcttttacgctttcgcttatcaacgtatagagtaacggttaacaatcaacacttgatataccacactatatattgaaacatgctttaccgcaggagaattctggggactagtttgagtggtccaattccatctacatttgcgaacttaatctcattgacagaattgtaagtgctggatatatgttcttttatccttcacttttctacttgttctttgtctcgatactgactgaaatccacaatgcaggagattaggtgaaataagtaatatcagttcttctcttcaattcatccgagaaatgaaatctataagtgtcctgtaaggaatcctgttcagcttttgcctaatcttgatgaacttctgaactcctttagctgttccctttcctctgtttttttgacattttttaaataccatgcagagtattaaggaacaataatctcacaggcacaataccttccaatattggagattacttggggctacgacaactgtaagtatgagacaagatggcacaaaattttgttccagatcttaagatgctccaaaacgttatcctatgtcttatttgttactaaactgagatgatatcctatgtcaatggctttaataattacaagcaatattctttatttgttctccagtgatttgagtttcaacaagctaactgggcaaattccagctccgcttttcaactcaagacagcttactcacttgtaagaatatatttattttttccatcacatgctcttattcaagattcgcagactaagtgaacagaattatcattaccttcattcaggtttcttggaaataacaggctgaatggttccttacccactcaaaagagtccctctcttagcaatatgtgagtaacagatatatgtagaggaatgtttctccctctgggtaatatgcatcgaaatgttaataaaattcgaaggaatgtttctccctctgggtaatatgtattgacaaaattgtcaatataattcaaagtgctttatctgcagagatgtgtcatacaatgatttaacaggggatcttccttcttgggttcgcctaccaaacttgcaactgtaagttcgagaaccatgtgcttaaatttcatggcacataatacattgttttttgctgataaaaagtttcctcttacgtgtgtgtattattattctacagtaacctgattgccaaccactttaccgtgggaggttctaacagaaggtgacttcgtgaatcttgtgctctttttggtgcctggagttctactctatttctatttcagacgcatacaactgttagtctacatgccatattcctcattttagtaccttttgttttttctataagggctttaccccgactggactgcctccagaaggatttccgctgcaatcgaggaaaaggagtatgtaagtgcatctaaatggtgttttgaaaactgatttcattattagcattgtgaataccacatattactcaacatgttggttaacatgcttctcttttaatggttgtccagatttcaactttttcgtcaattgtggaggccgggatatcaggtctagtagtggagctttgtatgaaaaggacgagggggcacttggaccagctacttttttcgtaagtaaaacgcagagatgggcagtcagcaatgtaggactatttactgggagtaacagtaatcaatacatagctctttcggcaacgcaatttgcaaacacgtcagactcagagcttttccaatcagcgagactctctgcatcttctttaaggtattacggactggggctagaaaatggaggctatagtgtaacggttcagtttgctgagatacaaatacaaggttctaatacctggaaaagtcttggaaggcgaattttcgacatatatgtccaggtctctactattcttaccaatattaacttcgtcttctctgtgaattagttattttggttttgtgaactaggtccgtactctgtagtaactattttgaactagagagagaagatccttgataagctttggcatacaagagatcctttttctattagagtatctggtacaaggttgtagcacatatttcgttcaagtgggggtgaaaattagatgcatcgttttaaggctcaactcttcatgaacgatattctctactctcaaaaatggtttctgacctctgagttccttttgtttctcagggaaaacttgttgagaaggattttgacatgcaaaaagctgctaacggttctagtatccgagttattcaaagagtctataaagcaaatgtatcagaaaattaccttgaagttcatcttttctgggctggaaaagggacctgctgtattcctgctcaaggcacttatgggccattagtctcagctatcagtgcaactccaggtatacatacagcagaaactttcatgatcttcgtagagtccaatgtatcttctaactagcggcttttattctctgcagatttcatacctactgtaaaaaataagttgccctcgaaatccaagaaaaacattgttatcattgtaggggctattgtaggagcagggatgttatgtatattggtgattgctatcctcttattcatccgtaggaaaagaaaaagggcggctgatgaagaaggtaaatgaaaagtcttagctgtggcagttttattaaagtctaatcgttaacaactgtaaccttctaagtggtatttatcaaatatttctcaaatgcagtgctaaacagtctgcacataaggccctacacctttagttactcagaactcagaactgcaactcaagattttgatccttccaacaagcttggggagggaggatttggacctgtttttaaggtaagaccgtacacagaatgtgtaccaatattgggagtctagtgtactagaaagttatgtaaaattttacattatctatattctaaaaatattcattggtacagggaaaactgaacgacggaagagagatagccgtgaagcaattgtcagttgcatccaggcaaggaaagggtcaatttgttgcggagattgccactatatcagctgttcagcatcgcaaccttgtaaaattgtatggatgctgcattgagggaaatcagcgcatgcttgtatatgaatacctctcaaacaagagtctagatcaagctctattcggtaagtgcatgagatcttacatgtgttatccttgtaaaaaaaacaaatgctgttaccttacatgttgcgtgactgtggcagaggaaaagagtttgcagcttggttggtcacagcgtttcgagatatgcttgggagtagcaaaaggtttagcatatatgcatgaggagtcaaatccccgtatagtgcatagggatgtgaaggcaagcaatattcttctggactcggatctggtcccgaaactctcagattttgggttggccaaactatatgatgataagaagacccacataagtacccgagttgcagggacgatgtaaatatcctgaaaacctcacattggatgtggtttgtcaaatgggctaaaacttaccgttgttaaatgttatattgcagcggatatctgtcaccagagtacgtgatgcttggacatcttacggagaagacggatgtgtttgcctttggtatagtggccttggaaattgtcagcggaaggcctaactcctctccagaattagatgatgacaaacaataccttctcgaatgggtatatatctaacttttcctacaaacacatcctttttaattccaaatttggtgaataatttggtctttgcaggcatggagcctacaccaagagcagcgtgatatggaagtagtagatccggatctgacagaatttgacaaggaagaagtgaaacgtgtaataggagtagcgttcttgtgcacacaaacagatcatgcaatacgaccaactatgtcccgagtggtaggtatgttgaccggtgatgtggagataacggaagccaatgccaagccagggtacgtctctgagagaacatttgagaatgcaatgagcttcatgagtggttcaacgagctcgagctggatattgcctgaaactccaaaagattcttccaagtcccaagttgaagaacatggacgacgacattgaaacttgaaaacttgtggtttttctattttttgttcttacataaaaaaaaagaagtcaatatagaaatcgttgttggtaaataacacatatacatattcgtttgaccaaaattggatttgactgtttctcctgaaagttgtgtttggtcccatttttaacattaaaatcccttaaaaccatcattggcatttagtatcaaagtccaaaggtggtgatgcttcttgcactcgtaggcagcagccgccattgttgaaatctcccgttgacaacgcagcggaatctcggtttaagcgcgtccacttcacggcttgtggatgcatcgcgtgagacgcactgctccgcgtagttggttagaccattaattaaattcaaattaagccaaatgaaaagtatctcttcaaagtccaacataaacaccatttttgaaccaaattaaaaccttctccgtctagttttggcggctatcatcttcttctccgtttaattttagtttccgacgatgctcaggctatggcggtatctgtgtctactcctcactgtctggttcttgtgtaatttcggtccggtttacgtggttcgagctcaaaatcgaacaggagccaccacacatcccgacgaaggtctgtcttcttcttctttgaacaacttgacaagttcaaattcaatcgatcggattgaagactgtgtagctaggtcttaagctactcttctgatcctaattgataaaaccgatgtttacatttataatatttttttattttatcctaagaagtttaccggtttagtttcaattgacattttttgtttagttaatcgtattttgttaagagctaataataattgactgttgtaaataaaaacagcgctagctttgaactcaattttcgcggcttggaggattcgggcgccgagggaatggaacatcagcggcgaactttgctccggcgccgctatcgacgccagtgttctcgactcaaaccctgcctacaatcctctcatcaaatgcgactgcagtttcgaaaactccacaatctgccgcattaccaacatgtagggcctctttcccccttttttctgcaccccatttgttcgacgtattctcccactgggaattgacttttgtgggggaaacgaatggttttcaatttcatgtctcaaattcttctcctcatttttggatgttgttgatgttttcacagcaaggtttatgcgatggaagttgtaggatctatacctcaacaactctggaccttggaatacctgacaaatctgtatggttttactatcacttgatgattatacaatttcagctacaaaaggagcacacattttcacaatttaaaatcacttctttcaggaacttgggtcaaaatgttctcactggctcacttcctcctgcacttggaaatttgactcgaatgcgatggatgtatgtctctgacaccttctttttttcttattgtttgtggtgaatgtctacacctttcattgataatgcacccttataggaacatttcttgtttctcactctcaattgtttatcacgtaggacttttgggatcaatgcgttgtctggccctattcctaaagaaatcggtttgcttacagatttaagattactgtaagcttaggctgcttcttcattgtttaaatatgatagtgtcttcacattgcttctggaggattctgacggttccttatacactatatatatttctgcagtagtattagttcaaataacttttcgggttctataccagatgagattgggagatgtacaaaactacaacagatgtgagttttctgtcaatctataagtgtttatgtctttatatccttggttataatttagatatgattaaatattaacctttgaaatcatttagcgatcaccgacctcaaaattctagcgcagttgatgactgatgggaaatttcttccatctattgcagatacatagatagttcgggactcagcgggggattacctgtatcatttgctaatcttgtggagctggaacaagcgtaagacatattgaagtcgaatataagctttattgtttaactttagttgcatcttatttttgtaatctatttattactttacaatttagtcttttttgccgtgatgtgattgtttccttaatgtggtaccagttggattgcggatatggaacttacaggtcagataccagactttataggagattggaccaaacttactaccttgtaagaagttttcatttttacggttatataataggctggttccattgatctttttttttaaccagtcttttttacatttaaatttgggatttaacggctggtacgtgttttactgcaggagaattcttggaactggtttgagtggtccgataccggcgtcgttttcaaacttaacttctttgacagagctgtatgtgttgcattgttgtcataatcattatcgttttactgttgctcttcctttccttttctccacatattcatatactatatgtaggaggcttggtgatatatccaatggaaattcttctcttgaattcatcaaagacatgaaatctctaagtatattgtaaggcagtttcaacttgaacttctaggaattgatctggttctctcctccctgtatttaacatttgtaatatatgtggcagagtattgaggaacaataatctcactgggacaataccgtctaatattggagaatattcaagtttgcgacaactgtacgtatatatgtcaatttgtttcttcaaatgctctagcagctttttcaggggttttttgtttgtaaaaagagtgagatgatttgtgaaagtcacgagaaattacgaattgatcctatatttctgattatataatttcttatttttcctcatttattgcttaacaggaatggtttgacgttttaccatgtaattcatgtctgttttccagtgatttgagcttcaacaaactacatggaacaattccggcttcacttttcaacttaagacagcttactcacttgtaagatgatatgttttctacttttggatctttatgtacagcgacccggattattgtgaaaaaataactgttgtcttcatattaggtttctggggaacaacacgttgaatggctcattgcccactcaaaaggggcagtctctgagcaatgtgtaagtaacaaaatcctttataatttttccatctttaaaagccatgtcccctagtttcttggacggttgttaactgatatatactcaagtttcgtacactttttactctgcatttattcaagtcgaataagaattccactcttggtgacacaaatgacatgccaagataattaggaaactattttggtaacatattctggcgatcctaattagtgttcttctatgcttacagagatgtgtcatacaatgatttgtctggaagtcttccgtcatgggtcagtttaccaaacttgaatctgtaagtaaacaaaacactatatcacgacttatattaacagtgttttacattcagaaatttccccacatgtatattcattagacttcttcatatccagcatgaagcttcctttttgtatgaaattatttattataatcatgttagagagaataatattaaactaaactgtatgttctttgtgcagcaacttagttgctaacaacttcacattggaaggtcttgacaacaggtgactttttaattaatgttcttgttagggcttgaaattgctttccctttgtttctcttttctcttttttatttgttgcttgcaaatagtttaatcatatgtttaatttctttctgtaaaaagggttttatcaggactgaactgcctgcagaagaacttcccatgcaatcgagggaaaggaatatgtaagtgtaacagcaatatccgcttcttgagcaaatgttggaaaaaaatccgctaaattttttctctttacactggtgtctagattctgacttctcaatcaactgcggaggcccagagataagatctgtaactgaagcagtatttgagagggaggacgaggatcttggaccagcttcatttgtcgtgagtgctggtcagagatgggcagccagtagtgtaggactttttgccggaagtagcaacaatatatacatatctacttcacaatcacaatttgtcaacactttggactcagagctatttcagtcagcaagactttctgcatcttccctaaggtattatgggttgggtctagaaaatggaggctataccgtcacacttcagtttgctgaaatacaaattctaggttctacttccaacacttggagaggtttaggaagacgacgttttgacatttatgtccaggtctgcactacttgaccgagctttctgctttacaaattaaattttggtgtaattatctgcttccgacttttgattctgatgaattctaagactagctcactttttccagggaagacttgttgaaaaggacttcgatgtacgcagaacagctggtgactccactgttcgagcagttcagagagaatataaagcaaatgtatcacaaaatcatctcgaaattcatcttttctgggctggaaaaggaacatgctgtattcctatccaaggggcttatgggccattaatatcggccgtcggtgcaacaccaggtaaataaatggtgaattcttcttgttttacaccatctcctgatgctagttagtgcttaagtgttacatatttctgttcagatttcacaccaactgtgggtaataggccaccatcaaagggaaagagcatgactggtactattgtgggtgtcattgttggcgttggacttttgagcatcatttctggtgtggttatctttatcatccgaaaaagaagaaagcggtacacagatgatgaaggtatagatgtaaaaagctcttgaactgtagaattttggccctctgattaaaaattagttatatatcatctctcatattggtcgattttaagaaccgaattgtttctggcagagatacttagtatggacgttaagccttacaccttcacttactcggaacttaaaagtgcaactcaagattttgatccctcaaacaagcttggagagggaggatttggccctgtttataaggtaagtccctactgaaatttgtacatatttgagatattaggaaagaagagtatatgtgtactatcttttgttttgatattaccttttgttttgacaatatcatttattgaataatgcattcaacagggaaaactcaatgatggaagagaggtagcagtgaagctattgtcggtgggatcccgacaagggaagggacaatttgttgcagaaattgtagcaatttctgcagtccaacatcgcaacttagtaaaactttatgggtgctgctatgaaggagagcatcgtttgcttgtatatgaataccttcctaacggaagtcttgatcaggctctatttggtacgcacagaagcatgtttatcgatccatgcttctgccaggctaaaatcactcattatgtacatgtcattggtttgaatgttgcaggggaaaagactttgcatcttgattggtcaacccgttatgagatatgcctgggagtagccagaggtctagtctatctccatgaggaggcaaggcttcgcatagtacacagggatgtgaaggccagcaacattttgcttgactctaaattagtaccaaaagtttctgattttgggcttgcaaaactgtacgatgacaagaaaacccacataagtacccgggttgcagggacaatgtaagtaactcccaaccctgacctctggtttgcaacacaactatggatttataacacatgttggtgattttactgtatcaatgcagtgggtatcttgcgccagagtatgccatgcgtggacatctaacagagaaaacggatgtatatgcctttggtgttgtggctcttgagctagtgagtggaaggccaaactctgatgagaacttggaggatgaaaaaagatatcttcttgaatgggtacgtccatacttcaacactttttgataatgaacacaacttcaatgtatgtgaccatgagaggctaatctgggttatgccctttagcaaaagctgatattgattgtgtaacttgttcacaggcatggaatctacacgagaaaggccgtgaagttgaacttattgatcatcagctgactgaattcaacatggaagaagggaaacgcatgattggcatagccctgctgtgtacacaaacatctcatgccttgagaccaccaatgtcacgagtggtggccatgctttcaggagatgttgaggtcagtgatgtcacttcaaagccaggctacctaaccgactggagatttgatgacaccacagcctcctcaatcagcggctttccattaagaaacacacaggcttctgaatccttcacgagctttgtggcgcctagatccgagatatcaccgagaaacaacgacgctaggccaatgcttggagcccagatgaatgagggaagatgacaaagaccctatatggtggctatagatatagtcatatagagattatgtttgtgtatatgaggttcactttattcttcttggattggaaaaactctagatttcactttggttaaataataataatattttagctcctctgacttccacaagcggtcgtgatgggccacgtactattcacgtcctcaaccaaatcaatgccgtctcttttacagtgtaactgtgttggtttccaaatgaaggaagttattaagaacacttttcatgagtggttcaacgagctcgaaccggatatgacctgagattctaaagaatatttatgagtcccaagtcggagatggacgacgatttgaaacttgaaacgtgtgcttttgtttttatattttggtgtttgtcttacattattaaaagtcaataaagaaatggttcaggcaatttaagcaagccatgttgatcaattacataatcttataaacgtcacattgagattgtgttctgttgaattgaatgtttttggtctaattggtgatgtttattacggacgactcgcagcgcagccgccaccgtcgttgacacagcaggtgcactcctcggtccacgcacgtgagcttacacgccctcgctatcgggacaagaccattaattaattcaaattagcaaatgcatctcttagtttggtaacggcaattgttatagtatttaaactgaaatcataaatgaaccaaaagcttagacctctcaactaaattttgcaaagagcagaaataaactctttctaaaaagcatttgtgttttttaaccaaaagcaaaaccaccgtcgtcgatgaccaggatacggaggtctccgtgtctactactcctcattatctggttcatgtgtattgccggttcggttcaggtggttcaatctcaaaaccaaaccggagccactactcatcccgacgaaggtttgtctttaatctaacacttacaaagagttcaatcaccaataatcaattggattgtatagattatagtcttatactagttattcggatccaaattgattagaaacaaaaaatacaccatgaattgtatccacaaattccaaaataataagatacttaccggttagtttctgttaataattgaccggttatattaatttgaccgttgtgattgattgtggatacaacagcgcgagctttgaactcaattttcgcggcttggaagatccaggcgccgagagaatggaacatcagcggcgaactttgctccggcgccgctatcgacgccagtgtactcgacagcaaccctgcctacaatcctctcatcaaatgcgactgtagtttccaaaactccacaatctgccgcatcactaacatgtacgccctttttgtgcaccccatgtgttcgacgtattcccccactgggacttgacttttctttatacaaatcatttttaatttcatgtggtaactatgcttcagctatgtcacgtctcaaattcttctccttgttgttgccacagcaaggtttatgcgatagatgttgtaggacctatccctccagagctctggactttaacatacctcaccaatctgtatggtttttactattacttgatgattatatagattaagctacaagaaaaagagcacaaattttcacaaatcaaaatcacttctttcaggaacttgggtcaaaatgttctcactggctcacttcctcctgcaattggaaatctgactcgaatgcaatggatgtatgtctctgacaacttctttgtcttattgttgtcgtgatgattttctacaacaatttcttgtctctcacgcttaactgtttttaatatgtaggacttttgggatcaatgcgttgtctggccctgttcctaaggaaattggtttgcttacagatttaagattactgtaagcttatggatgcttcttcattgttttaatataattgtctcttcacaatgtttctgaaagatcttgacggttccttatacatatgtatatctttttgcagtggtattagttcaaataacttttccggttctataccagatgagattgggagatgtacaaaactacaacagatgtgagtctatctgttaaatcggcaagcgttttatgtatttatttcctggttataacttagataggaaatcttaacctcagtaatcatctagtgtttaccgaccacaacattcttgtgtaattacctttttaaagaatttcttccatcttttgaaggtacatagatagttctggactcagcgggagaatacctttatcatttgctaacctcgtgcagctggaacaagcgtaagatatactgaattcgaggataagctttattgttgggtttgtaccatctatttattactttacgttttaatctcaatgttgtaccagttggatcgcggatctggaagttacagatcagataccagactttataggagattggaccaaacttactaccttgtaagaagattttcatttttacgggacttatattggatttgttacattcatcttgttttaatatagtctgtattaattttcctcttagtagaacactcttctttatgttttaatttgggattcaacgattggtacatgttttactgcaggagaattattggaactggtctgagtggtccgataccttcgtcattttccaacttgacttcgttgacagaattgtatgtgttgcattggtatcagaatcatgattatttactgttactttctctttccctttcctcacatattcatattcaatatgtaggaggcttggtgatatatccagtggaagctcttctcttgatttcatcaaagacatgaaatctcttagtgtattgtaaggcagctttgattcaacttccgctccaatttatgatcagatttttgtagtgttgaactgtttctctctcctccgtgtatttaacatttatgatatatgtcgcagagttttgaggaacaacaatctcactgggacaataccgtctactattggagaacactcaagtttgcgacaagtgtaagtacatatgtcaatctgtttcttcaaatgctctgaaagctgtttcagggtctttccctgtaaaaaatgtgagatcatcactgtcaaaagtcaccgtgagaatacgaaatcatcccatattgatgatttgtaaaagtccccgagaaaatacaaaacaatcttaaattgttgttaattgctgatcgtctaaacaggaatggtttaatgttataacatgtaatgcatgtctgttagcaaacaagtgtaagtaactcgtgtctggtttccagtgatttaagcttcaacaaactacatggaccaattccggcttcacttttcaacttaagtcagcttactcacttgtaagatgatgtgttttctgcttctcttgggtcttaataagttaatacacaactacatgggtagtatttttataaaaattgttgtcttttcatattaggtttctgggaaacaacacgttgaatggctcctttcccactcaaaagacgcagtctctgagaaatgtgtgagtaacaaaattttttataattgtttcatcctgatgtagactcaagtttcatactgacgttgaaataggttccactcttggttacgcggataacttcgccagataatcaggaaacaattttgggacatattacatattatgtgtattcctaattattgttcttttatgctcacagagatgtgtcgtacaatgatttgtctggaagtcttccttcatgggtcagcttaccaagcttgaaactgtaagtaaacaaaacaccatatccaacctatattcacagaaaatttctcatatgtatattcactaggcttcttcatatccagcatgatagttattataatctgtattaaacaaaactgtatgatatttctgcagcaacctagttgctaacaacttcacattagaaggtcttgacaacaggtgattatcttaaatatgttcttgttggtgattgaaacgcctatatgtttctcttttctttctttttattttcctccaaaaggatgcaagatttaatgaatctttctttaatcatttttcttttgttaaaagggttttaccaggactgaactgcctgcagaaaaacttcccctgcaatcgaggcaaaggaatctgtaagtgtaacaatgagatatcctcataactgttattctccatgtgtactgagcaaactcatgggtagttggaaatgtttttgtttaatttcgctattgattggtgtctagattctgacttttcaatcaactgcggaggcccagagaaaagatctgtaactggagcactatttgagagggaggatgaggattttggaccagcttcatttttcgtgagtgctggtcagagatgggcagctagtagtgtaggactttttgccggaagtagcaacaatatatacatagctacttcacaatcacaatttgtcaacactttggactcagagctatttcaatcagcaagactttctgcatcttccgtaaggtattatgggttggggctagaaaatggaggatatacagtaacccttcagtttgctgaaatacaaattctaggttctacttctaccacttggaaaggtttgggacgacgacgttttgacatttatgtccaggtctgcactacttgatcaagctttccgctttacaagttaactatttggtgttatccatttccaaatttggtgatggattctgacatgtagctccgtttttccagggaagacttgttgaaaaggattttgatgtacgtagaacagctggtgactctactgttagagcagttcagagagtatataaggcaaatgtatcagaaaatcacctcgaagttcatcttttctgggctgggaaaggaacatgttgtatacctatccaaggggcttatggaccattaatatcagcagtcagtgcaacaccaggtaacacaaatggcgaattctttcttctccctaattttcactatcttttgatgctacttagtgcctaagagatggtgtaacatattcatgttcagatttcacaccaactgtggcgaataagccaccatcaaaaggaaagaacaggactggtactattgtgggcgtcattgttggcgtaggacttttgagcatccttgcgggtgtggtcatgtttactatccgaaaaagaagaaaacggtacacagatgatgaaggtatgtaatcagaatacaaacaagcccttgagctgaagaattttggccctaaaattagacctgactatcattttttaaattggttaatttataaccgaatcgttttttgcagagctacttggtatggacgtaaagccttacatctttacttattcggaacttaaaagtgcaactcaagattttgatccctcaaacaagcttggagaggggggatttgggcctgtttataaggtaaggtacccataccgaaatggacgacatatctgatatctgtatattcttagatatactaggaaagaagagtgtctgtttatacgttttgttttgaaaaacacattcaatagggaaaccttaatgatggaagagtggtcgcggtgaagctattgtcggtgggatcccgtcaagggaagggacaatttgttgcagaaattgtagcaatttcttcagttctacatcgcaacctagtaaaactttatgggtgctgctttgaaggagagcatcgtatgctcgtatatgagtatctacctaatggaagtcttgatcaggcgctatttggtaatgaacagaaacatgacttatctatcactgcttctgcgaaccttaagtactcatttatgcccttggtttgcatgtttcaggggataagaccttacatcttgattggtcaacccgttatgagatatgcctgggagtagccagaggtctagtttatctccacgaggaggcgagtgttcgcatagtacacagggatgtgaaggccagtaacattttgctcgactctagactggtcccacaaatttctgattttggacttgcaaaactgtacgatgacaagaaaacccacataagtacccgagtggcagggacgatgtaagtaatccacaaactctgacctttggtttgcatcacaattacaaattagtgagacatgttagtgatgttgctgtatcaatgcagtgggtatcttgcgccagagtatgccatgcgtggacatctaacagagaaaacggatgtgtatgcctttggtgttgtggctcttgagctagtgagtggaaggccaaactctgatgagaatctggaggaggaaaaaaaatatcttcttgaatgggtacgttcttgcttattatgattgattgtaaatggatggagtttagaatggcaaaagccaataatacttgtgtattttctgtatacaggcatggaatttacacgagaaaagccgtgacattgaactaatcgatgataagctgactgatttcaacatggaagaagcaaagcgcatgattggcattgctctgttgtgcacacagacatctcatgccttgaggccaccaatgtcacgagtggtggccatgctttcaggagatgttgagatcggtgatgtcacttctaagccaggctacgtaagcgactggagatttgatgacaccacaggctcatctctcagcggatttcaaatcaaagacacaacaggctattccatgagccttgtggcgcctggctccgagatatcacccagagacagcgactttaagccaatgcttggatccaagatcaatgagggaagatgacaatgtatcatctacgatttatggctatagagatgtttgtatatatgtaagatgacaattttgtacaaaaaaaaaaagggattgacaattttcatctttgattgggaaaaacagatttcactttgattcgataataataatttagtagttagaagttgaaattgatctttaaccgttagtgatgggcctcgcattattcatgtacttagccaaatcaatgcagtctctgaaggtgactgactctgtagtatattcatgtgttgtaatgttttatttgggagtcaaaaatgaaataatctctgtactactttcatgagtgggggttccaggagctctaactggattttcaaagctgcaattcaaatatgtatgcttatgtcatgaagatgtagacgtcacatgagcaaagatcgtgtaaataagtgggggagaaaaccagagctaagcatattggatactttacagtcctagtgtaaatgaagttttgtattgaaagtctattagtgttgaatcaggacgaaacacttgaagctcctctccaaattatgatcagaaacagaaacatatcagttcaggtcttcaaatgatctatatatgtacctctaactcaaaagatcatagcattgctccagcatcagtttctcttgtgcggccctccatcgatctgctaatggaagatattaggttattacacactagtttaatacacgatttatcatgtcacgtttgtcctcaaaacctaccgtgggagaaacgtaattaactattcactgttgaaatgatagcatcagtgactgcttctgcattcttaagcttattccagtttccaagcggttccactgaggatcccaagccggatcagagctcaagaaatctccaaatgatgttgagatacaacaaaaagggaatcaagaaaagacctcaacgtttagccatgcatgcatggacgactctcattacggtacgtttaactaatcgaacattgcttgtatatcgaaactcttaactatgcgtttacttaaaataaaaataaaatacttctttgattcaataaaaatattttagtagctctaagttggacttggagtggatctctaaccggtcgtgatggggctcgcactattcatgtcgttttaagtctttaaccaaatcaaccggtgcagtctctaaaggtgattgactcttccgtagcaacttcttccttccttgatatgtaatcatgtgttatgtcttggaattcaaaaggaaataatgattaagatcactttcatgagtgggttccacgagcactaaatggatattggcatatctaaaggagacttaccaaataatccttaagtctcaagtcccctttttatcaaaaaagaagaaaaaaatctcaagtggttgaaaatggacgacgacttgaaactcgaagtttcgtttatagtcaatcttacattgttgatcagttacactaattctcttggctgtgtgtcaacaagtgggaagatttcatagtaagtcttctctcatagtactagtaattaagtcttctctctgctatagagtgtggagactaaaaaaagaagaagacaacattgtttttatattattatgtgaagtagtgtagtggtgaagaaggaagaattttccaactctacgaaccatagcaatcatagcctgatagccattaacgtctctatacagagaaaacagagagcccattcgctgatcggcaaatctctttataaacacactcatagtggtcttgtttttctgaaccaaagttatatctgttgaaatgctcaggctacgtagatctctgtttctgctcctaaccgtttggttcttgtgttgttccggtttggttcacgtgatggttcgagcccaaaaccgaaccagacccactactcatcccgacgatggtctgtcttttcaacacttgacaaaagtttagtcaccaattatcgactggatttgtagtttgtaatagctagcttcttctttgtaataaaccccactaacgaaaaaacaaataaaatgcatcttgtcaatagaatgagtttcttagttcagttaatatatagtttcaattaattaatactagttgtttagttaagcgtaatagattaaggggtgctaataataatttgaccgttgtgaattatgttggataaaaacagcgcgagctttgaactccatcttcgcggcttggaagattcgggcgccgagggaatggaacatcagcggcgaactttgctccggcgtcgccatcgacgccagtgtactcgactcaaaccatgcctacaatcctctcatcaaatgcgactgtagtttccaaaactccacaatctgccgcataaataacatgttacacctctttcccactttttatgcactccatatgttcgacgaattctcccactgagtctcaattttgtttgttgttgtctcagaaaggtttatgcgatagatgttgtaggacctatacctccagagctctggaccttaacatacctcaccaatctgtatagttccatacaacccacttacccactttttatattcacaagtatatatatgttgagactcttaactgatccaatggtcatcaaaaacacacatctttcaggaacctaggtcaaaattatctcacaggctcactgtctcctgctattgggaatttgactcggatgcagtggatgtaaaagcctctgaaaccttgtttctttttcttttttgataattttatacaagttcaattaacaattgtttgtctcccatgctcaaatgtaggacttttggaatcaacgcgttgtctggccctattcctaaggaaatcggtttgcttacggatttaagattactgtaagctttggctgcttcctcattatctatatttgaacatgtcttcactctgcttatggagaggatttgatggttctttatagctatatatattttctgcagtggtattagttcaaataacttttccggttccttaccagctgagattgggagttgtacaaaactacagcaaatgtgagtctatctgtcaaatccataagtgcttatgttattgactagttataatttagatatgaaaccttaacgtctgaaactctttagtgttcgtcgaccacaaaagtcttgtgcatctgttattcttaaaaatttcttacatctattacaggtacatcgatagttctggactcagcggaggaatacctttatcatttgctaattttgtggagttggaagtcgcgtaagatataatttttataatctacttactactttacattttagttttttgcgttggggtgattgtttccttaatgttgtaccagttggattatggatgtggaacttacaggtcggataccagactttataggattctggaccaaacttactaccttgtaaggagatttcatttatacggagtaatatagtggaataattcttcattgtatctaaattgggaatatacgactggtacaatttactgcaggaggatcctcggaactggtttgagcggcccaataccgtcgtcattttccaacttaattgctttgacagaactgtatgtgttaaattgtgtcagaatcattattgtttactgtttctctatctttccttttgtccacatattcatattctatatgtaggaggcttggtgatatatccaatggaagctcttctcttgatttcatcaaagacatgaaatctctaagtgtattgtaaggcagctttgattcaactcctcctccaatttatgatcagattaatgtactgttgagctgtttctatctcctcctgtatttagcaattatgatatttgttgcagagtattgaggaacaacaatctcactgggacaataccgtctactattggaggatacacaagtttgcaacaagtgtaagtacatatgtcagtgtttttcttcacatgctctgaaagctgtttcagggtcaaaaagagtgagatgatttgtgaaagtcacagaaagaacacgaaatgatcttaaactgctgataatataatttcgtatacttcctcattcattagaaaacagaaattgtttcatgttttaccgtttaattcatgtttgtcttccagtgatttgagcttcaacaaattacatggaccaattccggcttcacttttcaacttaagtcgacttactcacttgtaagatactaagatgatatgttttctgcttcttttgggtcttactatataactacacggatcattttataaaaaaaaatcgtttgtcttttcatattaggtttctgggaaacaacacgttgaatggatccttgcccactctaaaggggcagtctctgagcaatttgtgagtaacgaaatcctttataatttttccatctttaaaagccacaacgtttcttggacggtttgttgacagatcctcctaatatggctcgtacactatttacggggcacttattcaagttgaataaggttccactcctggtgacacagataacttgccaagatattaagaaactgttttggacatataatatagtcggtagatcctaactgtatttttcttttatgctgacagagatgtgtcgtacaatgatttgtctggaagtcttccttcatgggtcagcttaccagatttgaagctgtaagtaaagaaaaacattatatctcaacttatcttcagagcctttttaaaatttcagaatttttcccacatgcatattcattaggcctcttcatatgcagcatgagacttcctctttgtcgtaaaagtttattataatcacttgttagggaataataaacagaagcgtttgttatatgtgcagcaatctagttgctaacaacttcacactggaaggtcttgacaacaggtgagtttttgtatatatttctattcttttcctacaaaaggatgcaagcataaacgatttatcatttctttcttaaatctttttttgttgttaaaagggttttatcaggactacattgcctgcagaagaacttcccctgcaatcgaggcgaaggaatctgtaagtgtaacaaaaagataccctcacaaattatgttctccatgttgaatgtgcaaacatatggacagggctccaatgtcttattggaaaaaaattgttttaagactttcgctattgactggtgtctagattataacttttcgatcaactgcggaggcccagagataaggtctgttagtggagcactatttgaaaaggaggacgcggatcttggaccagcttcgtttgttgtgagtgctgcaaagagatgggcagccagtagtgtaggaaattttgctggcagtagcaacaatatatacatagctacttcactagcacaatttatcaacactatggactcagagctttttcagtcagcacgactttctgcatcttccctaaggtattatgggttggggctagaaaatggagggtacaccgtaacacttcagtttgctgaagtacaaattgaaggttctaactcttggaaaggtattggaagacgacgttttaacatttatgtccaggtctgcaccacttgatcgagctttccggttcacaaatgttactttttggttctgatgaattctaagatctagctccatttttccagggaagacttgttgaaaaggattttgatatacgcagaacagctggtggctcttcggttcgagcagttcagagagaatataaaacaaatgtatcagaaaatcatctcgaagtccatcttttctgggctggaaaaggaacatgttgtattcctatccaaggggcttatgggccattaatagcggccgtcagtgcgacaccaggtaacacaaacggttgatatattttttttcctctgattttcactatctcccgatactagttagtgccgtgtcacatattcttgttcagatttcacaccaactgtggctaataggccaccatcaaagggaaagagcaggactggtactattgtgggtgtcattgttggtgttggacttttgagcatctttgcgggtgtggttatcctcgtcattcgaaaaagaagaaaaccgtacacagatgatgaaggtacagatgtaataagaacataaacaagcccttgagctgaataactttagctctctgatcaaaattaaagttgactatcatctgttaaattggttgattttaagtagtgaattttttatggcagagatacttagtatggacgtaaagccttacacctttacttactcggaacttaagaatgcaacacaagattttgatctctcaaacaagcttggagagggagggtttggggctgtttataaggtaagtcccttactgaatcgaacaaaatagctgtatatttttctgagatactaggaaagaagggtacatgtaataccttttaatacgttttgttttgaataacacgttcaacagggaaacctcaatgatggaagagaggtggcggtgaagcagttgtcaattggatcacggcaagggaagggacaatttgttgcagaaattattgcaatttcttcagttctacatcgcaacctagtaaaactttacgggtgctgctttgaaggagatcatcgtttgctcgtatatgagtatctccctaatggaagtctcgatcaggcattatttggtaatgaacagaaacatgacttacctatctctgcttctgccaagctaaagtaatcattatgccattgggttggatgttacaggggataagagtttgcatcttgattggtcaacccgttatgagatatgtctgggagtagccagaggtctagtttatctccacgaggaagcaagtgttcgcataatacacagagatgtgaaggccagcaacattttactggactctgaactggtcccaaaagtttctgattttgggcttgcaaaactatatgatgacaagaaaacccatattagtaccagagtggcagggacgatgtaagcaaaatccatagaccctgacattttgtttgcaacacaattatggctttatagctcatgttagttgtatcaatgcagtgggtatcttgcgccagagtatgccatgcgtggacatctaacagagaaaacagatgtgtatgcctttggtgttgtggctcttgagctagtgagtggaaggaaaaactctgatgagaacctggaagagggaaaaaaatatcttcttgaatgggtacgtctatatttgtcatataggcgaagttgaagatggtgtgataaatgacaaaagccgataatccttttgtatttcttgtatacaggcatggaatctacacgagaaaaaccgtgacgttgaactaatagatgatgagctaagtgaatacaacatggaagaagtgaaacgcatgattggcattgctctgctttgcactcagtcatcttatgcgttgagaccaccaatgtcacgagtagtagccatgttgtcaggagatgctgaggtcaatgatgccacctctaagccaggctacctaaccgactgtacatttgatgacaccacaagctcctcattcagcaactttcaaacgaaagacactagcttctcgacgagctttatagcgcctggcccggagatgccacttagagacggcgaatcgaagccaatggttggattcaagatcaaggagggaagatgaagattgtcccctctataatttgatatgcttgtatatggaagttgacaattttcttctatataaggatgtggagaaacagatttcactttcattcaataataatattttagttgacaatttttcaatttttgtaacaaacttttgatatcttgcaaggatgaccaaaaaaaaaaaaaaaaaaaaaaaaaaagaaagttaacctgttgtgatgggccgggcattttataagctagtacaactaacacaccgttaaatgggcctggcccattgaatttttcaagagcagcgccatcaacagatgcgcttattaaacccctgaaaccctagtttcgttcgttgtatatttcttctcgctcagtaggtctttagggttttagtttcttctcctcaaaaaatggcgatgtatgttatctacgagtcttcttccggctatggtctcttcgaggttcacggactagatgagatcggacagaacactgaggcggttcggacttctgtctccgacctcagtcgctttggccgtgttgttcagctcacagcgtttcatccctttgagtctgctctcgatgctctcaaccaagtcaacgccgtctctgaaggtcagactcttcattactctcttcttattctttgttctgtatattcatgtgttgtgttgagtagcttgttcttgtatttagagctagagtagacacttcgatttaaaaccttatagttcaaatttcctggatatattgtagaaagagctttaatttatggttgattcttgtttttgtgttctgtttttgtttcattgttttggttttgtcattgatgcttttggaattggttttaatgtgatattggtaggtgttatgactgatgagcttagaagttttctggagttgaatcttcctaaggtcaaggagggaaagaaacccaagttcagtttaggattggctgagcctaaactcggttcacatatatttgaagctactaaaatcccatgccagagcaatgagtttgttcttgagcttctcagaggtgttcgccagcattttgataggtttatcaaggacttaaaggtgtgatctcctttctatgtgtttaaaatctttttgtctgtttgcttatctcatatggtttgtgttctcataaaaaatttctgtttatgtagcctggtgatcttgaaaaatctcagcttggattagctcacagctacagcagagccaaggtgaagttcaatgttaaccgagtggataacatggttattcaagctatcttcatgcttgacacgcttgataaggatatcaattcctttgccatgagagtcaggtttgttttgtgcttttccctttcagattgtgtgttttcctcgagaaaattggtagctgaactgtttataatgttattacagggaatggtattcgtggcacttccccgaactagtgaagatagtcaatgacaactatctttacgcccgtgtttcaaagatgattgatgacaagtcaaagttgactgaagatcacatccccatgcttactgaagtcttaggggatgaagataaggcaaaggaggtcatcgaagctggaaaagcatccatgggtaaaaattttgagctgacttttttggtagctttgagttaatgtgtgtttctgttaacttatgtcctgagacatttactctcttccctattggcaggctcggatttatcaccgcttgacttaatcaacgtacagacctttgctcagaaagttatggaccttgctgactacaggaagaagctctatgattatcttgtcactaagatgagcgacattgcccctaatttggctgctttgattggagaaatggtcggtgcccgtttgatttcacatgctggaagtctgactaaccttgctaaatgcccatcttccaccctccagattcttggagccgagaaggctcttttcaggtgcaatatctggcactatatttttaatgttcaccagtttccttttagtgctgcttgtgacatgaactgctgtggtatttcagggcacttaaaacacgtggaaacactcccaagtatggattgattttccattcttccttcattggccgagcatctgctaagaacaagggccgtatcgctcgttatcttgcaaacaagtgctctatagcatcccggattgattgttttgctggtaaaaatctgaaactccttgaagaagagttttggattatgaattctgttgtgaaagtgttaaattatgtgccctgatgtcctatgcagatggtgcaactactgcttttggtgagaagcttcgcgaacaagttgaggaaaggctagaattttatgacaaaggtgttgccccacgcaagaacgtggatgtaatgaaggaggtgatagagaatctaaagcaaggtatttcttgtagctgtttttttttggttgtaatcagagtcctctttatgatggcaaactcagtgtttttttatctgttcctcctttagaagaggaagggaaggagccagttgatgcctcggtgaagaaaagcaagaagaagaaggcaaagggtgaagaagaagaagaggtggtggcaatggaggaggacaagtcagagaaaaagaagaagaaagagaagaggaagatggagactgcagaggagaacgagaaatcagagaagaagaagacaaagaagagtaaagctggaggagaagaggagactgatgatggtcacagcaccaagaagaagaagaagaagtctaagagcgctgaatagaaagggatgcaacattaacaaaccctgtattgtattttttttttgagctaaattaatgtcgtctgtttttcgtagtgaacatcggagaatttttgttttggtctggaaacgattcaaggtttggcaatatcttaagtttgtttaggttttcactattttgacgtttgcaaccgtgaaggaggctcctccattttataaaatacaattaccaattccagtgctttgcaaatgtttcaataatagctaaactaactaccaaattggaaaactagcttaacaagtttgtgaaaatgaatttggagccatatgatttattattttacccaaatggagtaatagaagaagagcagctcgcgtttgaatggtcagttaacattaacaaaaggtaaaattgaatagatgttaaaacttgtgtaagtaaacaatagagctacctccttttgagaaggatagataaactcgtgaccaaccacattcccagtcccatattcttagtacaaataagaaattcacacccctcaaagaaatataacataatcaatcataggaaatatacttcgcataatgacgataatgatcaagtttctcctgttagctctgctcgtgatctctccgatttgcgccgagaaggacctgatgaaagaggaatgccataatgcacaagttccgaccatttgcatgcaatgtcttgaatccgacccaacctccgttcatgcagaccgtgttggcatcgccgagatcatcatacactgtctcgactctcgtctcgatatcatcaccaagcaagttttcccttctaataaccatacatatatattaacttagatatatgacaatattctctaactaatatatcaatctttttattgttctagtaacattacaaatatattgtcactgggaggaggaacgaaagaagtgagaaaaatcttggaggattgcagaaatgacacgtcgacggtggcacctaaactactgtcggaagccaaaacaggtctgaaaaccggtgattacgacaaagccgccaaatcgatagagtatgctagcattcctcatagctgtggattaaagcaaccaagtgtcgagtttgagtttcttcaactgtttagtcaaatcagtatctatactcaactctctgatgctgccatgagaatcattgatcgcttctaattactccacctttttatctctatgtaactcaacaacatcgatgcttaccatgcatcccccatataaataaatgattccctcttttatcacgatttttattcatgcatggtctcatttaggcgacaattacttaacacttcaccatctaataatcatactaaactgatgttgtagaaattacgctcatcaatccttaaggaaaaaaaaactagagattaattatcttgagatgaatatcgtcgcttataaaaactttttaattcttccttaataacatggatacattggggatagtggaccgttaaatgggccatgtatcaccaactcaccccaacaatagtttctgcggtttcgtcgcccggagtcttgcaaagtggagatatgtgaaaatccattgaaataatcaaatatataaatgagtcattaaccaaaagagagactcattatctgttgacgacgttgtattttcctaagtaattaagtgtttttgaattttccaataaaaaaggcttttcatatttctctaagaaagaagaaactcgcttataaatctcaaagagagagtggagttccatttcttcttaacttcatcaaaaccctattttacatttctcttacaataatcttctgatggctgattccggtaagcaatgtgtctttgtgaagactagtattgatacccgtttagggctatccttgacaattatgatagcgtatctgctttcaaatgtgactcttcataatctcttcccttttctttttagtttggtaacttttttaatttgtagtaacgaaactcatatttatcattttttgtttattatacagacataatctgcaaagaacataagcagtgtttccaagtgttgacaacatcactatttatgccttgaaggtaacaacacgtttttgttttggaaacaacgacaacaacaacttaaggaaggagtactgtttttggtaagtgataatcattaccacccaagctaacattcaaaccaaaaaccagtttaagttaacttgggtggtgctgattatcacttgtcggattgtatgataaatatgagtttaggttaatttgggtggtaatgactatcacttgtcggattgtatgattttaaaaaacgctcttcaaaagcctcagtaacaatgactggttctctatccgtccacctcgtacgtgtcgattagaagggtgagctgcagattggtgaagtagttgagaagaaaacgagaaagagaaaatcgaaaagtgacaacaagatcagaaagaaaccctccgtagagactccaacagaagcgaaaggtaacctctactttttttctctgttattgaatagtatataacatatgttatcgatgcatatcagttgatttaactttgtgttgaatggaccttcaaaaggaggtagcaaatgctgatttagtcatgattgactaagacaatgatgagtgtaccaaagtaacatctaaattctagaactaagaatcagaaacttaaaccatatacaaacaaaatgacctttttcaagatcattgtcttggtcaatcatgactaaatcagcatttgctatggataatatacataatcttctaatctttggtacactagtaatccttgattagctttaaaagttgtagataatcttctagctgaattaaaccaaacaactgatgatgctgagaaagaagggatcatagatgttgttaatgctacttctgaagctattgaaaacggtaacttcagttcttggttgaatatacctactttttcttctctagcataataggcaatggatcatttctattgaatcgtaattgttgaattttgtgtagaaactgaagtcgatctcaaggaaaaagatggtgatgaggaggctaaatctgagaagcctaaaaagaaaaaggagcaaagaaagtcaagattcaagaagatggtctagttgcttctagctcaaggaacgctgaggaagatggtgtctcgagagatccacaggagaaacaagaatatggataaagttgtgaagaagccgagcaagagatcgaaaaaggaacagtgttcgaacattgtggagaacaatgcttaaggattgtctgcaatgactttcaagatcattgatcccttctttttttttggaacttttggttttgtcttcgctttattttttctctatggaacttaagcaacctatatctcggtttataagcaagttatttcctcttttcttctcttaacttttattttgttttcatgcgtggttttacatatggttaactgctaaacattccattatctctacttatcaatcaacagatcatagtaaacgtaatttcgtagaagttaagcacatacatcttctaaaaactagagattatttatcttgagaaatctgtacatatttcaaacaattctatatatatccaagggtgaatgggcctgaggggactgttaaatgggccatatatcaccctccaacccaacaatactgccagatggcgggattaggaatttagtattctttaaaaataaaattaaagaatgagaatattacacgtagaggcactattttgaaactttagccacaaataggcactttgaaaggagaagacactttaccaaatcaaaattcccaaattgccctctgaaccacaacgctttctcctcattttctctctcaactcttttctttatcgtctttatttctctctctttccaaaatcaaaaccaattttttacgggaatctcaatattccaaatcaaaactaaaaacccaatttcatatgatttatcatcatcttccctgtctctcaacaattatttgatttggttccatttatttatctccttgattaaggaatctctgtcatcgattacaatgaaaagtgaggatgttaaccatgatcagttaccttctaagcaatctgggcttgaaacggttcgtgatgttgagaacgcgagtagcagcaaaaaggccattgtcgatgtaacttcatctgaggcatagttgtccattgatgagtgtccaagcattcaagtccaaatggtcatctaataactcacatttgaagcatagttgtccattgataagtgtccaagcactctagtccaagtggtcatctagtaactcacatctgaagcatagttgtccattgatgagtgtccaagtactcaagtttaagtatataaagcgtgtaagaagatcaattgtagcagcaatgttctgttgttgattcttaatatattcttcgtttttaagttatgatagagaattttgagataatctcagaatttctatgatttgtaagaattatagagaaccaccatgattgatgattttgaaaaagaaaataaaaatgatgaaaaaaaaaaacatggaagacagagaagataaaaaatgatgctagtttgtctccatgataacttgtccacgtaaacgtaaccatgtggaaataagtgattctcataagcaaaagaatatgcttttaaggttagacgttcaatgaaacatcaatttatcaagaaagaatcaaattgtaccaaacaaggcgatcaaatggatatgaaatttaatactggaatttgccaacttgggttttccataaactctcaaatgtttgattttgataaactcttaaatgtttgattttgcaaggaaagaaaaaaaagtaataatgagaagagagagagagagagagagagagagagagagagagagagagagaggaagaggaagaagaagaagaagcgacgaagaagaaggaaaaaaaaggaacgtggagagatgaaactttttttttaattataattttttaattttcaggggcaaattggtcacaagtttaatgaaaaagttggaaaagtgcctcatccctgacaagtgcctcaaaaggaataaaattctctaaaagtgcctaaacgtgtcacattcccttaaagaattacgaaaacaaatacacgggcgtaaaatgcctaaattaattatcgtaaaatcatatagaatcgaagaagaagattcatataattataatccaatccaggtcttaatttacgctttcactcgccattattgttccctcttcttcttcttcttattctctggatctctccttctccctctcttctttctacagttatttcgctttagcagattacttaaatccacggtttcttcttctccgggagcatttatggcgtcagcggtgacggcgtcaggcaaggtggagaaaggacatcagctatatagagacggcaagtataaggaggcgcttctcttctatacggaggctcttactgctgctaaagctaaaccacagaagatcgctcttcacagcaaccgcgccgcttgttacttgaaattgcacgatttcattaaggttttttaaaaaattctcttttgacttcttccatgttagaaatggtcaattgaatacatagacgattccaatttacttacagatttagtgaaaatttgagtctttgtttgaatcccaatgcttagctattaagaagcacatctaagaacattcatgcttgttgaatggaatcgagaactgttctaatcggagtcatgagtgttagaagaaagccaactacttgtgaaattggtatctattcaagaatattaagatcttttgttttggattctttcaggcagcagaagaatgcacttgtgttcttgagcttgatcagaaacatagcggagcgttgatgctgagggctcagactttagtcactcttaaagaataccaatctgctctttttgatgtcaccaggcttatggagttgaaccctgattctgaggtttatcagaacctcgaagctcgcttgaggacgcagttggtatatatatatactctctgtcttgctttcccttattgatagtgttggctcgttggatttggatctaaaaagtgtgtcttgtttctcttggtcaaggaaagtcccttgctccaattcctgagtctgaagcagaattggaagaagagagtgacgttgaacaagacgctgaagataaagaaagtagagaagttgagcttggtgtcaatgagagaagagataagaggtttgagtcggtagtttcccttagaagagatctagagactacaggagaagatgcgataaacaagggggaagttgttgcacctaaaacaccagaggttagagaacagaacagcaaggaagtgccaatgtctggaaagcaatctaatgcatggcaagccatacctaagcctaagggtcattcaacactcgattacgcccgttggaatacagttgaagatgattccagtgaagaagaagacgatgaagacagcgatgacagtgatgagtcgccacctcagtacagattccgtgttaagacagtcggggtgcgtcctgtgaagtgaaacattgtagataggaacatgggatggtttctttcatcctgatatattgcatattgcacaggagagctgtgaaaaaagcattagagtgaaggggatagtgataccaaagcagactagtcatgttttgaattgcctcttctgtaattggtttcagcggtcaccatgtatcaatgtgctgtgtctttttatacatcttcgaaaagaaacataccgagtttagataagatacacaatacagaagaccatgttcaaaccaaatggcctgttgttctatttgttaatactttctttgcctcagagactctgctttgttatcaccatgaagatgataatgatttagaattgaacagaaatggaatttacaagcttcattattgataagtcacaaaaatacatcactgccaaagttttgtattcatgacattaccaaagctagatttgattagctcatatgaataggcccatgcctttatctattccttctcccatcccttgcttctctcccatttccactgtgtgtctctcttgccgttcctttataatctctatgactccgacgatcatcatctctatctcgtcaactctccacatggtgtattcatcttccctattgtctctttcttttctctctgtgtttcttctccctaccaataccatcatcattcctcctctccatttcccttaactcatcccgatgatgctgtcttctaccaatgtacttatctgccttgttctcattgtcactttcatctctgttgccatcttttgccttctccattaccacgaggacttgtccgacgaatcttctccctaacacccctctcatccctgtcatgactcatgactatgaaccctcttggggatttcaggtacatcaccctcaaataccatatcatagccgtacaaaaatctggaaatccaacataacaggaggttagaaaagttgacaaactaatggcattgacagtaggaaacacaaataaggaggtggcaaagcagcacattaggcaacacagagtaaaggactcaaaagattaagtatggccaaaatatccacatatgattagagatcgtaagaagaaaacaacatcttacttgtacattgaatccccaccagctcctgtgatcaccggtctgtgctgtgaaatctttttgcactgtgtggaagagacacccattgtagtacttgatcctatccatatagtaagttaaaccccttaagagacataatgaatatcatggaaatgttacttagtagataggcaaaaagacacttacttgcagatcttaagaaagttttttgcaggtcaaagggcatttatttgttagatatcaatcactctatccccaagacttgtcacaataagaactgacatgttcactacctgcataacctgaaaccaaaaattagaagtgagaagaaagtagtacgctttttcactagcttatctcattcatcaacaaacccgagcattactgttggggaagggaagaaaaaagaagaaccaaagttgagtttttcagatatcgttcaagttcttggggtttaaaagaagggttaaattgtaacaaaaccaaagttgaaggtatttaaataagaacaaatagctaaaggggtttaaacatgaaatatataaaaggtcagggtttcatggtcaatatataactatctctctctgtctcggacaaagacaaataaaaagtgcgaatcttccaataaaaacacgccacgtagtttatttaggcagccgaagatcccgagggccctttgcgatgtctcaaagcggcggtgacttcaacctctccgacgagattctcgccgtgattcccaccgacccttatgatcaactcgacctcgccaggaagatcacttccatggctatcgcttcaagggtttcgaatctggaatctcaagtctccggcttgagacagaagcttcttgagaaggatcggcttgttcatgaacttgaagacagagtctcttcctttgaaagactttaccatgaagctgactcgagtttgaagaatgttgtcgatgaaaatgtaataattctcctcagttttgttaaatttggtttgacttggatcatcaaagtgtgtcttttactcaattggttgaatttttggatttttggattgaagatgaaactgactcaagaacgagattcactggcaatcactgcgaagaaactcggtcgtgattatgcaaaggttctttcttttcaaatgttatggtattgatttttgttgaaatttaatcatttgatttcaagctcaagctctagtgttttgcttgtagttggaagcattcaagagacaattgatgcagtcattgaatgatgataatccatctgtatgttactcaacactatacttcttttgacatccttttatatatgaaacaaaacaaaatcagatgttacatactctcctcttgtttttacagcaaactgagactgctgatgtcagaatggttcctcgaggcaaaggtattgtaacatcatctcaagtattctgagcttattggtcttcattgtctttcctttttctttatgtgttagtctcttcaagagttgcttgttctgatgttatttactctgtatgcattgtagatgagaattcaaatggatcctactcaaacaatgaaggtattgattgctgagttatccaataatttagtttgtagcaacaaaagaacatacgttagtccagaagacttgttgatgttttcaatataatgaagaacaaaaaaaaacattttcaatgtgtaatggttcatgaaacaggtttaagtgaagcgaggcaaagacagtctatgactccgcagttctctcccgcgtttacaccaagcggaacaccaaagatcttatctactgctgcttctccgagaagctactctgctgcttcatcgccaaagctattctctggagctgcatctccaacatcttcacattatgatatacgtatgtggtcttcaactagccagcaatcttcagtagcaaactctcctccacgctcgcattctgtttcaggttcacaactttaaagcattctaatatgttgtctaaatttatatcatgtgatttgtggctttgttcttatcctctcacttgatcttatacagctcggcatccgcggattgatgggaaagagttctttagacaagccaggtatatataagttctaaagttcctagagccagcaactagtatatgagaatgagtgatagatagataaggaattgttttgaattttcaggagccgtttgtcttacgaacagttcagtgcattcctggctaacatcaaggaacttaacgcccggaagcagggccgcgaggtaataacctcataagccataacatagtccttaaccaactcttttagtctgaaatttgtataatgtttgaatcctaaaatggtcttatctaatctttatcgccaggaaacattacagaaagcagaggaaatatttggaaaggaaaacaatgatctttacatatcctttaagggacttctcacaagtgggcgttgaaacaaaaactcaccaacttctaagctttcttttcatgaccaattagtcatgactgatttcaaatttgtaaaacctctttaaccatagaagagaatcagggaattttgttcttgcaagtcccagttcttttgctaagactaagagtttatatctttattagatattaacccgcggtataccgcggacctatatttttattaaataaaaaataattgaatattttttaggatgatttaataaatttatgctattgtttgatttaaatgtataattcaccgctagacgaaattttataactcaaattttaaagttttaagttgtatttgtttattttgttaaatgtttaatattgtataattgtattttgattgttgtttctcggatttcacccgtagtacaccattccatattaatatcgaatcaaacccgtcaattctatgatttcacctgtggtagtatttaattgtataattatattttaattgtcattctatgatttcactcctaattctatcgcaaattattatcaacccaaaccagacaattctaaaatattccgtagtacaccatcccatattaatatcgaatcaagcccgtcaattctaggatttcacccgtggtagtatttaattgtataattatattttaattatcattctaggatttcactcctaattctatcgcaaattcttatcaacccaaacagtcaattataaaatttcacccgtagtataatgtttaaatatttataatgtttaaatatttataatgtttaaatttcttataaaagaatcaaaatgtgttttaaaaaaattaaagttttaagtttttttttttaatattgttaattttgtttagtgtttaagattatataattatattatgattgttattatatgtttttttccatagcatactatcccatgttattatccactcaaacccgtcacaccatataaccccgtcccgtgaaattaaacacaaatttgtcattttattataaatttcaaatatttataaaattagaaacttcaaaaaagattaatattgacccaaacttcatcattgaattttgagtgttatatctaagatttctctcgcagtatatcgtcccgtattaatatcttttatattgtttaaatttcttgtaaaatttaatttataattttttaaactttttaaagtttcaattttttaaaataaataaccctagtaaacaaaccattttaattttggacacctcataaatcaagtttcatgctcattcgtaatcgaaatcattttggtcctttttatagtatggctcttgaccattgtccaatttttttaagcgatgtgggacattctaaaatcgtaattattatccacccaaacccgtcctaccatataacccagtcacgtgaaattaaacataattttgtcattttcttataaatttcaatattataaaatttggaacttaaaaaaatacaatatcgacccaaaattcatcattgaattttgattgttatatttaagattttttctgtaatatatcgtctcgtattaataaattttttatatatttataatgttaaatttcttgtaaaattcaatttataattcttaaaactttataagttttaaaattataaatatttaaagcattttttaaagataaactttataaaaaaatttaaaattataatatttaacttttgataaagttataatatttataattttttgagacattttaaagtttcaattctttaaaataaaaaatcccagtaaaatcggataactattttaattttggacgcctgataaatcaagcttcctgctcattcgtaatcagaatcattttggtccttttataatatgggtctgaaccattgtccaatttttctaagcgatgtgggacattgtacacatattatttcttcataggttgaataatatatgtccatttaaaaaaattagaattacatcatattcagaaaaaaatataatattttattaattatatatattttatataaattcaaaataaataaagtataagatcaaataaaattgaaagaagaattatatatttatgtttaaattaggtagaaatattttaggaaattagttaaggtaaataagaaatatggttagtttagagatattgtttatattaaatttggtaattaaatcattaattttcgtttttaattattagtttttaggtaacttttccaaaaattaatgttatctaagatcagaacagaattaaacatgttatccagaatccgaacagagttaaaccgggtaaaacccacccatttgaattaattgttgaattatggctcaaatcttcaacattatcttcaaaaatcccctccaaaaatgtatatatagataacggaaacaagattaatgtatcatcattcattccttgttgatttaattaaacagatgaacaaatgatatgtaataataaggtctcggtttacagtgaaagtgatttaatttagtatctttgttacttcgattattgaattgagcgtgtgtacttatgaagattaaatcgatgatgcatgggctcatgaagattaaaaaactcaatagacacttaaccagaattaatgatattggcccgatgagtattggcccattaaggcccattaagagagcgaaaaccctaaacgagaaacaagggatatactcagagcatcttccttggttactatataataagctttaggctgctagacgcctgcctccttgcacctcttttctttctctcgttctcatctttctctctaaggttagtcccttgtgtagatcctctcttcatcgattcaatttcatcttccttggtttgatttaggaattttgtcacgatttggtgtttagatgatggagtcttgctgttgatctatgtttatagcactttgtttccatggttctgttgtttcttaccgtttgttgtgcatcgatctggttttggtagatccctcgtagataataatctgaatatgtcaaagttttcttacaagtctgttgtgttttcagttttgattgatattgttatccatgtagtagtcgatcatccaaaaactggttcagtgtgattctccgatcatcgccgctgattttatatttatcatcatgtatagatttgcaggttttattttgttcgttgtgtgtttttgttctttgttaaatttaacctctatgcatttgatgtacatgtttttgtgttggtctcagtttctcttattctgtataagctaagctaaagtctccatggttagtgtctgtttagtattaaaatatttcaatttgctaattctttatgtttttgtgatgatattgcagagattttgtaggtgacaatcaaaagtttgacaaaatggtaagacttttgtttttcttacatttatttacattattactatgtggatacaagcatataacgattttatgaacttgcaggtgaagtttacagctgatgagcttcgaaggattatggactacaaacacaacatccgtaatatgtctgttattgctcatgtcgaccacggtataatcttcatcactttttttgtactattcttgtcagttttgatctcttgtttgtttactgaatttgctggtcgaattgtaatctgaatctaatgcatctctttatatactaatgtttatagtctgttttgaaattaatagcgtctcttatctgttttctgagtttgctgaacgtttaaaaaagtttaaactaatgcatctttatttcatgatcaacagggaaatccactcttactgattctttggttgctgctgctggtatcattgcccaagaggttgctggtgatgttcgtatgactgataccagagctgatgaggctgaacgtggtatcactatcaagtccactggtatttctctctactacgagatgactgatgaatccttgaagagtttcactggagccagagacggaaacgagtacctcatcaatcttattgattcacctgggcacgttgacttttcttctgaggttactgctgctctccgtattactgatggtgctcttgtggtggtcgactgcattgagggtgtgtgtgttcagactgagactgttctacgtcaggctcttggtgagaggattcgacctgtcttgactgtcaacaagatggacaggtgtttccttgagcttcaggttgatggtgaggaggcttaccagactttctcgagggttattgagaacgctaatgtcatcatggctacatacgaggatcctctccttggtgatgttcaggtttacccagagaagggaactgtggcgttttctgctggtctccatggatgggcgtttacactgaccaacttcgccaagatgtatgcttccaagttcggtgttgttgaatctaagatgatggagaggctctggggtgagaatttctttgaccctgccaccaggaagtggagtggcaaaaacactggttccccgacctgcaagcgtgggtttgttcagttctgctatgaacccatcaagcaaattattgctacttgcatgaatgaccagaaggataagttgtggcctatgttggcgaagcttggtgtctcaatgaagaatgatgagaaggagcttatgggtaaacctctaatgaagcgtgttatgcagacttggctccctgcaagtactgcactacttgagatgatgatctttcatttgccatctccccacactgcccagaggtaccgtgttgagaatctgtatgaaggtcctcttgatgatcagtatgcaaatgccatcaggaactgtgaccccaatggacctctcatgctctacgtatccaagatgattccagcctctgacaagggtagattctttgccttcggtcgtgtctttgctggtaaggtttctactggtatgaaggtcagaatcatgggtcccaactatatccctggtgagaagaaggatctgtacactaagagtgttcagaggactgtcatttggatgggtaagaggcaagagacagtggaggatgtcccttgtggtaacactgttgctatggttgggctggatcagttcatcaccaagaatgctacattgactaatgagaaggaagttgatgctcaccccattcgtgctatgaagttttctgtgtctcctgttgttcgtgttgctgttcagtgtaaggttgcgtctgaccttcccaagttggttgagggtctcaagaggttggccaagtctgatcctatggttgtgtgtacaatggaggaatcaggtgagcacattgttgctggtgcaggagaactccatcttgagatttgtcttaaggatcttcaggatgatttcatgggtggtgctgaaattatcaagtcagaccctgtggtctccttccgtgagacagtttgtgatagatctactcgcacagttatgagtaagtctcctaacaagcataaccgtctgtacatggaagcaagacccatggaggaaggtctagctgaggctattgatgatggacgtattggcccaagggatgaccctaagatcagatccaagatcttggctgaggagtttggatgggacaaggatcttgcaaagaagatctgggcttttggacctgaaaccacagggcctaacatggttgtcgatatgtgtaagggagttcagtaccttaacgaaatcaaggattcagttgttgctggtttccagtgggcgtccaaggaaggtcctcttgctgaagagaacatgagaggtatctgttttgaggtatgtgatgtggtgcttcactctgatgccatccacagaggaggtggtcaggttatccccacagccagaagggtcatatacgcttcccagatcacagctaagcccagacttttggagccggtttacatggttgagatccaggcaccagagggagctcttggaggaatctacagtgtgctgaatcagaagcgtggacacgtgttcgaggagatgcagaggccaggaactcccttgtacaacatcaaggcatacctgcctgttgtggagtctttcggattctcaagtcagcttagggcagcaacctcaggacaggcattcccacagtgtgtgtttgatcattgggaaatgatgtcttctgaccctcttgagccaggtactcaggcttcagttttggtggctgatatcaggaagaggaagggattgaaggaagcgatgactccactatctgagttcgaagacaagctttaagcttcaccaagactcgtactagcctttttcccaatggttgctactctctctatcttaattttgtcttgttttattaatactcttatggtatgacggattgtgaagacttttctctcgccatcccctgaatgttttttacttttttcctagttgagaactttgttattgtgttcgcaaatatcttggttttgattctgtcttgctctttttttttatattcttttctcttccgatcattcatatattcatgcatattatttaggttacttaccggaacacaggatgtaattgtgttaagtctcagactgttttatcattgaatgttggaagaggacatgttttttaggtaggatgagattttctttcagagatgttgataaacagtgtcagagtatgattttgttctattagagattgtaattgtcagtcatgcattaggttcacttacatggtaacggattatttgtggtgttgttgatttagtaaattggaatgttgaagaatgcagccaggtcccttgaatagtgggagctccttaaaaaatattccaagtcgatagtgtttagaagatgcgttcggtggctatttcctaaggaaacccacattgctcatttatcacttagtttaattatctcatctataaataaaacgtccagtttggacaccaaatcacgaatcacttattaatctttggtgatcttgtgtattagttttaagaggatgtcatttagagagttaataagctgattcgtgatttaacaccattggcccaaatacatgattgattatgggtcgtacaaggcaacaataaggttggttacttatcaaaacaccggtgagaacacgtccattgactcgttatgaagtgttttgacctggaaccttcagagacgaccagaatcaaggacgcctcctacttttatttgaaacgcgttgtgtcgtgttcggtctggctagaaaccggaagtttctacgaacacacctcctaacaaattcaatatcttaaaccggaagataacgtcagaaaatgtataaatatacactttgaattgaagcaattcacaaaaatcattcatcatctctcttaactcatcattacacagacatagcaatggctcagtatcatcaacagcatggtgagtcattcttgtacattacacaattgctgatatatatgttttaagttcagtttcgcatataatcaatgtgactgatgtatttataaatatatatgcagaaatgaagcagacaatggcagagacacagtatgtgacagcgccgccaccgatgggttacccggtgatgatgaaagactctccccaaactgtgcagcctcctcatgagggtcagagcaaaggcagtggtggatttttacgtggatggtaattttatctttttcatctatctataattgtttctcctttcttttcctttgtatattgatcttttttttctgttgcagtttggctgcaatgtgctgctgctgcgttttggattgtgtcttctagggaatcctcccactacactatacacacagcttctactgatctttttgtcttgattcttgatgttttctttgtacatttttataaagttttgattgagtgtttgctatttctgattttgttacatttggttgttgttttgtaattacattcttattcttttgtatattagttatttccctgttctgagtagttttgactatcatcgaaaaccaaatggtcagcatttggcagcaaatccaatttcttgcatcttgccactcaagccaaaatttagagaaaacccacatcatataaactggaatgaaatggtgtcgatacacatgattattgcataaaattctcattgccaatcccatgaagtatgtcatttcttgttctacccaaaattatacatctcatctttgtatcataaaaattacttggagtatataaataaaagaaagatctcactatattttgcaaaaccaagagcaatgaatctcaatgtaataaaagccgcgcagaaacacaacctgtcgtgttctgtgaagaagtgattgagatctcagggttatgctatacgttgaagcggaaaagcatcacatctccttctttaacaatgtactctttaccctctgatctcaactgcaaaacaaataaaaaattcaagctaactcagtgagaagagaatcataagatgttttagtacaaggcagctcaatttatggacatcacgaagaaactcacaagtcctttctcccttgctgctgctatagatccagcagtgacaaaatcttcatatgcaacctgaacaattaaaccgattgaaattatgtctggattcatatgaaagaaagaaaaaaaccataagtttgaagctttcaatttccaattttcatgaccatgggtcatgttcagaatagggtgattcattaagagacaaaaaaatgcttacagtctcagctctaataaaacctttctcaaagtcagaatgaatgacgccagcagcttgtggtgcagtcatgcctgtatccacataaatttccaccgaattactacacatttccaaaaaatataacgcattttgagaaccctactgactggaaactaaccagcgtgtattgtccatgctcttgtttcctgccataaagaatgaacatgttagagtttatgtatatgttctacaacaagtttttgtgtttctatatcttcttcaccttttcaccagaagtgaaatatgtctgcaaacctagcaggctgtatgttgccctgataaggttcccgaggccactttcactgacaccaagagagttcaaatattctgtgcgttcttcaagaggaagttcggttagctctgactcaacctgcttccaggaaaggaagattttgtcaagtagtggaagaacatttcaagtaaaatacatgcgtgaaaaagtcaaagcatacgatgtaaatagacaatgatccagacctgtgctgaaacaactacatgtccggactgcaaatcagaagaaagacccttcacttcttcaacgtaagcattcttctctggctcagcaagatcagtttcagcaacatttgccacgtagatcataggtttcattgtaagcaagcagagatgctttacaacttccatctcgagatcggacaatgcaactgaccgtgcaggttttccttccagaagagcttcctgaattctttccaaagcagatttttcagcttcctcctgtgtcatagaatatcacatacacattgtgaatatcagtagcagactagattatgagaagtcagtagtttctctagccaaattttctaccttgactttggattgtgaatccttagccttccctttctttagtctctcgatccttttaccaatctgcatttcttgcaaaagatgtaaattagctttatcaactctgtttaagatacaaaggtgactgctccagagttttttgaacacagataagaaagaagatcaatactctccctagtagaagatcaagaaaacaaaatcctaaacaccaggcagggtgtgttcacgcaagtgcatagctcgagaaatgaagagctcattgaacatgaaacagaaattaagctgagaatcaaagttatacaagagtatgaagagaatggctctgagtgtacctgatctaagtcgcagaaaataagctcgagattgatgacatcaatgtcagactttggatcaactttaccattcacatgaataatgtcattgtcctcaaaacatctcaccacctgaattgaaaatagttacatatccagaaggaacataagcaagtactgatgcaaacaagagataagaaatgaacctggaggatggaatcaacttctctgatgtgagataagaacttattgcctaaaccctacaaaaaaaatcaaaacttgtgagttgggtaaaggaattatcttcattgagatagaaagagaggagagaaaagaatctgacttcgccttgactagcacccttgacaagaccagcaatgtccacaaactcaatagaagcaggaaccgttttctgagaaccactaagtttagaaagcacttgaagacgcgaatcaggaacagcaacaatacccacattaggctcaatcgtacaaaagggaaaattagcagcttgagcctttccattctcaacctgagacaatcacataaggtgtttgacgaaatgcctcagagaagaagaagagtaaagaagaacgacaagtgcatcaatgggacttacgacggcgttaaaaagagtagactttccgacgttaggaagaccgacgataccagctttcaaactcatgcttactttggaggaaaagcatcgcttctggagagtcaaaactccgacgaacttggaattaccggagaataataactggtttctacagagaagagacttagagggtaacaaagccatagccgtgacgacactgctacaagctgctctcgccatggtgctaattttctcagcctctcagctcaaaatttctaagtgtgttcgtcgtctcttttgtctattatctttttatcgcaaattacagagaatgtgttgattggtcctttgttttcacaatcacttatttttaatatacgtattttgccctatgttaataaacatttcgagaatctgagtttaaactaatcattttggttcttgtttataattcattttgacaactgtttcattagcttaagctaattattttcttaatactcataatacttcttcataagattattgctgtcttgacaattagacaaaaacaagcttcacacattttgacaacagtgattagataaaggatctgtgattagatagataagagcacaagagcaagttttacatacatcacagaatgttcaaaacttccataatcaaaataaaaaaggtttgctagaagaaagaaaaagtttcaagacaaaactaaaaagagaatcacagagagccgatagttatttgggggaggaacttggagtctacttggatcgctgtctcatctttcgacgcttcctctttaatctcctcatgcgcttcttcttccactgcaaaatattatccacaattttgttagtatcaaattcatttgtataggataacaaacgatacacatgatgaaagaaacacgacataaatggagagttttcatttcaacaaccttaacctatataacaagatctctatctatagtttagataaaccagtagtaagtgagttttctggcacagagatggttccaatcgagattaccaacattttttcagaatctctttacggcttccagtacaacaaatttaacagtgggatgcaaaatcgattatcattttcaattgttctaatgtcaaaaacataatcctcagatcttcttgtacgactttactaaggatatatataacatttgcattgtagaatgtaacatctatctctctctacgtatatgtgtatccatacatgaatgggtattatcgatgaaactaacgctaataagttctaatacaaagaacaatattgaatcgaagaagaagaagaagaagaagaagaagatgttaccttcgctctcattgttcttgttgttgatgcttagttctcagattcgccgatttctcgagaaagaagagagaaatgatttgagtgagagcctctcgaatttatagctagggtttcccactatatcaatgggcctattaaatgggcctaactattgaattcagattgaatcattcagtcacacttccatcttctggtgggccgaactttaattactactaatccaatgaaggaaagacacgtcacacttgctctgcatgtcaagaagaagtttaaacgttttagtcaactttttagcttctcaagaagcgcagataatcagagttgcataagaagaagcagaagagttccggcgatcttatactcatggattctcgccggagtttcatcggtgtatgttcgatcgaggagaagcgagtgctggaaaaatcgaagtggtaaaaagctttggaactctgcttagctactttgtgttgcaaattgtgtatatcttgtaactaagagatattgcaagtttggattcgtttttagagttctatataagctctacattgaatattatttacacaaactctccttcatactatatctgtacctatttcttcattcattttggtttttgaattcgtgtagtttactcaattggttgacgcaacgcaacttcgagaagatcaaggatgagattgttcgtacaataaaatcatttccatctgcttctatcttgaaggttctccgtccctttttgtgttgataaatatattatgagactatttctaatggtatttgtatatatgttgcagtctctagtgtcttgcgttttcgatatggcaatggtggaaaactcctatgtcttattcgctcgtttatgcgtagagctttttcacgagcttcctccacttccatcagatgaatctcacggcgatattacaacttttgagagactgttcttgcgcaaatgcagaattgagcttgaaaacgcatcccctaaaacagaacatttaccacttgtttatgttgatgaaacaaactattacagattcatcaaaaccgtaagggttttagctgaagtttataagaatagcaagatcacagaaacaacccggaaaagtatgattcaggtttgccttgcccttgccttttttcactcttggatatgcttctacttacgggtttaattaagagaatatgatcatttcaatggtaacgtaggtgcttatgaatcccatcttaccacctgagaggattaccgatgcgatgaatttatttcggtccatcattggaaaactagctgacttccatttttctgatgaaaaattcaatcagctagttcgtagttctcgggtaacaccactatccaaagacatgactatgtttaagctttaacgtttggtttgcagatatatctctctaacggtagcttgattcccaggtagtagagttggagggaaattacaatgaagaagtaaagcttaggaaagaagcagaagatgcacttgctatgaaaaaggaagatgtagagatgatggaacagttgcttgagtcttacaaggaagaacaaggtaaattgcaactacaagctaaagccttggagcacaagcttgaagcagagttgaggcataggaaagaaacagaaaccttgcttgccatagaacgggataggatagagaaggtaaagattcaactggaaactgttgaaaatgaaattgataatacgcgtttgaaggctgaggagtttgaaagaaagtacgagggtgagatgattctcaggagagaatcagagattgcgctggagaaagaaaagaaagagttggaagaagtaaagctaaagcttgaaacctacgaaagagagcaagagaatctgtcctcagaggtcagaacttggcaggacaagtacgagcaagagtcgagtcttcggaaactaagtgagtatgcactttctagagaacaagaagagcttcagatagtcaaaggactgctagaattttacaatggagaagcagatgcgatgcgggaagagagggacaaagctctcaaaacagcaaaagagcaaatggaaaagcgtcaacctccgtcatcgtttttctgccctatcacacaggcaagcccaaatctttacaagaagatgataacttgcataacactcaacctcgtattgtttatatttgtcgcaggaggtcatgaaagatccacactttgctgccgatggattcacatacgaagcagaatctattaggaaatggcttagcacaggtcaccagacgtcgccgatgacaaatctccgactttcacatctcactcttgtccctaaccgtgctctccgctctgcgattgaggagttggtttgatccttcctaatttttgaaccggttttcttaaaagttataagattgagttgagcctatataatggcctcacgactctctatttatgagcctttcttgcatttgtgtgatccaaacctatttgaatcggaaactcattatttaatataatattttgataatatttaaattatctaactttctagtctcgaaatattaattctttaataatattttgtaaattatatactatatatggggaattctctaaaataccatattttaaagtttttgtttcaaaaatatttattctttgatgatattttgtagattgtatatgggtatttctcattatataatatgtataacaatataacagctaatgatctggattgtttgttttgggagttctatgtaaataagctctactataacacaaccattcgtccctcatattgatgattgatattagggacttatgtaaattaccatataatatcttttgatatttctaattacgttaatcttctactattctagattttgatcgattgtattctaaacctcttaatccgggtcttgttttctttgataaaatatccgaaaatagaaacaaagccattttttcttagaacggtaacgaaaacatgcagtgtgcttttgtacacacacctaaaacgccatgaaaagccaaacatacgacataccagcgttgaatatgtggatccaatttatttgaaacctcttaaaatcgaaaacttattaccgggttgtatggcttaatccggaccttgttttctttcataaaaaaatccgaaaatagaaacaaagtcatttctcagaacggtaaagaagacttgtgtgctttagtactacacacctaaattgccatgaaaattgaaaagccaaacattcaaagaccaagaaatataaaagaaagcaaaaaaatttatatgttcccactcttttaggtagcaaaggaaataaaaatacaatacacatcttgttctacatgacaagcagaagtttaaacgttgctcaacttttaaacgaagagaagttacagctggaaaagtttgattgtagcttctcaatagaaattcagagtgacaatagttatcgaagaaagagttatttcggcgaactcattcatggaatctcgtcggagtttcatctctataagtttgaacgaagagaagatagagctggaaaaaaactcaaaacggttaagtatatcaagccaataactttcgggatattatttgataatattttttagatatactaacgtacagtatattgattttgggagttctacataaatatataaggtcttatgtaaataccatataaataccattctttccttatattgattaataccaagggtttttatgtaaatatcatataatatcttttcgtgtatatctcgtgttaaaaaaaaaaaaaaaaaaaaaaaaaaaaaaaaaaaaaaaatcttttcgtgtatatctcttattatgttaatcttcttttattctaggttgtttgtatctagggtttcttatatatactctattaactatcaatgagaacgacgatattgcctttgagttcatgtagtttacttaacttttgacgtaacgcaacttcggaaagatctaaggatgaaattgttcataaaataagatcatctccctccgcttttctcttgaaggttctctctgtccctttttgtttctaatggttaatttaatcactaatatgtatgttttaatggtatgatcactaattaatctgtatttctatatatgttgtagtctctagtgtcttgcgtttttgatatggcgatggtgaaaaactcctatgtattattcgctcgtttatgcgtagagcttccccctcttccatcagatgaatctcacggcgaaattacaactgtagagagacagtttttgcgtaattgtcaaatggagcttgaaaacttgtccctcaaaacagagctaccacttgtttatgttgatgaatcaaaatattggagattcatcaaaactgttagggttttggctgaggtttttaacaatatgaagactactcgaacaacacggaaaagtatcattcaggtttgccttgtcctgccttttttttcttccactcttggactaactgtaaagggtttaatgaagagcatagtactaattgtaatgtaggtgcttatgaatcccatcttaccatctgagagaagcaccgatgcaatgaatttatttctgtccaccattgaaaaactagctgacttgcagttttctgatgaagatttcaatcagctttttgtaagttctcgggtaacacaaccatccaaagacatgattgatatcatctaaacacaatcgtgttggtatgcatatatattaatatatttatgtctctaatggcagcttgatttacagttggagaataagtacaatgacaaagtcgaagtgaagcttaggaaagaagcagaagatgcacttgctagaaaaattaaggaagtagtagatttgacggaacggttacttcaagtcgaagccttggagcacaaacataaagcaaagttgcagcttaggacagaaactgaaaccgcggtagccatagaacgtgattatatgcgttggaaggctgaaattttcgagagcgaattcaacaatcaattggtactcaggagagaatcagaaattgcacttgataaagaaaggaaagagctggagggtattaaaaatctgcttgaaacttgtttcacaggacaaaagaacctgaaatcgcaggtgataacatggaaagacaagtacgaccaagggtcaagtattaggaaagaaaaagaggttgctctttctactaagaaactagaactcgagattttcaaacagctagccggatcgtacaaacaagatgcagatgcgatgcgacaagagagagacaatgctctcaaaacagtacaagagatagtggacgagcaacaacctccaccatcatttatctgccctatcacacaggcgagaccatataaactccacaataagataacttgcattacactcaaaaaatcgtgtagagtttttaacatgttaatgtggtttatatttgttacaggatgtcatgaaaaatccacacatggctgctgatggattcacatacgaattagaagctattcaaaaatggattaacacaggtcacaggacgtcgccgatgactaatctcaaactttcacatttcagctttttccctaaccgagctctccgctctgcaattgaggagttgggacgttgattcttcttgtttttcaaaccggtttactcaagttgatattgggccgataatggacccatgaaactatttgtgagccttacttttttttttcttttttttatgagccttattttaaatttgtgatccattgtacgtggcttaatccggaccttgttttctttgataaaatatccgaaaatagaaacaaagccattttttctcagaacgataaagaagacaagtgtgcttttgtaggcacacctaaaacgccatgaaaagccaaacatacgaaagaccaagaaatattaaagaaattaatatgttcccacttttttcgctagctatgaaaaaaaaaagaatcacgtgacaatcggacaatgtgacgtaacacaactctttgagatctcttttattcagagagatagtctgatatttttcaacgagtaatggaatagttttcttcagctagcaagaaattattatttgcttttgttggtccatttaaactccaatctatctttagatggaaacaaggcatgcttaaaaagccaaaactctaatcactgacctaagccctaggtctcctatattttatcttctcaaacttttatttactgttggtaattagcattgaatactatttcttttacaaaatttgaaagcgatctagctagagagagaggagaataataaatattgagagagagagagagagacaaaagtgagagaggaacaagaacaagaaagtacgtagatgtacagagggagataagaagaggacaagacaatggcctgcagattttttttacacatcggtcaataataaacttgcaatatttggctctatatatcgttgcaacttgtttacaccaaaacttatagatacacgcattttaaacactttatattcacctataagacaaactttttcttctttgttttttcaaaaaaatattgtttgtttgttctctttcttacccctttctattagaaacattcaattattactattcaaatctttcatctggttctttgtaacaaacagctaagaacccagctcaagctgtcctatcttctctgtctatgttccgtagcacaaatatttcatccactcaaaatagcttttatatatatttacaaataccattcagaaaatatatagtttttgagttgtattcacatgttgggggtaatgtaatcaagtaatttttgtgtcaagtcaagcatgtatttagttaagtctcaagctaagttttagggttttgattgttaaatatatttaaagtatttttgtcgtttttttgtaaaagaaaacgagatcaagaaaggaggattaagtgttaattataattagcttatgtctttatcttagtttaatcgccgtttgatgtattaaagtaatgtagagaacgattctttgtaactaattttttcttctttgtcggcctttctctacttaagccatttgtcgttacactgtttattatgaaaatgaagacagatgcaaaaagagcagagttaaagtatcaatttgggagagagagaatcttttacagagggcacaacactgggaactatcacgttctctcattcatttccttacttcttttttaattaccaatcttcattattactctctattttcacattatgtaatctttggtggatgatatgtactagtatttaatgatttaggacaatgtatttgactatttgaaatgtgattcaatttagattttttagtagtattttctaaagccaaacaaacgacaagagaaagataggtccggtaaaaaaaaaaacatgcattgatttcagatctatatcgattttatggcatgcaaaactatagtattaaatatagatggtttgtttatttaaaggcagcaataaatctataggcttaaatttaatgtgttatgtcgtttataaattgatattgatagatcctattatttgacctaacggctacttctcactgaagtaaagtatgacaaaatgaagtgagtgattgtctgtgtatgatatgataactctctctatctatactcaaaaaaattctacaataatttctaagaatgtgcattatttgcatgtatacttcgacttcttgtattgtagcgattggggaagaaagaatccaacggatgggatttaaggaacgatgttccagaatcacgagcaactttgaatattttttcgatttatgttatagataacattattgttttgaaaacagaataattcgtgggagctaacttatttagttaccgggactttatatagctgcaaggctagctgcgacgaatgacagctctcttcaggctttgacgacccttaacagtttttgttcattagatctgtcccttaattacttttattaattataccttagttgtctcttcactctcttcaaatcttcttcaatacacagattattttacacataatatatagacattataatattccagaagaatgtgatattactgagaggtttcaactaaaattcaacattttatttttgagttttgaaataagaaaacaagttacaaagttttaaaatcggttgtttaattagttagttgatagatgctcaatgatattatgttaacatgttactataaatcaaccaaaacaatcgaactgccatttagtcgggggttgacaatcaattactcgattttatgtagccgagtaatcgtagtgaaatgagtccattaaacggtcttaatttttccactaatctatagtttagagcacgcatagatcttataataatagaaaagcagtgacttttttttttcttcagaaaaggagtgacttattgatccctaaaatgctaaacacacttttgaaagtttgattagctaggctgccaactttttgaacattgcaataaaaagtaaaagagtctataatatgttttgggaagatcctcttgatttggtccaccgacctattttagtctatatatcctctctactctactgactacacatgcagtttccaagtactaattatctctactttctctgctttaaaccaaattaaaagctgtctttttagttaaagttactaagttcttgtttcattcaaattaaggttattaatttgtgttattattggaaaagttaaaacaattaaagccaaactaaggaggctttgcaatttggattatcacatgcaaaaacacattattaggcaatgatatatcatactatgctttttcgtaactctaataattaaaactaggaacttctcctctaaccagtaattacaaatcacataatttttgctttatttattcattagtcatcttttggttattctgtcaaaaactatttttatacaaagagaaatcttttgaagcaatctccgaacatggcaagcacatcatactttctggtcagaatttttttatacttgtattaacttcatcgaatttatcgtctaacagagaaatatattttaattgctactggttggtctttccgagtaaaatcaacgacgcaatcgatgaggttatgaaaatatgttagagactttgtgtgattaatgcaataaaccgagaaatgaaattgttaaaccgtatttacatattcagcccccaaagaaaacttcagtttacaaaacgacccagtaaaaacaaatgcgttaagattccccctaaaatcatagcggttaacctgctgactaaaccggtttacttctctaattgttcgaatttcggttcaagcctggttcgattaatccggttcttgcttccgttgctctgtaactgagatttgttccccggagacggagaagaagaagacgatgaagacgaagatgagaaaagctggccaaagaaaagccctgatttcagagaacaaaccggaacattaagcaccggcgtgattctgacattagcagagtacgatctaggcattccatggtgctgcttcattctaggtccaccggtgaagcttccgggactactcgagcttctttcaagtccatgaaacacgattttaccggaggcgttgagtctcggactatccgccgtcacggtgagaccccgagattcgatacacgccgacgatgatgatgatccgtcaacggaaggcgtcgacggtggatgattccgtcttggtttggctaatctgattcttggttggttaaggtttcgtgaatgagtccgcgacggagcaaagggattcgcacttggtttatcgaggtcaagcgagagtcttggaagatcatcgatctcgtggctagaggaagacgatgaagagagtgagagacgtgaagatgcgactgagattgattcggagatatctgattctttttgcaacggcgacgatgcggcggtagaagatttagatccccggtgaagaaattgcttaaacgatgacgttttggggtttgtggatgaagaagaagaagaagctttaatagattcttcttgttccttggcgttgacgagtctcttgagacctaaaagctctctccatcgagtcgtacaacgaggagctttaggagagaagaggtcagagatctccatctcaagtctccggcatgatttcagaacctctggtgatcctcttggttcggtggtagttgtgttgactgtcgttgacgtcgtcgtcgtcgtcgtcttagggccagagaacttcaaaggtacgagctttccgtcggagaagagctcatcggcagagagcattgtgaccggatcctcaaggcaaaactcgaaatccacaactggatcttggatttccggtaatgggtcagattgttgcttgtcaacggaggaagagcgtctgttgtcgtctctggttaaagacatccgagggctcgtccatccgtacgacgagaacttctccggcgaaacaccggcacttttaacgcaagcggaagccattaagtttgtgtgttggacttgttgataggagaaaaaagaagaatctttggagcatttgccggcaaagaactatgttaagagttagggagagaagtgggagtgacagagacaagcattatatacacagctcactctcaggtacaccgtacacacttgtttcatttaccggaaccattcgggtcggttgtttttaatgggccgggttcacctatcttatgggctcagtattatttgaccctttttttgttgtcaatgcttgtgttattgatagagtgaatgactgaatgttatgaaatttagatctggttcgtgtgagtatttatttttataagttttttttttgttattatgtgaatcgagtattattttttctcattatggtcacctaccaaccaataattgagtctgatcataggcacacgtttcgtgtattcatgcatataagcattgttttctttcaccaaaaacaatccctctttgattaagaaaaatatggtttacatccatagctaatcaatatgagaacacaaatctttttttataagaaacgataacgttacaattctagcatttcaaagcagaaaatatgttctgtcttaaaataaaataactagaattgcaaaagcttaagatcaaagagcttagcggcaagagcggatcaatctttatattatgataccattctaggcaactcttgttgagtttccgataaatggtgagcaatatagattaacatacgtattgcatgcccatattatgctttctaatttgagatgaagccgatacgagacaaaatctacgaataagcaatatatacatatttataacaaatcttcataaaactttatataagtatgcattacacatttcattggtgtaacctgaaaatgcaattcttagtcaaatttgataaaaataattaagagatacgatatacagataaattgttaatagttaatactgtcttttggaacctagctagctcctttccacaacgataaaagattccaaatcacattctatataattatgttgtcatatatgatatataaattatcataaggttgtgtcatattgtgggtattggatattactattcttcaatcgaatatgtaaaatctatgtcaaggaaatatcggaagggactcttggagtgacttgctatctaacataaaatctatatctcacccaccggtcgaatatttgtcttgattcaaaatttaatcttggacatacattaataatagcatatgcatggcctagattgcgatgtaaccatgctctacataataataatgataaaattttataaatcatttcaattacaaaatatacatttaaaatatatatagttgaatgatactttacctaatacgatattaagatgtattttctcttattgttcgaaggcatatccgaataaaattttggcatgcactgtcttttcctacggtgataagccttgatccgttagaaccctcagccgaaataaacttatcaaaaaaacaaaaacaataattcgtatgcatgggctaaaacatacaatattgtatcataatggaatgcacaataccgcacataatccaagaactttggttctatccaatcgaacggagaggaactataactccgatcaaagtacagttgaaattaaatagaaactcaaatagcttttgtctctatccaatattatcaaaaagttaatagaatcgaagtagtttgaccaagtcaactacaaacaaagcttttgttagttgttgttgtggccatcacttctacttctccaatgtcacaaacgacaacatcgaacccaatactttcactactctttcattgaatcttacatctatatatatggaccagcttcttcttcctcttcattattcaataatctctaataaacatgattttagttagttaacattcattattgttgttctaatcgctaataaatatttcaaatcatttaacgactactagcatgtaaacattaattacgatgatctgaggtaatggcgaaaacgacactggctttgttttatacacgaggcacagcaatgaaatagacatatccacaattaatgggcaagtttgagtgtttgtatttccaaaatccatgtataaaaatgaccattggttaattaattagcaaaacttattcaccgattttattaaacatataaatcgtggaatttagtatagggcaagatgaatggtccacgtctttgggccacgcgggcctttcaaatccagctgttcacatgaattattctcatttgattttactcggattatatgttgtttttaaaactaagcaatttgtgtgtctatgactacgtcgacaaatgattatacaattggcgtgtattttaaagacggagattacaatgcgataccataaacaataatcagaaaaaactgacatgtgtttcatagtataaactaatcctactaaaactatttcgaaataattaaaccattcagacacgtaaaaaataaatcaaaacattaatatactaaaagaaatgaaccaatggaagctagtattacattctttaattgttgtctcctgtttcatggcagccatgccactgtttatgtatacagagagcataatgcgttatcaagaaattaaaaaccaattgactaaaccattttaacattttcattatcttcttatgttttgtaacatgcaataatatagatgatatatatcatagagaatgtagactttttcatattattatctatgtgtatcctcagctattaattctgtctaggcaaaaatatgtgagtctgtttggaaatgattattgttttggatagagtacgtaattaataattgatttgaaatggaaattaaatactaacatatgattatagtataaagttataaaaatgatatatatagaagttgacggctttgggtgggcaattactacttaaaccaagggtcttcctcctcggacacacccaaatgatcccaataattattcttctctttatctctcttttcctcttaaccatccactaatcaaacactaaaacctagaaaaaaaaaggatcaaatcatggagacggaagaagagatgaaggaaagtagtataagcatggtggaggcaaagttgcctccgggattcagatttcacccgaaggacgatgagcttgtctgcgattacttgatgagacgatcgcttcacaataatcatcgaccacctcttgtcctgatccaagtcgatctcaacaagtgtgagccttgggacatcccaagtacgttttcattcattcttgacaacagtatctttattgatccatatatctctgttttactttgatatggttggtccatatagaagattatgtcatgatcttctttcgtgttcatggttttctagaaacaaaactttagaagttagttaattaatccatatctactaaaacaaaagttggaaccaataaactttaagatgatgatgtcacctcatttattttgcatccagtttatacaatgtagtctatttatcacaaaaaccttattcaaacatataacaatactagtcgatttatataatgttatggattggggtaaaattaatacacatatatacatactttataagtcttttattttcatgatcagatgattacaatttataagaaatttacatatattacgtaataatatgaaattaattcgagaggcatagataattgtatacgagaagttgacactcttggcgttatcctcaaccaaattcttgaaaaaaaagctttggataaaataaaataagagtaacgacgaaaaagtcaatatctcgattttgttggtttatagcctttagagtgtgacatattttaagtttcaaaatgtaaaattcgttgggtttgatcaaaattagtattcttattctctcctttgcttacgcctctaatgggtcctgattagttttcaaatcaatgttaaattgacccttcaactacataataattattcaatgcttagtcgtcattcatttgatcaaagatatttttctttatttcaaacaaaattccacaaaaaaaaaaaaaaaatcaaaatcctactcatttacacgcgttggattcctattcgttgttttggttgaataatcacatgttgacatgctttagttcaatccctcacggatgtatcttttatctatactattaatcgtaaatcctaaaatagccgatatatttgaacatggcatatcttataaagaaaaaaattctcgttatgagattcattaaacttttctatttattttcaataatatcctacaatttttttgttgattaaccaagttaagttttaaaagctaaatgtttctaaacaaaaggacaaaatttatactattgcgagacaaaaaagttggcgctaacatttaatcacatgatcagtttcattatcctgtagtgtataatacaactaagcgtgtttgtgtgtatgtttcaaacaaatgattagaaatggcatgcgtgggagggaaggattggtatttctacagccaaagagaccgaaaatacgcgacggggctgagaactaaccgagcaacggccaccggatattggaaagccaccggcaaagacagaaccattctaagaaagggtaagctagttgggatgaggaagacattggttttctatcaaggtcgagctcctcgaggccgtaaaaccgattgggtcatgcacgaattccgtctccaaggatctcatcatcctcccaatcattctctgagctctccaaaggtatacacagttaaataatccagttattgatcgtcagttaatctcttcttagcaaatctgtaacgagtaatatacgtgtttatgtgttgttgagggaatcaggaagactgggtcttgtgtagggtattccataagaatacggaaggagttatatgtagagacaacatgggaagctgttttgatgagacagcctctgcatcgcttcctccactgatggatccttacatcaactttgaccaagaaccctcttcttatctcagtgatgatcatcactacatcatcaatgagcacgtaccctgcttctccaatttgtcacagaaccaaaccttaaactcgaacctaaccaactcagtctctgaactcaagattccatgcaagaaccctaaccccttgtttactggtggttcagcctcagccacgctcacaggcctcgactcattctgttcttcagatcagatggttctcagagctctactcagtcagctcactaagattgatggaagcctcgggcctaaagaatcacagagttatggagaaggtagctcggagagcctcctgaccgacatcggtattccaagcactgtttggaattgctgatgatcgagtgtaacgagagttactattgctatattcctatccatgattggaacaattcttcggggggaaataacgtgtgcttgtctgattgtacaaacatttcctcactcttgtacccacggtagattcatgtaaaataccacttatgacgctagacatacatatatttcatcgtagttccatttgtttcaaggtattaaggacctctagaacaattgatcaaaaagataatatgaaacatcactacctgtgtacatgatgggataggtgattgaatagccaaggcagtggttcctgaaacagaatttaaataaatcaaaatcaattttcggaacaaaaaacctcagaataacaagttttcacggtaggaacatatattgaatcctttgagtctaccaatgcacatagattcatcaacgcataggcattcatctggtatgtatcatcaaataagcagaaactgtcaagataatttacattgcttactttcgtagatgttgccaattaaatccatcaaaaagcactgcgactggcactttcatcgatagaactgcgctggctatcatttctcaaggaacaaagtagagatttaggaagatcacatgatattccgatatgtatctgtttcatcggccgatagagttcacgagggagattgtcatagtcattttacatgattctagtagaatctttatataaatgtttttgttactctgttttgaggtattggggacacactcaatagggtacctataagcagctagaagtctgcaaaagctttgacgctgcagctaagccactgagaattgcaccttcaacatttgggctgacacagaaatctccacagattgctagattcctgtttctatcccaaaggcacctctcctctacggctatgcttttggctggaaacgcacttcccctagagacaacagatcattaagctgacaagcgaagagattaacagaaggcttaagagtcaggacgcttaccatctgtgggctttcatgaaaaaggggagagaactaacaaggcctgagcactgaaactctttgaacatctcttcagatattttgtttagtgtttcactcgatagcttttggaggccggtcttagcaataacactgttggcatagtctggagtagaatgcagtatccacctttcactaaaaaaatcaagataataacactcagaatttagaacgctgaagcaatcttaccccaaaaatttggttgcaacttctcaactactgtaatttcacatttctatattggttagtgaagcgatctacctatcagtagaccgtcccggcttggtgctttcacagtgagcccagctcaaaatctctgaattcttgaaagataagccctttactggtatctgattcaagaatcatagaatatgcaaaccgacagaaatcagctaaggctttcactagattactggattgatcaaccaacattgattacagactggaaaagcaaatatcttaccgaggacaacggctccttgaaagctagcataagagagaagcatggtagaacaggaatgttttgcagcttagtcgccaactccgggactagacttaagtctgtgtaggaaagcaaataaaagtgaatagagataaatgtgatataacactgaaacagcaactgcaggaggactgagtttgtgcaagtcttacccagaggcggtgggagtccagttacttgagtaaaccttggagaaacaatgtttttatctgatgcaaccactccatcgaaacgacccaaattttctccttttgaatctgtcaacaaccatggtatctcttcttccaaccattccatcttggcaataccagttccaaacatactcttaacacctacaatgttgatcacggagttgataacagagactgatgtttcagagatttgagttcaagctctcgactagaaagattagaaaaagtaccagactcattacacaaggccttagatatagagttcatgcccggaacacccacatacttctttgcatccccttcctacacacattaaaatcagaaattgattacttggaatcaatcaatcctagtatcaagcatcttacaaacgcatacattgaaacaagtaaatcacacttcataatctactaaagttttaatataagtacaaagactgatgtttcaaaacctgttggatgccaagaaacttgttggaggcacaatcaaaactcccaaaaacttgtttccattcagaaacaaaacctctggattcccactcatgaacaagagccatggcatcagagttgctcacacagaaaaatggagctccatggtcgaacatcaactccttcccatcttctccaatctctctgcttaaacgagacatcatcattcaaagttaaacactttataagtgaaaaggaacattcttaatcaaaaggaaccttctttgagacatgcgtccaccaggtccacgacccgagtcgaagatagtgacggagacgccattccttgccagagtcgatgcacacacggctccagaaactgctccgatttgaataattgaaaacttattttcatgaatgaaacccgaaaaagaaatctaagaatgaaattgaggaaacccacttccgctgccgattacggcgaccttcattgcgacggcaacgctgctcatttgtttcctaatcgccggcgaaattgttgtggctgccatcggtttgcactctgattacaaacagaactatgtctcgtttactattttcgctattcaactgcgtcccgtttctaaatttaaaaacgacacctcgttagaaaagtcacctttctggactccaagcaacaaatgggaccatggcggacagtccatgccacatgttaccgtaatcgtaatgattatacgagacaaatgtcaagccctccaggaggaagccgtctcgttctcagatattatttgttcaggttcttgttgttgttctttaagatatgtgaatagtgaaggaggaagtaaaatgggttgttgggtaatgtgaaatgaccagatttgaagaagaacaaaagctgtgacgacaagacacaagaagttcaaggagaacttagggggaggctataagcaagtaactagattccttgaaacgctgcgtttagtcatgttttgaatggggagagtggatgaatgtgaagactgaagaaagagaatggtttttatcagatgacatgggtgaaatgaaactcgtgaggcaaaatatataaagctaactttatttgccaaagatgttgatgcattgcatgtttgaaaaacgaacgttatcacatctgcgccaacatttgtggcagtttttatcatcgaccaacacatgcgtcttgttttattttttaaatttgttcagaaagttcgtgctagtgttagtctcggcgtcatacactaatgtataatatataattttttgaataattataataaaaattagctaattaaattataattattatatttagaattattttgtggatccgccactgttacatgattattttttaagaaagaaagatgtatttattttgataaattgacaacccgaaatttccacataaacttaaagaattgagatagtgttttactgcaaatttaaactaaaatcatgcacttataccaacttatacgtgcatatatcaaacgtcaccaattttgtttttatattactatgagtaaagaaccaagtaagcactttaacaaaccacaaacaaatgtaaaatacaacatattaataatcaaaaggaaattaaaggtacaaactacaaatcatcaaacgggggtatatatgcgtaattaaccaaacaaaaacacatcacaatgaaacaactcactacaacaatcttatgataaaatgtacatcatcaatcacatgaagtgatgatagttcaaggactcgaagtagttgtagaaggcgggggagagaagaacggaatggatgggagactagtcggaagagagggaatggatgggagattagttggaagagaaggaatggatgggagattagtcggaagagaaggaattgtagttggaaatgaaggcaaagttggcattgccgtgggaatggtgggaagatttggttgtggcaaagctgatggcattggaaatggagacattgcagtgggcattgttggtaaagatggttgtggcaacgtcgatggcaatggaggtagtcccattgttgggataggcagatttgggatttgaggaagaggttgttgttggagaaggcggcgtgaggctgagcaagtgttgatcatcattgaggaagagacgctcactaagaaagcaatgagaaagagcttgtatgatgccatcttggatgtgttgataaatctctaactatggttaagtgggcctctcaatttgtttcacttgttttgctttgttttgatgagaaattcaaagatatgcgattgagtttatatagtggcaagagtctctatggatatgaagaccttttattcaaatatcatatatggttttggttaggtgtactttatggttggcttgagctattgttagttcaacttaatgtgtgtttaatagattattttgacaattcaaggacttttattaaagttagttcaacaatcaaaaccatctaactctaatacgtacacatgttaagtctataaccaaacttttaaatatcaattctaagcttagaaatgcacaattacacataccaattaccaccgtaaagtataccaattacacataccataccaatttatagaaagatatgatatataaaataatctccaaaacatcaaataaaacaaaacgattttatgatcattatccgaatttccggaaagacgaacaattaatggtttgacggatctgaccggtcgaaccggattgacaaactattgaattttgaaaatctgtggtcatttcccaaaagtcaacctaaccagacagaattcaaaatttcgtttctttgatacagaatacgcttcgaaccttctcgagcccgtcggaactgtaactcagtattattctggcgccgatgactctccggtcagttcaatcccgcagtaagcggaaaccgattgatgtattcgattactctgacgaggatgaccgtgttgaagaaactccttcgcaaattcgattccccagttactaagaaaacctcctgcgccatcgataagtatgatttccttcgatgctgtgagtgtttcttctctgaatttctcattgaattttgtttttgggaaggaagatcttatttctcattgaatttccccaagtttaacatgataacacaagagaaggaagatgttatttctgtgttaatatctttctattgcagttgcgaaggatacccaaagggagagtaaagtattgcaacacatagttattgatgttgaaggtaatagtaggaatattatatcttggagaacagttctcaactacaaatgatgaaaattgtgtagaattccaaattttcagatggtagtgtgtgtggtagaatagaaataaccaattatggtttatgcagtcccagtaaatgaagaaccgtcaagatgtgaactcagcggagatggaaatgtgagcctttgtcatgatggagttattacaaggaataagaatggctagaaattttctaatttttgttgtacaatatattgcagagtgacctggttgatgttatctcccatggaaggattggtatcgattcatcaacgtcatcatctttgacggaaaatgatgaaggtttttagcattttagtattctctatctttagtttcagtaattattttctgtttgttatctcaaaattgcttgctctaaagaaactgctgaattcttttagtttcaactggagaagccacaaatcctgcttctgatccacatgaagttgtaagtcttttcgagtatatgctgttcttttaaccagagatagtcaaggatgacaaacaaaatgaaaagcataagctctacttcctctgaaaagttgttgatatgctgtttgtctcaagagctatgcacgtgggtttatatgcagatagtatctcatgttttttctgtttctgcatatacaggaacccgagaatgcattcaggtgtaaactacacaaagcaaaagcccagaaaggtgacttttctaacgaggtgtcgtttttaaatttagaaacgggacgcagttgaatagcgaaaatagtaaacgagacatagttctgtttgtaatcagagtgcaaaccgatggcagccacaacaatttcgccggcgattaggaaacaaatgagcagcgttgccgtcgcaatgaaggtcgccgtaatcggcagcggaagtgggtttcctcaatttcattcttagatttctttttcgggtttcattcatgaaaataagttttcaattattcaaatcggagcagtttctggagccgtgtgtgcatcgactctggcaaggaatggcgtctccgtcactatcttcgactcgggtcgtggacctggtggacgcatgtctcaaagaaggttccttttgattaagaatgttccttttcacttataaagtgtttaactttgaatgatgatgtctcgtttaagcagagagattggagaagatgggaaggagttgatgttcgaccatggagctccatttttctgtgtgagcaactctgatgccatggctcttgttcatgagtgggaatccagaggttttgtttctgaatggaaacaagtttttgggagttttgattgtgcctccaacaagtttcttggcatccaacaggttttgaaacatcagtctttgtacttatattaaaactttagtagattatgaagtgtgatttacttgtttcaatgtatgcgtttgtaagatgcttgatactaggattgattgattccaagtaatcaatttctgattttaatgtgtgtaggaaggggatgcaaagaagtatgtgggtgttccgggcatgaactctatatctaaggccttgtgtaatgagtctggtactttttctaatctttctagtcgagagcttgaactcaaatctctgaaacatcagtctctgttatcaactccgtgatcaacattgtaggtgttaagagtatgtttggaactggtattgccaagatggaatggttggaagaagagataccatggttgttgacagattcaaaaggagaaaatttgggtcgtttcgatggagtggttgcatcagataaaaacattgtttctccaaggtttactcaagtaactggactcccaccgcctctgggtaagacttgcacaaactcagtcctcctgcagttgctgtttcagtgttatatcacatttatctctattcacttttatttgctttcctacacagacttaagtctagtcccggagttggcgactaagctgcaaaacattcctgttctaccatgcttctctcttatgctagctttcaaggagccgttgtcctcggtaagatatttgcttttccagtctgtaatcaatgttggttgatcaatccagtaatctagtgaaagccttagctgatttctgtcggtttgcatattctatgattcttgaatcagataccagtaaagggcttatctttcaagaattcagagattttgagctgggctcactgtgaaagcaccaagccgggacggtctactgataggtagatcgcttcactaaccaatatagaaatgtgaaattacagtagttgagaagttgcaaccaaatttatggggtaagattgcttcagcgttctaaattctgagtgttataatcttgattttttttagtgaaaggtggatactgcattctactccagactatgccaacagtgttattgctaagaccggcctccaaaagctatcgagtgaaacactaaacaaaatatctgaagagatgttcaaagagtttcagtgctcaggccttgttagttctctcccctttttcatgaaagcccacagatggtaagcgtcctgactcttaagccatttgtgaatcttgtgttagctttaggaatctgattttcatgagatactaaacacacaataaaaaaaaaaaaaaaaagaagagagactaaccttaataatttccacaattgtttttattttccaatatttttttgtagttgggcctgaagtttttttaaaaatataacaaaacataacatcttaactttcctagttgattccgtcaaaaacaaaagtcaaactagttgatttatataacttttgtcaactaaataaataaataaataaaataaagggcttgattgattttttggatataaaagacaaatccctattcctcctcttcatgcgtcccatagttccccgtcacaatcgcacgtagtgtagtatcttaactcatcgaccaagaccatcctttgtttctttggtcgtcttcgttctcgttgactgtatttggcttctcaacgctaattaatcaaattgcgaaccttatataattgacctttgttttttgacttaggcggagccctaaaatcaattactttttcttcaggtcaaaaataggaggagctaggaggctttggtcacatgctctgttgaaagaaaaatatgaataataataaagaagttcctcagaactctgttgctgtttcttcgtcatcgtcggcaccaataactgttatttctcctcagcaggatgctaataatttcataaagaagagacgcactgctttaagaaatagaatgtaacataatcatcttcgctctctctttattgcccttattatacatatgttgtctcatgatcttatctttaatttgctatattaaccatcatatattctttctccagttatgctatcgtaagacacaagcagaagcagcatcaaatctttctagacaagaagaatcagcagcaacagcagcgtgttgatgatgccacgcaacgtgctctcttagagaagcaggatcaacagtgtattgcggcaacaagaatgattgaggaagaactcctcaagtcttctcgatcatttgaggagtacttcgatttaagaacttttgacgcccgtgtacgaactatattgcaacagcttggaacaatgctttctcagcggcgtgctgctgctgctgccatgaataacggagaggctcaatgtattacatctacccgagcggtccatacttccataagcgttagtaactctttccaatgcggaagaagccttgtgccaattaattgcaccactgcaacagctggaggtacacatctttgatctctcctgattctttttcaaattatactgacatgctgttctttattttgactctataccttatcatctgcagcattttctattgggcctgacatgcagacacaccattctactggtgctaatcaccagatggttgaagttaataggccgaatatgaaccaaattacttgtgggatctctagtcctctgattactggatttaacggcaactgtgtaccagtttctgctaatatacccatgacttctcaagacctcttcaatgctacacatttttcaactttacctcaaccttttctgcaaccaccacctgatcagtcacacatgcatagtaatctctctccctatctcttactatctatttcttttcgctttcacttttcttttatgcaattcatgtaatggtacgtttctgacaagttgctttctcccatgataaggatactcaatgagcaacgttgcttcttttggtcaaagtaatccatatccctgtggagttgttatgtcatctggctcaatggcagttgctcagaattcaattccatggaacaaccccaatcctatgcagggacttgaccctaccgtcacaagttatcactcaaacctgcaaccaatgcaacaaaccccattgcctaaacgtcaactacatcatcccctgtggaataccaatttccaatctgctcccaataacagagacaatttgcctcaggtcagtcaacaactctcaaatcatgggtctcgccagcaccgaggacaacactcccaaaatctttatcctggccaactccagaaccaagatcgtttacttcccaatctgactcagcaagctatggctttagctgctcctgtcatgcatgtaccaagtaaacaggttaatgaagattgtggtcaaacgtcttcgaacaccgttctgcggtggattccgtttatgttccatgcacgtcattgcaaggctaagaaagataagtgtgcgagcaagttttgctttcaagccagaaagatagtgaaacatatagactgctgcaaggtccctaactgcaaatataggtattgtcttggtactcggatgtggttagatcatttcaagcaatgcaaaagcatatcgtgccgtacctgtgtagctgtcagagaatacatggaaaagaataaatacacaattgtacctctccgtagagctaagtgtagctcagctagttcaaaatgtcaacccaagaaatcctcaaaatccaggcaagcatataaaaaaggaggtgctgaagctccatctgttgatgctgatctgcaacgctcaatcaagcgcccgaaactacatcgaccctcccaaaatatcactcccgagacaaagagcatttcggtgacaggatgtggtgttgtctgtaaacctcattccttaatgaatatgcaagagaaagatggtttgcaaagcctcaaagttgaggctatgcctatggacattgatgttcctggtgcttctgagattcccgttaccagggagctggtgaaacatgttgctgaagatactcccaagggtaataattgtggtggttttgctatggttgaaaaaactagttgcttattggcacaagggaaatccaaatgtatgaatgaaatgagtgcaccaaaggaagagaatgtgaaacagtctgtggaagttgtagatgcgtctaagatggaaatctcctcacttgttgaattgtttactcctgagcaagtaaaggagcatatccgcagtcttcgtcagtgggtaggacaggtaaacattcagattttaaaacttcaattcttgtttaacctttcttggttttcacaaggtcttatttttcctactctgtatccttgttctgctttttgtttgtttgaaagtaactaagaatgcacatggctgtgaacgatactaatttttttgtttctttgtaattctattttcagagtaaaaccaaggcagaaaaaaacaaagcaatggggtgctccatgtctgtgaattcttgtcagttatgtgctgttgagtggcttgtatttgagccagtacctatttactgctcaccttgtggtatacgcatcaagaaaaatgccttgcactatagtattgcggttggtgagtcaaggcactatgtctgtgcaccttgctacaatgaagcgcgtgaaaaattggtttttcttgatggaacttctataccgaaaacaaggcttcagaaaaagaaaaatgatgaacaagttccggaaggggtatgtatgcctcatgatttcggaaatttgtttcttcctttgtttttttttttctttgttttctttttttgtgtgtgtctgaaccaaaccaatggttttctgcagtgggtgcaatgtgataagtgtgaagcatggcagcatataatttgtgctttgttcaacagccgaagaaatcatggagaatccaccaagtacacttgccctagttgctatatacaagaggtggaacaaagagaaagaagaccattaccactaagtgctgttccgggggcaacaagtttaccagttacttctcttagcaagcatctagaggagcggttattcaaaaagttgaaggaggaaagacaagagagggctagacttcaaggaaaaacttatgaggaggtgatctctaactctttaaggctgtcaactgttttatgcttttgttcttttacgatacatgagctttaggttcacttgaacagcctggagcaaattttgttataataaccatctaccttcattattgatatatcaggtcccaggagctgaatcacttactgtcagagttgtggcatcggttgataaagtattagaagtaaaggaacgtttccttgagcttttccgtgaagaaaattatccatctgaattcccttataagtccaaggtagcaatggttcatggtatttgttcttattcattttcatgatgcttgtttgtcacttacaagatgtattttctttatatatttcaggccatttttctgtttcagaagattgaaaatgtggaagtatgcttgtttggtatgttcgttcaggaatttgggacagactctggacctcccaatgagcggcgggtatacctttcttatctggactctgttaagtatttcagacctttcgaactgtgtctggagaagcccttcgcacctttgtgtaccatgaaattctggtaagccgttttatctctaatcccatcttctttaggtttcgtgttttgcttcacgagtacatgaaacttatcattgttacgaatttgcagattggttatctcgattattgtaagaaacgtggttttacaagctgctatatatgggcatgtcctccacttaagggtgacgattacattctttactgtcatcctgaaatccagaagactccaaagaccgacaaactaagggaatggtatgagatcgcgactgttctgtttttacttgtttgtcagtgttatgtacatttgttggcactaatcacattcctaccttttcaggtatttggcaatgttaagaaaagcttcaaaagaagatgtggtcgttgaatgcacaaacctctacaatcatttttttgtccagtctggtgaatgtagagctaatgtaactgctgcaaggttgccatattttgatggagattactggccaagtgctgctgaggatttactacgccaaatgaaccaagaagatgatggtgagacaaagttacatagaaaaggattgaccaaaaaggtcatatcgaaaagagccctaaaagccgttggccagttggacctttctcttaatgcctccaaggatcgacttatgatgcaaaaagtaacttcttatttctccattccactattatgatcttgcttccaccagcttttatttatttgttctgtttttctgtagctcggtgagaccatttgtccgatgaaggaagattttataatggttcatttgcaacattgctgcaagcattgtaccactctcatggtatctggaaaccggtgggtctgcaatcactgcaagaattttcagatctgtgacaagtaagatctctgctacatatatgatcatactcaggctatataatacttcaaatcattcgactaaacaactgtctttcaaccataggtgttacgaagtggaacagaaccgcataaatatagagagacatccgattaatcagaaagagaaacacgcgctatttcctgtaagtttctaatggtggttagagatttaagagtttcattctctccttttgtatcttagaaactgacaaggtgtggatctttgcaggtggccatcaaagacgttcccaccaagattgaagacaaagataacaacctcgagagcgaatttttccataatagacaagctt

SEQ ID NO: 97 - DNA, 100008 bp, Arabidopsis thaliana
aagcttcacacgaaacatctttgcaagaacaacccctttggctcgcatagctcctgatttgctagctcgtatagctctctgaacgtcattcaatactgggactgtcttgtcgctttccctcttcgatgatctctggctacggaatcctaattcaaaagacctaatcctatcatgaatttcatttcctatgtctcgagtcaatctttgaacagatggatgcagaactatcacagagcaacgactacggtcacaatcatttacatttggaacacgaataccaacacatttgcagagccctttgtcctgacgcctgtctagaattctgtaaatggttttcctatccaccttggggctcctgtccttttcaaaagtaagaagccatttatggaactccactctcaaaacaaacttctcctcctttagccaaccaagaaagaagaaacatatagtcagttataggggggggggggaaaggagaaaacgtatatagcaagtaacgtggataaagagaagatgtaagtacttttaaacgctcaagtattctgtgctctctcctagagttttcaatagtagcatgaggttgctgcacttttgatttagccgacttgggtaaatcaggggacccttttgcagcattaacaaccttctcaccgatctcattgaatgactcttgtaagttacgacgtgtaggtacctttcttcttttggctcctgaattcctttcagaatcagttacacttgcaggtgtagtagaaaagtcagcatctgaaattgcagtactgtgttccattgtggttttagttttagccaatccatcagtaccatgaggtgtactagaatcattatcttcccctctaatattttcagctttatcaggaaacttatcagaagacttggaccgagcatgacgagaagtccaaagtcgaaatactcgagtcttcttgtggctttctgcctgtaaatgcatcccaactcttgaacatatactacaaagccgagcatagatcttcttcttatcaatcccaagtctttcacataactataaaaataataatcagtcatgactttatgcatactaaaaatattactattagccaaatctatcaaatgaatacctccataacagctaagcctttagatccttgagcatcaaccatatcataaatttgattatctattgaaagctccaaagtctgttctgttttttgaacactccttccgaattttatgagttgctttttcctagaatagttaaaatcttctgctgaaaatctttttaacaaacggagacatctttcaacctacaaaaaaaacaatccacattatatccatccaaaacagaacagaaatactaagtaagagcaattggctactagcacatgtataagcataagatgcagattatggttcaccttattgttcaccatggcatcaaactcctctactacatgagaatctatcaaccggcgacaaacctgatgttataccacaagaagattcattcagaatattctagttgaacaagtgaataaaaaagtaagaagacaggaaaaatatatattacacttctccaagctctatgccttatatctgatcccgtataaccaaggtcttgcttaatgtccgagataactaaaacctgcactacaagaaaatcagtatacattatacaactaggcaagatccatcttgataaacaataatgcttcgagtttactaactttgtcgttagctttttcgagcttatcacaaacttcctgcattgctggtagaaaatcgttaatgagcgtgtcctctccggccgcagtagtctcatgctctgacacagagtcctctttgcaaatctcaaacctctgttgtgaacccataggcttggcgtaacgagttaagtatatcatgttggtggtaatacatgaagttgtcttggaatcaacttctttagttctcactattgctggttgcctaacaatcaaacctcgagattcaagctgctttacactatagaagaagttccttccatcgataccaaactctttcgcaagcagattttgtgcatcaccattgtctctacatgaacatatactgttaattatcacaactctgtaactaactataaagtgaaaacatgaatttaacttacctagcaatagccaaacgttcaagaacacgacgttgaatcgcgggaatagtcgtgttattcgattgagtatcgtacaagccaacgaagttagctcgtaagttctcattcgcgacgattctcaaatcgagtcttaaggcatcatcaaggttttgaatcgaagtatctgatgatccgtacactgtgttcttcttcgtcttgaattggagctgagggatcgtgagaagatttctccagacatgtgtcttgatggaagaagagagaggagagagacgtgaccataaagtaacgagagggattcctgtgtttccttgagaacagatttcatcaagtgctgtggatataatcgaatccatctctctagttagggttaggtcaaccgaatttttttaccgatagggaattagttagtcgatttctcaggtcactgggaaaatcaaaatactcgtcggaggagttttggaaattggatttatacaagtgggagttgggagatgagggcgggatcagaggacggttgtgagagaaagagattctgagttcttggtgacgggttcgatctgaaacaactgtgaagaatatattaatgaggagattttattatataattaacatgattactaaattaaatttctttaaattttttgtacaattatagctgttcgtcaggattctatgcaagagaagatattgaagatgtccatcaagagcatagaaaatgagaagaggtatcgtctgtcgtggatctaataaggatcgaaaggaattgtccgtcgtctatgtaacagttctcataatttgtaataaataataaatttagacggcaaaaaaaaaaaaaaaaaaaagttttgtataattttatttgaaatatgtttattggttttaacttttaatattaatgaaaaaaatagttatttcctttattcattaaattgtatttatcctcaaatatgatgtaccccttttcttttcaaaatattaacaatgacattattactttttactttttggagtttgtcatcaaccttttgaatatcaaaaaaaaaaaaaaaaagtatcattagtcatgatttcttattttctacatatccaaactattcaaattctaaactttattgtttggatatgggattttgatggaaaacacaaatccatcaaggcatcaagtattggcagatccatttttaaaccacacaactaaattatattatgaattattaaactagttttttaaacaagaccatctacataatataagcagagattgtgtaacaagcaaaatataaaaacaagaagatccatagtatatagaagactgagcaggcaatgctagcaaaaccctaaacacaagtacacaacatcataataagaaatctaatagggagacttagaatcagaaacagagcttcatattctaaaaccgcacagctagcatcggtttgatatctatcataaagttttacctaatgacgtcgttctggcgaccaatgcggcaacgaagggctgaaatgagcagacacaactctagagtcaagcagtttcatgatcggtgtgaggcttacgcacctcgggaccttatactgattaatcgatgaacctctcgagatggaaaagtccatgagctcctcaaacgtgccgttctgcaccacacgtatctccaacggaccgatagatttatctgaaacccgactttgtctataaaccgcgttcagcgattcctccatctccaaacagcacttagccatgacttcgtcactaggaagagcattgctttggtctctactaagtagctcccagtagattacgtaatgaccaggtatagtcttcgtatctgcgtagctcgtatactcgatcacacgtgttccttgctctgcaagcaacctcgacgcattctccactgccttttgtaaatcagcctcgtctgttttatcagattcaatgcttagcaaaacattctctctccgtatgaatttgaactgtggagcggaattatgaaaccccgtgacacgaagaatgtcgccaactctgtaacggtagagccccgcgtaggtcgtgatcacaagttcatactcctttccaacctcaacatcagctagctccacaagtgaggttgcttctactcctccatctccatcgtgattatgtgggaggaattcgaagtaggccatgttggggaagattgtgtaagaaacctccgagggtttacacatcggatttaggttaatcccgaagtaactttcggatgaagcataaatcatgcttgccattggtaacccaccgctatagtactccaacattgggatatactcagccattgcaccagtaacaatcacatcaaggtactttgtgttaggccatatctttgtgattattccttcccaattctcttgcgaacaaacccctatcaaaaactcagccagttcttgatcaggtttgttcaaaatattcgacattcgagttttaatcgcatgatcaaagattttagaacttagggtcccggttgagatatcctgagaaagttccttccaattgttctggaggaagcttatggcacggaggagaccagaaggaaacaccgcaccgagtcggttaacttcatggcgcattaagagaccacatagcatttgcgtatacatgctttgagacgagtcacagcagaggatggcttccttaggactagtgtagacgctgtctgaatccgacgtcctgaagtagtcgcttttgtagtaactagtgagagctggacgagccggtaacccacctgatgtcgtagactccgacttcacaaataagaagtataaacctttgcctttgtctaatcccggcacgtagctgtagttgttaaacatttttggttaattttataaatcgttacaattttgtttaataatgttaaaagtaatatactaacagattcatcacaggcatgagaagattgcctaaaagctgacgtcggtttatgtcttcttcaattgtcggcattaatttcctctcgccagcagatgttccagagctgcaatacacacaaaacattacaaattaattacggtaaaaaaactgtatagtattctataaaatattttttaacaatttgtattatggtgatcaaaatcccgtcattgaatttttttataacaacgttttagtcattactaaaaggatggtgacctagtacaaggggattggtactccttgataaagttgtaaaaacaaaagaaacgatattaatcattgatatagttggttgacttaagtaacataccttgtgagaaactcggtgatgggatgagaagacaagatcggagaacgatcaccgttggatatacgttgaatatccgtcttcaaatcttcgtagattaccaccggaactttgctcttgaacgatttcctatcaacggcaccattaagatcgaaccgtttcagatattccgtgttcgagttacgactaagtatctctccaagaaccttttcttgaaccgagtcagggttccgagtaatctcctcaatgaacttgagagccttcacctctgtctcagatgtcgtcggtgaagccatcccagattgaagaagcgaatcaacagccatgatttatcgaatgtttttgtgtaaaagcaaaagtgtttaatattagcaaatgtttgatgagtagccaagagaaggttggatttatagaaggggggaagttctacgtcagcaaagataacaagtcaagtgtttaattggtagagaatctcaccaatatagtagatttattttaaattaagtagggaatccccattatcaaatacaattttcattggttggtacgtatctcataaataagttgcacaaaaaaaaagtaccactgatcactgatcagaccgtcatcttatttacaaatatagtatctactttaccatggaagtatgatctttaaagattaatctaactatatgtctcgttactttcagttttgcatagtttcattgttgactataaatatttcacatagttaagattgatgatgtatttataagaaaaactaagataaaaacatatattgagctcatatattcctaattgaaaaacatcaaataaataatattgaaaattaatttaaatcattagatatttttagttgaaaaggaaattcaaaaaataaatatgttaaatgaaatcatcacagatttcttttttcttataattcacactaaaaaataaaaaaactaaggaaaaaatattacaaagaggaaaagaaatcatatattgatctcacatatttgaaaaagaatcttaagtaaatattgttcaagattaatttaaattattaaatatttccaattggaaaggaaattaaaataaatattataaatattaaattaaataatcaaatatttgtatttatttacataatttcatttttttatatgtgtcaaaatctgatcgatagacttgacacgtctcacaataatatgagttataacatttgaaaaccaagcttgatataataagatatcagtagccctgccttaacatatagttcgacccttgggcaaaaaaaaaaaaattggactatgtattacctaaaataactttttagattattgattaaaataacttttcagattattgattaaaaatattagactatgtattacttaaaataacaattcaagttattggttaaaatctggaccattttgtaaattacttttgatatgtttttttttaattagaaaggcatttttatgtaaaataatagatttaataaaattttgggccaattaatagttttttgtaaaaatataaactcgttcttcgtaaaaacgtttaacaaaaacagatggtcgcttgggtcaccgtccatctgcccaccttatttgggccagacttgtatataaggagagagtgagcggtcattgcttatacaagaaattattgtattgtacgagtagagactaagaaactgttgggtacaaaccaaaggtctcacatcggaaatttagaaaaagagtttttaatatataagctaagtccaattccaactagtatgaggccttttgggaaggaagccaataacaaatccttgcgggcttgagcatataagcccaaagaagacaatatcatactaaataagagttggaatgagcttagagagcccattaaaaactacttctatattgctagttaaataaaagaaaacatcatctagtaattatgtatgcatcgtctatttttgtatgttttattgtattatgcaacatctatatgtgtatcctcgaactaggaataaactgaatcctcaaaaatggtttatcgggcctaggtacaattaggggagaccccctatttctaagcgaaaggcctatcatcatgagaagaagagatcaagctcggcctactagaaggattactttgaatatacgaaaaaattgtagaatatatccgggagataaaaaaggaagatcttgaagtaaagatatggaaagaggatacattccacgacctagaaggacgagatccacaatggaacactcgggaaccttaggaaagtacttacaaggaagaactttttttttttttttgtcaaacacaaggaaaaaccctaacttgagtttaacggaagaataatatctttgtatttgcgtgcttgtgttcttggaatcaaaaaagaaaaatattttgcatccgtgttgtttcattttttattcctctggttatctaagatgttaaatttaatccgtacaatttggcgtcgtctgtgtggaacgctacacaaaagttccctcagaatctaccactaagctaagactaaggccaatcaaatacgagagaaagatgaaaagacaactgtcgatcgacaatggtaacgctgccaaccttcccagattaataattcttaatgtggaactagaaaaaaatacaacacctaaacaaaataaactaaaaccggcggacaaaatgaaagtttcataaaatttgtcgtagaaagatgagttttttctggaatctaaactatatggaagggaaactaaagacggtataaatacaaagcaaaagttatcaaaccaagatcaaaggaggctgaaacctttaactaagaaaaaagcaaacatgtttaaaccctaagaaaaaccatagaccaaaaaagcaaataaacttcttcttctattgcacatgtgatgagatttaccaagaatgtccactaccaacccaaaaataacatcaatcacctcctttcgcaataagagtcgatttctctaaacaagaataaataacttcataacccagcaagcaaaaccactaaaaaaacgtcaaacacacatatgacatactcattcgtgtacattttttcttttcttatgaagatatgtcaaacagaaattattttacagcaatgaagatatgtcatttcaggtaactgatatggtaatacggaaaaatatcctagtaatatttggtcagcaaaattggttttgccataaccggaaagattccaaaacaatcgtcactttaaaatcaaaccaaccgaacatcgaaaagattcgtctgttgttgtcttcttcttcttcaacttgttctttgtttctctttcgcctcttgagttcctcacttcttggttctaccttcattcatgtctctatccaaatctatctggtaactcaaaatcatcacttcttctactcaacaatttcacaatcccatccccaattttacaatccctagatctccctccctcttcaattcgctgtagttttcatggaccttgttcgattgagagacataggttcaatttcacctcagagaagaaggaaatggctgattctattagcggttttcggtgtttcgggttacggagtttacagggtttacaattctcaatacatcgctaagaagacgaagcgtcttatgaaactcttctcaggcattgtttcattcgccgaaatggtcatcgattccgcggagacgataagtatcgtttctcgagatttgaaagagtttctcgaatcaaattcccacgaaatccctaatagcttgaaacagctatcgaaaatcaccaaatcaaaagagttcactgattctctagctagggtttctgaagctgtagcgattggtgttttccgtgggtataattccgatccaaacgtcgaaaaagaatcgaatttgagtgtagttgatagagttttctcagaggaaggagctggttttgtttctgttgttgttggtagttttgctaagaatcttgttcttggattttactctggtgagattgagattggtagtgatgattctttaaaacctagatggatgaatttgcttagtgatgataagtgtagagagcttttagcagattgtattgagagattcactagctcagctgtatcggtgtatatcgataaaacggttggtgttaatacttatgatcagatattcgctggtttgacgaatccgaaacatcgagatagtgctcgagatgttcttgtttcggtttgtaatggagctcttgagacgttcatgagaacttctcatgatgtcttcacatcttcaggagagaaaaccgattcctccttgaggaagtcggagaatcgagaaaacggatgggcagaggcgctttcgactactttagcagtgccgagtaataggaagttcatgtttgatgttacgggaagagtgacgctagagacgatgagatcaattcttgagtttgtaatcttgaaaacgtcacaaagttttaagaggagtttggatgtgattcatgaagaagttacagagagaggacgtcaagtagttggatacgttggtgccaaatcttcagtgataatcactgtttgtcttgcggtttactttcacatctttaaccgctttgttcgaggccctccggtttgtttaagccagcaattctagttaatcggatcgatctattagcttgttagagttgttagggacattagatcttcagccttccatattcttattggtaagttggagctgaatagcgtagtagagtcttagcagtgttatgtacccacatattcattattgtttatttatagaggattcttgagataatctctgcatctatgctaccatttccagtcaaaccatataatgtattcgaatggatgttgccggcggagcggactaggcaactctatttcttggggcggatttatccgcatcaaatttatctttatgtaagagccgtatgtagtaaaatatttttaattttttcgggcatattaagacggactataattcatgaatggtaaataaaaaataatctactccacaaacggatttatccgctaacaaccatgaaagagaaaaaagatttaattgtcactgtagcaaatcggcagttattgaggtttccccgctccgattgacgcaacacgccaagattttgccaacgctaaagcaaatcagatcgaagatttgtgctctcttctatctctcactcgcatcgaattcagcaaaaattaaaattgaagaacgagtcaaagatagagagagaaaaaccctattcgatcacgagatcgtaatcaacgtttttagcagaatcatcggagggtagaaaaaatgctcaacgatggcgaagtaactccttctaggtaaacaagtcagattcttttgttgttctatgtttgatctcgtgcttagttccagtcactgctcaaattgaaatgagatagttttctatttgatgaattttgttattccaccatgaaattgcttaattcgaatactaagatttcgtagtaattcagcatttatttgattcgatcttgcttaaattgattttgttgtctgcttcatgttttttcagacatgagattctgagtatggtgaagaagcactcaaagtcattaggaaagacgtctcttgatgagcaagatgcgtctgatgtagaaatggactctaatttctggcatggtgtgtttgatgtgtactttgttcgttgcatggagtcgaggaggcgacaagacgatgatcttctgttttttgtcaggaaattggtatgtaaagcttggacctttttctctcagtcgaaaacttagaactttgttatcatccttcttgttaatgttgttgagtgttttgttgcttttgccagagctgtaagtcatatggtttgactgaaaatgaggatgcaccagctccttactttgtacgcaggtgggcacctaaggtaaaaaactgtacgaaataatacagatacctagttagatctcactacatgaggtttggttttgacatgtaacatttcaactgcgatgtaaaaattgtatattaacaaggtcttagattgcaactcccctgaaggtgatggaaatattaattttacttcttttcgggtgagggattaaagtaagctagagtactacgtgcttattgtaaaggattgtcttttctggcctacatgctaaagcttttcacgatccatcatatcttatttagaccatgggacagagacacttcgagtaaccatttatttgttgtgttgcaccttgtatgtattgtctacaaacatatgataatgcatttctttcttacttgtaaagcagttagatgagctgcttggtgaaagtctggctgaagttgattggaggaaatcattttatttgaacatgattgcccacacatcgttcactgttactgttgcgatttgcaggtaaccgtttcagtcagattgtgattagcggcatcctgtactaatttcatgttgtctaatttacagcagttgtcaattcttgttctgttattgctaatattactatccttctttcctgtttggggttcaaactcatcttattgcatcaatcattacttcagtctagctatttattaggttggaatctcagataccatcttcttagtttcagtgattaggccttgagtcatttttatgacatgttctctggtctatatactacttatcatatgactttttgtctttccatttgactgcatcatggtaactttgtttgaactacttgtgtttttagtaatgaggcccttaagacgtaccaaggaagtaaagacacaaaactatctcctatatacaaggttagagatcctaagagttttggataatattactcttgacttttcaactcttctataatcttttcatatgaaaaagaaactgaagccaaagagtagttatatactctgctgttcaaaatatatcagtgcagctttgttctaatcatcaacctattaagaaaagagtaaggaaacggaatatgaattcagttttgttttcataaggagaggacttttcacatgagtcttggaccaagcatatggatatttctttggtttcattttctgtaagtcaatagtaatcatgttctctaatctgacattcatattgtgcaggttgtaaaaactgtatatgcatcacctagtcgtgttaattttcatctggactcaaagaaggcaagtatagtcgcttttctcataccaatgtttgtccttttggaatttgtgtttgatgtttccattgttgtttacctaggaagtggaaacaacacctgcctacccagaaatttgttttgccgtagatgattttgactcaacctttgatgctgtggtaacaaattttcttctccctttttgttgtattgtccttccaactgttatattatgtagtcatttcgttcaaagaaactctaaacatgaatgtcaaaggaattatgacattttgttcataatgaaatcggctctggaagaatagtttttagttgaggaaatatgcatgaactcccctttgtcactagggtgaagttacgtgcattcttagtttctccttaactggatagtaaaatcttttgtaggatacgtttgttggcttttggtacaggactggaggatccagataatattatttcaactacctcttgcggtgctttaacatcctctccttatttgagtttagtacctgctatttattatcttcttcagaggattggcctgtcttcttctttagttttgcttaggcgtagaggagtttggctttatgattcctataaataacttaagtcgtatggttaggtttcatgcatggaagttgttatactgaccatagtttttttccaaccttgttcattggctttgtcattgatgttttcaggttctgacagataaagatcattgctattgcgtactacttaattctcacgatggggcagcctttccaagtgcaactgttaaagattcgagtgattctaatacgaatgctgaccctagaactgtgaaagatcctaaggtctagttttttcccacctatgcttcactattttcagcagttgctgccaatcatctatcaattattcatttgccacctgctatgagtttcaaatagattccttaatttgtggttaatgcttgaaaatatcttgtaaccatgtcatacagaggaatatgtcggtagtttcactgatgcttgcaacggtcgatcttaaacaaattaactaaagtattgtttgtgatttttgtaaagatgatttaacttcaagctcaatggttttcaaaaggcctatggacacattacatggtcgtgactttctaatgagaaagaaattgacatgctggtgcttttggttgcaggttactctgttttctgggtttgtcagctatcagatggttcgagaagcctatgaaggtcactttacagtttcttttctatttcttattcagttttagaacctagttcaattctccagcaacttttgtagttatggtttacttgccttagtcttctagtacttagcactatcattgtcgatctcggtctttcatatttctcccaaaatatttgatggaaagtatatattaagggtccatgatagtacggaacttggtctcgagcttgactccactatagcacacagaattcattagtggttattcatgtcagggaaacatgcagtcttaatattcatgcctttactcatttactcaaaaagtaaagtcgaaatttttggaagtagtatggttcgtttagagatcaaggaggtgtgaatatgaaacggtacccaacctgacaacctcaagatggctggactacaaaattaacttttgtagacatggaattttgagatattaagagctaaaagacctaaaggaacctattgcttgtttccttgtctatataggctgagatcgctttcgttgatttgggctaattaatattttcacgctttatgttttttcatctaataacttttattacaggggggaggaatcggtttggaagtctcctatctctcggtcatattacaggaaaagcagacagactttatatgagaggcccaggaggacgtggagaagttgaagtagctgtttctggcgttgtaggtacttttcatttcttatgcttgaatggctctttattttcctgttagtgttttgtttccctattttctcgagtgttacagtgcagttagtaatattccatggaagataaaaaaaaaaaagtaaaaacatagagaatgccctagccaacaattgtcttaggtcggattgtcttaatagcagcaatatttaagaagtacaatcgccaaaatttaagagtaggagacttgttgaaatgtatattgaagacgtagtatggtttaaaggatgattgtatagaattgcttttctcagatcagagccaagtagttttagggcctgtttcacctatgtcttcaaagaagagcatcgatctcggatccattttccgtaaagcagcctctgttgcatctgtcgcagctaaacatgcaatagcagctgctactgcctcttatgatgaagacgagatgttccctcttaaatgctgcttaatgtccatttcattaccatgggacactattgctcatgatcttttattcaaggtaacaaatgatttctctttagccacaccggtcgtcaacaatagacactaatagatcttttcgatattgctgatcgattccactaatcgtctttatttaggcaactccaccagtcaacatggagtagcacactctggaatgaagcgtaggaaacagaagtttgtgtgttttgtctaaatgttttttttttttgtactttgattgaatattccttttgtgatgttactcgactatgtggtttaccacaaccactgttattacctcaaggaataaatgaaagtaaagttgtgaatttgcaatcatcaagtctatatgttttggctactcttcttgtttagtataatgtggactcgctcagcctatactttgacaaacagaatgaatttcggttagttaatcaaggtccggttatttatataaaacttaagttcggttcggatcgataaatctttgattcagtttggttcggtttttaggtcgatccctatgagatacagatgtcttgcatagaaagtatagaagatatggtatttaaacatgtgaaataaaacagctttttgccatcttttgttggactttacttgagaatgtggaatgctaaagaataaaaagaaattagggtagacaaataaggaggaagcacatgaatccaactcttggtggtagacatttcttattagatgacaaaactctgttttaggttaaactaaggtgtatagctttctaagaaaaggaattgtgttaaaatatagatcggttgttagacatttcctaattagatgacaaaactctgtatctgaggttaaactaatgcttctattttaataacaaaaaggaattatgttaatatatagagagtcggttatagaagttgtgaaaatgtgaatgcatgttttagtccacttacaaaaagccacaaaaagtcacaaacagtggactttggattttcttgaaacgtgattacaaaggtcaaaatataagaatagtatgttctttaacatcttttgccctggaaataattgtaggcaaaaaaaaaatgacccattatctaaatttttaatttaacaaaaaaataaagtaaaataggcaagattggttttataccccaatggagaaatatttcaatatgtcacagtattataaattttaacggataaattttctttcaaaacatgtaaagatttacgaaaatacgtacgaatatatttaccctacttaattaaaaaaaaaatgattcaaaattataatgatactataaagagaatgcagctgtagtttcacttgtattgtttactttatcttactaaaaagataagaaaatccaaacacataataaataaactaagacgtaatatgctttttgttagattcttcgccattaagctaagctctcatcttcttcctcttgtgtcaagacctacacaccattttctcccctaagtcttaacttaataagttgtgtagaaacttaaaaaaaatcttttatgtatagagttttatctgatattttttttgtcaattacatgtacttaatatgcgagcttgaatctggaatcgtttctagcagtagaaggataaagtgcgtgccctctttttatcacattgaaaaaaaagtatatgaaaatgatgcattttattggtttgaactctgaacctactgagtatctataccaagaaatcttacacaaaattggtctaataactaatatatattttgaggccccaaatcaaaattttatgtgcttgtgccaaggaaggatcggtcatgatagattgatagtaacacaacgacaatactaacagaaaccaataggctataaatcctattcattttattttttttacaatatagttatattttacaagtttttcagatattattgaccctctagtattttaccaattatatagtttaaatggtgacaaccttaaacacccagtcctttatattaatcaaaaaaacaaaaaaaaacaaaaaaaacaataatcttacaatgacaatgtgaaattaatacactatctctgtagttaaaaagtagtgctacgaaagtgataaaagttaaaaagcagtatccaaacaaaaggtataaaaggataaaaaaacaaaagttaaaataatacagtaataatgttatctagagcactaatcgacaaacattccaattaatctcttagattgactctgattatgacattaatacttagcacttttttagtggacaatataaccccaatgtgagtcccacatgttattcctcattcctctctataaatagccactcttggttcattttgaatcctccccttcctctctagctttcattctctagctttaacacaaattataccaatatcttttgccacttacatcaatgttttatactaatatggagacggttcataactgcttcaatgatgctacgataaccggtgatgaaatcattgatatattggcgtttcttcaatcagacgagtcggacaatccaagcggtataaacgaggtagtaccggtggatgataagaagagaagacggacgatatcaaaccgggaatcggccaagagatcgaggatgaaaaagaagaaacgttttgaagagttaactgaagaggtgaaccggttaaacataagaaatcaggagctgaaaaaccggttagctaatgttgttagttgtggtaattttatatctagggagaataaccggttgaaaaccgaatcggtttgccttgagataaggcttttagagttgtaccgttttttagtggccatgcaatcgccaatctcaacgagtgtaaattacatcacaacgctcgagatttaagtttgaaacaaaataaacagaaaaacgatgccaagtaactttgagcatttttgtaaaggtcaaacgttttatactatgaatttcacattttggttcaaacttcaaagttatgcatatgtgtatatatgtaaactgtatggataatatttgtgaaacttgattccctccacataaacacaatcataaatatgttgtcaagacctaaacaagacgtgccgaaacaagaccggttcacagtcaaaatgaatcaaaattttcaaaattttatttttcctccaaaagccgaaagacaaacatcaagttcaataagcctaagcagaatactaaaagtttggtgaacgtaacgaagtagccaaacataacagtataacactagaaatttccctaagttaacacttttgtttttacctataaacataaactattaggacgaaactctaaacttgctagctccatgaaaatgttgttgtacaattaacttttgaatttttaagacctttaacagtatcgtctttaagtaagcctatatatatacacagataatgtagaattttaagacgtaattatcttctaaaattaataattgattgagtttaacagtatgattatttattacctttttaatgaagaaaatgtcccatcccaaaatcacaacaaccttttgatagtgtgcactatatgttgggtttgaagaaaaatcttggaccaaatcacacaaaggaaaacgtggggtttaatttctttgtgtggctaattaagtgtatagatatatatatatatatatatatatatataatcatattcatatacattaagagatgcatgcgcatggtgcatggaacgaaacggatattttaaagggtgaaattgttaaatgatatttgaactaaacagctaaatatagtatgaaacacaatcggcattagctaaaatctcatgttaatttttataattaagttcacaaaatccatgttattttttaaaacacatgcagtcattaccattctacttacttactagtccatatttttataaatgacttatcatatgaatacctagtccatatgcatattgtttaagtctatatttatgtaaatgttactatcacaattcacaatattcactagctttggtttaaaacatggaacagaagtaaacccacaatagtacttacttaggtaagaagaaataattaaaggagacttcaaattaaataaattgtctatatacaaggaaacttcatcgaaaaaatatcataagattaatcatttccaagaattgtactggagctaccaacgttaaggaacaaagaaaataaggtagtgtcaccgtgtctggagaaggaaaaagatagatgtgttatgtgatgggatcttctcggtggatatcatataaagctctcatcaatattgaacccaaatctattttttgtcacttttattcggccgacatatcttcgcagaagttctacataaatgttatcttttctgaaccctaaacaagtatattttgtagatatttaagatgtcggctgtataaagataaaatttctctgacatataaaaaagatgatacaatttctctttctctttcttaagatatttcaaagatgattaatcattgattcgtaagcttaaaatggatcattttctagtactcaaatcacccgtaaaatctctatttcacataaaaaaatatgagatgagacatatatttgctatattatatggaatatggtgggtatagatattatagaacatcgacactatgcgaagaacaattattcgtagtttaggctttatgtagtacttgattcttactgtcttacatactaaatattcaggatatatataacatgagaaaatggtatatatatacaaaaacaaattttgatcaaaacgaatgatatacaaatttgttttacgttttcacattttaaaaatataattttgatatttatatatatcattcatcaatatatttctttcttttttaattatttgaaattaatttggctaaataatatagacaattaaccagttttttgttgagctaaaaagagtttgactgttttaagtacgtaccatttgatttttctgttattaaactatttatctcacatactactagctagtcttgtccaaagttttattgaatttttatggaatactatcaaacttatatataaaaaaaaaaaattccaaacgtcactccagctacatgttcatctatcaaactgatcatatagtttgagaatgtattatgaaagttggaaatttaatctcaactaattgaaccaactgaattaatcatataattaaaaccaaattgaaagtcataaatcaaaaccattttcgtagttacagtatatatttttgattaaaaaaaaaaaagtttctacttaagaaaattaaaccaaaccgaaatcatcaggtcacctacattgtcttgtcctcgttcaaatggtttttgtctctttatttattattgattcatttcttatatgcactgttcacattgtgtttgggtgaaaaagttatatttccctaatgctgtcatatctatggtggttccatgaccttccaccactaatgtttaaattgggataaaacaaaaactattttaaggttttgactaaagactgacctcacctcataaactaattcaataagagagtatttataaatgagaagaaaccacaagatattttacttaaacaaaaaaaaaagctcaaggtttttcattttagcaaaataaaaaaaaatcagctatacatcacgagaatcatcatcataaatccctgcatgcgtgctacacattcgacaaactttaacctagttatagtagtgacggatccataaagtttttgtatcgaggtcaaacataacggaatagagatatggaaatgcaaaccttgaaatttaacggtggcataacagtttttcttttgctaaatgctaagatcaagatagatgtctcactgtctcagtctcacgatggtcgacccaacattttttgatacataaaacctaataaaatttcatagaaaattttaaattcgtgattttctattattaaatgagacaccaattactaaactacaagatttttacacgaatttgatattgcttgaacctaaaatattggatgctttctaaaaagtttgttagactttaggacttgacaagccatatgtcgcacgattctcttgagaatataacagttataggaagaaccatgcaaactccacacaaacaatgacttgatggacttttcaacatcatcctattgagtatgatataaacactcgtttccatcttgattcactcgttatctttgcattgatcataaaatttagtttcttagggcattttttcggtgatatctttaaacaaaaactatctacaacattgtggactgccctttcgttccgtcttagtgtttttagtcacctttttaccatcttttcctatttagttttctttccaactaaatcttgtgatttagtagatgaatagataaggcccgcctaaatagattggtataacatataaatgttaattttaatcgatagtatttgggttctgaatagtaaaatagtaatctacaaattttagatatttaagttaatatttttatttaaatataatttcagtcttatgtattctattttatttatgcacactcaatcttatcgatgatatttgaatttaaatagtagtccacacacttttgttatatgtaatttagtattaagtatgataatgatatttgaatttaaatagtaatccacacactttatcatcttacacattcaatttcgcaatacaatttaagtatttatttcatcatattaaactcgattttaattatacatactaagtgataacaattttatatcaaaataatatttatatcagatcaaatttatatcttagttaatattaaaaataattaacacttaacaaaacataattaatataaaaaatccacaaaatattttgaaaactaacatggtttaaaggcgcaattgcaaaaaagctctttttagtgccctttttcaagaataattcatcttatggattaaggcgtagagtctagggatattttaaggaaatagataaattgtagatctagctatgattaggattgttaacacaccgttctaaaactcaaatcactaatgtaaagtcaactaactctcgttgtatcaactagctatgcctaataaataaggattctaactctcattgcaaatacttaattgctaaacatgcattaatatcaagtttgattagttcacctaagtatctaaacgagacatattcatatctagatagttaagctcatctatgatagtttaaggtaataagcgccctcttagatcttacctattatcctaagatcaagttctaggtgatcaatataaaactagcattaagaacaattaagatgaaaaaacctaaagatatttcgtaacaggttatcgatctacaaattcatttaaatctctaatgagagaaaccctaaacccaacaacgtgattactaagacatgattaaaagaacacaaatcatattctaaaaaaattgcattgaattaaaataagagaatagagttaaaggagtttagaatctctcttcgagaagttttgattcttctttccttgaatataaaatctctcacacaaaaggttaagtctaaacaatgacctcaaaaatctatatctaagttaacaaaaacgtggagagactatctttcaaataagggaaacttatgaaacttctgcaattcttgataacttgattaaaacgtggagaattcctttggtcccgatacaagtgtggtgtcgatcgacaccatcgcatcaaaaacgtctatgttgcttttccttgctagaaagcttccaaatttcctattttgctctatagctctcaaaagtggatatgcacctgtaaagacttgaaaacatacgaaaagaactaaaaagactcttaaaaccattctaatatcatgtttgaaatgagtaaaaaccattatatatcaatatccaaacgcaattcgaaccgaaatctgaatgtttatatctagatagcggtatgtctttttggcctagttaatgcattttcatgtttcaaacggcttgtcaacgtttaattcatatataaaatgcttacatatgaatttgatgtataaaacggtaacaatttgaaaaatttgggtattaaatgatatttttccaatttgattggtcaaacaaaaagaaaagggtattactgtaaatttaagttacattcaaatgcttaaaggctccccctctagggtgggattctgagattcaaatttcaaacggcactttcagatcgagacgaagatggaaaagatctgtgtcgcagtcagggtaagaccgccggcgccggaaaacggagcttcactctggaaagtcgaagataatcggatctctcttcataaatcactcgacactccaatcacaaccgcttctcacgcttttggtaaattcatctactttcttatcaatcagtttctggaatttcaatttctacagatctgattgaaatcgtaagtctcttcctttttagttttggtgttgtttacttttttcttctttttgcagatcatgtgttcgacgaaagttctacgaatgctagtgtctacgagcttcttactaaggatatcatacatgccgctgttgagggttttaatggtaatctaacctaaattataaaacttgagcgatttcttgggctcagttttttttttttttcaagttttgatgtatggagcttctctgattttgttaggtactgcatttgcttatgggcaaactagtagtgggaagacgtttacgatgacgggctctgaaactgatcctggaattattcgaagatctgttcgagatgtgtttgaaagaatacatatggtatagtgcatagaattattcagtgatctgtgaagtaagaaaaagagtacagcttttgattcgtgtgtgttttgttctttgtttttagatatctgatcgtgagtttctcatccgggtttcgtacatggaaatttacaacgaagaaattaatgatcttttagctgttgagaaccagagactgcaaattcatgagcatttggaggttggtttggatcagtttcattagtgatatcttctccattagtttgtttaagagttgttaaagttcacttgctttctcttgatgtacagcgtggagtgtttgttgctggtcttaaggaagaaattgttagtgatgctgaacagattctaaagcttatagattctggagaaggtttttaactcatatctaaactacaaagtagcgttcctgcattttgtttgtgcctaatgtgtattgacatggtcttctaattaacagttaataggcactttggcgagacaaacatgaatgttcatagtagcaggtctcacaccatattcagaatggtacggttcagaagctatgaacgagaccttctacttgtaaagtttttaatctgatacaatctctctggtgtgataggtgattgagagcaggggaaaagataatagttcttcagatgctattcgtgtctcagtcttggtgagtgataattttcactacagctaacatctttcaaaagtttcttgtgaaagttacataatgctattttttttttaatgggtgttctttcaatggaatctagaatttggtcgatttagctggatctgagcgaattgctaaaactggtgctggtggtgtacgcttgcaagaagggaagtacattaataagagcttaatgattcttggtaatgtcatcaataaattaagtgacagtacaaagctaaggtactttcttacctttgacttggtttacttaacaacaatacagctcaccgcagctcatttctaacatttattattatagggcacatattccgtaccgagatagtaagctgactcgaattcttcagcctgcacttggtggtaatgcaaagacctgcattatatgcactatcgcaccagaagaggtaaaataagttgctttgtggttagcttttgtattttcttggctttaagtaatcatttgaagggcaagattagattgtttacttaccaaaggtacattgatgatgtgtgtagcatcatattgaggaatcaaaaggaactctccaatttgcaagcagagcaaagcgcatcaccaactgtgctcaagtgaatgaggtctgcatttatttaaagcatctaaacttctgttgattatttggagatatttgttactctcgtttttagatgttactgcgctacgttatttcttcccattacaaaggatcaccgcctacatgtgtccaattgactgttttttttcctctttatcggaatataatctgaccatgtttaaatgctgcagatcttgactgatgccgctttattgaagcgccaaaagttggagatagaagagctacgcatgaagcttcaggtatagtcacttttttttttcaattacatattggaaaggagcaacaatacgaaaattggtgatgtttgtagggatctcatgcggaagtgttggaacaagagatcttaaatttaagcaatcagatgctgaaggtagcttttttgcgctttttcttagtgtatacattgagttcaacattaagcatacacacgatacaaaacagctacacgtttgtttgaattccagtatgagttggaatgtgaaaggctaaaaacacaactggaagaagagaaaaggaagcagaaggagcaggaaaattgcatcaaggagcaacagatgaaaattgagaaccttaacaattttgtcactaattctgacttcaagaggaaccagtcagaggtacggatgcattcattggcttaggcaatatcctgattttcttggattgttataatatataaggctcaaccattactaacacattttgctgaagtaaacataatctcaaaaagaaaaatttatattcaattgaatatacgatgtagaatgaatcaaagatagcaaatttgtaacatctcattagttttattagactagttattattacatttaagctgaagtggtggactcatgttcacggttacgtaaaagtcattaatgtaatttctttattggcaggactttatcatttcaagaaagactccagatgggctatgcaatgtcaatgacactagcgatgttcctggaaccccttgctttaaatcagcttcccgttcctttgtggttgctcggtcaaataattattcaggactatctgattttagtccgatggttcattccctgggggacgtggccgatgaagatacttggatgaaactaaacaagggttttgttgcagaccttgatcaaatccaatttacacctgctgttaaatgtcaacccactcctttaagtattgcaaccacggtgagtagatacatttactttgctcttattatcttctaatactagatattaattttaaaacttttatggttttagttgaagtatttaatgaaaattaacaatttgtaagtttttagacatagaatatttggttgagattaaatttgtaaggactaatattgacaatagtaaataggtgatagatttttggccaaaaaccctaccaaagatgtatatgtagattgaaaattatttgtgcatgaaaagctaaaaaaatcacattgaatggagacttcttgatgcatgtggtcaaaccaaccctcttccatccgtttgtttcgtggttctagactcattgtttcttttccttttcatatcaacttgcattcaaacattctggtttatgagaaactggctggtatctagctcatgtatgttgagtatcatttgaaaattcatatagacagatactatcccaagttatgctgctagtatagttttcaataataatgtggtgagttcagcacctaaaagatgcgccctaaggtgaccataattgtttgctaactttcattttaggagtgcccgcgtgaaaatcactcagaggtggaagatctcaaaagtcggattcagttgctgaccaatgagaatgacagtcttcaggttagtttttattggtgtcgttgactgttaaagtcaaagtgccctttcagcataaatcgaacttttttatcaagatttcctgaaactaaaagaaagatataattgtttttccttccttgttatcttcataatttacctttccttcttgtttttaatattgcacttgataagctggataccaaaactgatttggagttttaatgatcatttatgttccaattatgtactgccaggtaaaatttaatgaacaagtactcctgagcaacaatctgatgcaagagatgtctgagctcaaacaagaaacgcttactgtgaaagaaattccgaataggttatctgagtcagttgctaattgcaaagatgtctacaaggatgtcatagtcactatgaaggtgaacagcttactttttcttgtgtaaatcataattttgaaatttttattaaaaggacatctcagctcactagtgtttctcttgcaatttgttagagcttaatcactgacaaggaatctccaacggcaaacctgctcctgggtacaactgaaatcacaacgagcctactggcaactctagaaacacaattctcaatgataatggatggtcagaaaacgggtagtagcatagatcatcctttatctgaccattgggaaacacttcgtgtgaatctgaagaacacaacgacgttgttgctgtcagacgcacaagcaaaagatgaatttttgaactcccacaacaaggtagcttccttgccactattgtcaagatatggatcaattttattaatctttttagtagttttgttaggatactttgtctctcttggtaggactttagtccagtgaaacctctgcatatgttgacctgcaaataaatctaataaatggcgttctttttacgggtttttttctcgtaatctacgatttcgtatcatacctataagtgtttcattttcctttgtctccggcataagaagtctcatcaatctaagtcaccgttttacagtacactgtcatttaagaagttaaaagtcaaaaccacatatgcaagattgagtacctcatttgggctaaacacattctttcgacattggaacttcacttgaatctctcccagagtcatgtttggttagttagatgttgtggtcagactactatttcacctttctctaagacaggttttgaatgtgattttaaagggacaagaaacagctgctttggaggagaagaaactgaagtctgagctcatcatcatcaaggaaagatacaacgagctcgagaaagagttgtgtttggataaacagcttctagaagcttcaagagaaagtcatgagaagctgataaaagaggtacagttcctgaaggaagaaagagattctttagatagaaaaatctctcaatcaactcagagattgagagtgattgcaagtgataaagagaatgctttgaaagatcttaatgtggaagtgaagaggaggaaagatatggaggaagagattaagcacatcagcattgctttcgctaccaggcacaaatcttttgtgtcttttcacagtgaaatcaagtccaaaatgcagaaactaaccactcaaaactcaaaagctccttagcaaaaacagttaagtttgttgaatttgtatgtttaatttatcaccggattcgctaatgttgattaagaaagtgaagaacctatttattaagttgcaactttcgacttggagacagttaggtgatctgtgttgtgagaattttatatttgaacttgatattagaattgaccaacaacaaaaaaaagttagaactagttacaagaatataagagtttcttcatcattacttcaagaagatatagagaaggaacaaaatgtctaaaccgtcactcccaagtaaccgagatgatcgaattagcgatcccatattgatcaaacgaggcttcagctccataatccagagtcttggaagcaccaggaatcgcctgcactagcttgaacgccttgttatctgattcatccatgtgagaataacagaaagaccagagaagctgaaccggttcactcttgagaaactttctctgctttcttctcccatttggaaatcgaacgctgatactacagacaacgcttcgatcacagtctcctttaggctcttttgtcaaaactgggaactcaaacaggtcgcttgacaaacaagtttcctcctcatcttcggataaagtcactacatcatcaaattctcgcccgcaagaagaaaccacgacgctatctgatgacaaattccccttatgtatgagatttaagtcttttcatcagctgcctcatcaaaatcgtcaaaatcatcgtccgtaaaaccaaccatgtcttgttgatcagagtggcaaatcttttctgcttttacgcgcatgttccttgccgtagaagcaatatgttcgtgaggactagcatcaatatacttcttcaaatccttaagaaaacccttagctttaatctcgcccctccatatacatatattctggccagtaatcggatcgataaggactaaggagcagcataggaggagcacagtgttggatcatatagaagctagtgatttttcttccttcactggtatgatcataaacttgccataacataaacctaaactcaagggcttgagaaacgtcttcgtttgaccataaatctcggttaaatgtattacaaggaaactcagtttcggattggatatgaacaagcaaccatagatctttgctagaagaagctagtttcgcgtcttcgaacgaaccattaaaaagcagatttagaggaggaggaggagacaaggaaggcaatctagtagagtcggaaggttttagtgtcaaagtttgattatttctcattctgtcgatggcaaataagagattgatggcatcttcaagcttccaatttgtagactttagacactttatagcggtttccacagtttgatctacagagatattgaggaaagctgagaccagtgttctctgatagttactctccattgttttgccgttcaaagagaaagagagaacaaatttgtatgagttttaatcttttgttttgtacgtctttgcttctatttctttgtttatatagagaacttgatagtattgtttttcttccttttttcactccaatttggttcgagaaaaaatcggaaatttccttatcacttttttgttttgtttataataactttatcgttttttacttaaactttatcggtctatgcctataaaataattcaatgaacttttttttaaatcacgctaaactttttacaattggaattttttttagttacatattgataaatattaggattcatcccgcggtacacggcaagcgtaggtttttattcggtttccatattatattagaatgtattatttgttatttaacaaaaaatataaatttttattgttgttgattaaatattaattagtagaagtaattattaatggggttttctaaaaaatgttaaatatgagtattatttgttttaaatttgttaatttgcaaaaaatcctaggatatattaacttgaatatcttcttgattaaatttgtgaaacattcattttgattaattaatttcttttcttttgattaattagttttttaaaaggaaaaatgttattgaaagaaatcttaaagttaaatgactttctcaaatcaattactattggtagcagagggggagaaccaatcaagccctaattcctttagaaaacccttttaacaatcaaaatagtattggtcaaacaatatttctgcattaattagttttttcatatttagcaaaaaagaattaattaaaaaattcatccctattcgacttcactttctctctctgcctgaaaattttgatcggtttctggtttctcggcgaaagaagtaaagtggccgacaaatagtgatctcgtgaaggaatcagtgtgtacagtggaagaagatgatacatttggctggatttacatgttgcttaggcggcgtcgctctttatcttcttaccaggagcacaggcaggttaggttttttttcttgtctttactatttacgaattacgataactagggtttactgttattcggtggtaatgttcttctttcgtgggacagagatatcaaatcaatcactagggtttaccaactcaaggatttgggtaatgttcctgcattgttctgcatttcaattttaggtggatgggttttggttatgtgtttgatatcattcgtttttattcagaacaattagtagaagtagagagcaaggtggtacctttgatcatcgcagtatcaggagatgttggctctgagactcctattaagtgtgagcatagttatgttctcggtgtatttctcaagagaacggtatgtatgaattggattagataatctagtttttcgtttctgtgattttggatatgttaaaaagaaacgatttttttcaggcagaacaacaggttttgagacgtaattggagattttcatgggttcgaaatagtacattgatgcagccgatgactaaggaagtcccctggtatctggtatgtctgttggactttgattggagtgtattactttctaaagtcatttacaaaatatgatattggttgcctataggacgacgggacaggtcgtgtgaatgtagatgtatctcaaggtgaattaggcttggcgttgacggttggtagtgatgtatttgaaaaggcagagccggtatcgcttgttcaaggagcgttgggttatcttaaaggctttaaggtcttttcttttcctttcctaccacttttcattgatttgcttttgttttgacaatgcttatacattgtggcaccattgttgtctatagatacttggagtaagacacgttgagcgtgttgtcccaattggtacaccgcttacagttgttggtgaggtatgtcttttatctgttagcggtccaaaatacgttttatatctctctttgttatgttgcttaccatgttaacaggctgttagggatggcatggggaatgtcaggattcaaaaacctgagcaaggacctttctacgtcacttatataccgctagatcagctcatctctaaattgggagatttgtcaaggttgtttcttttctctgtttttgcctattcttttcttcgaaaactatgattgaaaaaaattctaaaagatctctttcttttggcaggaggttcaagtatgcctccatgggtttaactgttcttggtgtgattcttatttcaaagcctgtgattgaatatattctaaagagaattgaagatactctagaaagaaggcggcgacaattcgcactgaaaaggtatgacgcaccctaaccacagccacgtatgaagtattcattgcgagttgcgagttgcgagttaagtgttgggtaacttgttgcagagttgttgatgcagctgctaggagagccaaaccagtaactggaggtagtaatagtatctatccattagagtttgtactttgtagtagtaacatgtgaatcctttttctgcatacacttggaattgctctgcttacaaaaacgtcttaccaggtggtacaagcagagatggtgatacacctgatctctgtgtggtttgccttgaccagaagtataacaccgcttttgttgagtaagtataagaccgcttttcttctaaaagctcttgaaaaccctctcactgatcaaacatggcatcttttgattcctctttttgtttggtttggacttgtaggtgtggtcatatgtgctgctgcacaccatgctccttgcaactaaggacctgtcctctttgccgggaacgaatacaacaagttttgaaaatttaccgccattgaaggacaaaactcagaacgatttttacaagcgaacaattactagtcttgtacatatagtaaagcctttgtatcatgagtttttgactagaaatttttttgcattgatagattgtgattgaacaaatgctaatataaatttcaagcttagatttacatttactaatgaagttatataatcacgtttcgatgttaaaataagaagtgaaaaaacgtgaacggcaggattcgaacctgcgcgggcaaagcccacatgatttctagtcatgcccgataaccactccggcacgtccactttttgttaattcctcactatcttaaatatctaattaccgttaattattacaaatcaggttgggcttaattaagcccaaagttaaagacagattagtgaaggagacagagaaagaaacagctctaaaatggtaatgaacgagaaactagagagtcaacggtcatagcgttgaccaaatctctcactctcaccagccaaatctctccaacttcctctttctctccacccaaatctcgccggcgatcgtcactgacgaatctgattcgtccccaacactcaacgggtaagctctctctgcaaaattcagatcgttctagctcaatctcaacatcggatcaagattcaacttttgttcttttctcttaaacaaagcttttgatcattagtgaaatctaaaatattaacctttgaatctgtaaacttaagcttagagaaccctaagatcaaaactaaaaatttgatctttcattgtcacttgttggaagcaattcaaaattctgtgttgtgtatattttcaaatttgtggattgttccaatttcgataaagttttgatttttattccttttgttgtgtgtttttataaggaggtagaagaatggcgactcctgttgatccacctaatggaattaggaatcaagggaagcattacttctcaatgtggcaaacacttttcgagatcgataccaaatacgtgcctatcaaaccgataggccgaggcgcgtacggtgtggtttgctcttcggttaacagagagagtaatgagagagtggcgatcaagaagatccacaatgtgtttgagaataggattgatgcgttgaggactcttagggagctcaagcttctacgtcatcttcgacatgagaatgtggttgctcttaaagatgtaatgatggctaatcataagagaagctttaaggatgtttatcttgtttatgagcttatggatactgatcttcatcagattattaagtcttctcaagttctaagtaatgaccattgccaatacttcttgttccaggtatgtgatttgtttgcatttgcttttaccattagtgtgtgttgtttgcatttggtgtttgcatttacttgctttttatttcttttgcatagttgcttcgagggctcaagtatattcattcagcaaacattctccatcgggatctgaaacccggtaacctccttgtgaatgcaaactgcgacttaaagatatgtgactttgggctagcgaggacgagcaacaccaaaggtcagttcatgactgaatatgttgtgactagatggtaccgagcaccagagctactcctctgttgtgacaactatggaacctccattgatgtctggtcagtcggttgcatattcgccgagcttcttggaagaaaaccagtattcccgggaacagaatgtctaaaccagattaaactcatcattaacattttgggtagccagagagaggaagatctcgagtttatagataacccaaaagccaaaagatacatagaatcactcccttactcaccagggatatcattctctcgtctttacccgggtgcaaatgttttagccattgatctgcttcagaaaatgctcgttcttgacccttcgaaaaggattagtgtcacggaagcgcttcaacatccttacatggcgcctttatatgacccgagtgcaaatcctcctgctcaagttcctattgatctcgatgtagatgaagacgaggatttgggagcagagatgataagagaattaatgtggaaggaaatgattcattatcatccagaagctgctaccataaacaacaatgaggtctctgagttttgagatcaagtcttttgcaggtactgttcagagagatctttcaacaacttaaacttatttattttcatgtttgcttcttgaaatgttgttaataatagtgtcgaagaagaagaacaataactttaaattatgtgatatgtttgtgtcatggagctttgttttgtttttggttacaagcttaagtgtctgtaacgtttgtacataagtgtatgtgtccttaaaacttcatactctgtctctgatcttattgttggtgatttttcttattgaagattttcgaatgttcaaagagcaaaccattggattaaatatgattttgaagataaatgtattaacacaaagatatacactgtttaaaaaaattcatgaaataaaacatatgcatagaatatcaaaataaaattatttgggaaataattttcaatgatacatagaatgttccatagattcgtagaatttttataaatgtgtttttgactttcatgtacctaattctgaattcagacttagtatattgtgacattaatagaagtattaattgctttgtttgataaaaatattttgatgtctatcacacacttaaatttaacttaaatgatagaaaaaatgtcaataattagtaacatttatgctttggaaaaatattttgatgaacagcgtgtgaataagaatctttttttacttttgtaaatggaaaaatgtaggactgcactaattattgaaaccattgatgtgaaaaaaaaatcaagagccaaagagataaagattctagaagaccaagtcaagtcttctcgtcgattaatagtcaatgaatgttcctcatcatcatctctttgatttatgcgtttgatgtcattgagtcatttctataccattccgccaaaaattcgttttagttatccatatgaaattgcggttggactattaagtctataatttgattaaactaataagcatatgatgatgaagcagtttatacttgtaaatcctctattttatccaaaacttatgatcaaatgatagaactaggatgcaatgttcaatctcctttggagggaccaaaatctgccacaagacacaccacttgcttggtatttaattttcctttttatctttccatcttctcctttaggatacaggggatgtctcatgaaatgatgtatagtttataaaattatctctaaagtctaaacacagagtggcaaaccgaaaatattatataaaacacgtagtatcgagcaaaacaacacttaattgtgtcacatgtgacatgtgcatacataataatacagaaaacttaactaataaagccaccaacattatgtgaacaatggtatcaagctttcgagctaagttaacgaacctaactcgtgattaaataatgattattactaaattcagggaaaacacttttataaacaaaaatataatttgcaaaaatattataacttgctttacccgatggtaatttctgtttacaaacctgtatatttctaaatgcccttcctataatacacacacatacacatcaaattagttgccatgcacacatcaaataaattgccaaaaacatcaatatctatacattaaatcataaatacttggaaaactccaactagcttttggttataaaattactaaatatagtttaaaataatacatccgtcgtggaaatttatgaaagatagacttcttttttagcttatgccccaaggaagtcaatcaataagaccaacgttatcaacatacgtgatcgatgatgttcttttattcctggaaacttcttataatcacccacacaaaaacaaaaaaaaaaacaaaatattaaatacaaaattctgagatcttgacattttgaccaagttgtaacgcttcatcatctgatccggtcaaattcttaaatcctttttctatagtattacaataaagaaaatattattgtcgcgtgaaatcttttaaaatattaatacaaatcacgtctattaataacaaggtcgtcactcttgtctccaaaacaaatcttcattaaccaaaaccaaaaaaaaaaacttgaaactctctgaatctcacaagaacattgcaaggtaaagaaaccacaagatcatcactcgaagtaaaaatggtgagcccatttagatctccatgttcttcacccaaaaaatcaagaaaagcaagcaagaacccttattcaaatcgtggacttgataaattctctgagcttctctccgagctagacgagaagaggcaaagcatctactcgaagaagctcgattccggtggcccgcctcttgttcgatttgtgttcacaagctccggtgagtgtgtccccgttgtgatcagatcatcttatcttcacaagaagaacaagaagacgaaagatgttgtagctgataaagtcaaaacagaagtcaaggaagcaaaaacagaggaaatcaagaacacagagcctgaaacagagcaaaaacagagctgtgttataaacgagaatctgaagaagatcgctagaccggatcatttcttgcctgtgactgtgatcttggttcttgtgtttttggctttctttggaagatctgtagcgattatgtttacttgtatcgcttggtacttggttccaacgattcaagaacagagtggaaacagaggatcatcaccgtcttacgcgatgaagaagaaagatttcgctaggaaattgagtattgaaaacagaacatcgtttaatccaagaactgttcgtgatcattctcctcgcaagtagaagaagtttcttattttggctgctcgtgaaaaaaaccgcgtgaccgagcgaaaactttttttctttgtcaaaagttttttggtctcttatttcttcgttactttttgttttattctctgtttcgttcatagttgttaaatttagagacagctgaattagcagaaaattgtgtagcttttttatattgttagtttttttttaatgtttatagatgtatataatgcaattggagatgttcttgattacatatgatctattgcaaccatataaaatttgagcagaatcaacttatattacaaaatcccaacttttactttttattttgggggttttgccctatgttttgttttaggtttcttaattgttgtgttatggaagcctagcgacaatggtatgatattcgtcgagggctattaacgttaaagtaagtattttggtcgtttggaccatgtgaaaataaagtagattgctaataaagagattagtattaatcactagactatggtcatttcgagaaatagtggatatgatcaaagaagcattaatgtcaacctatcttcataataataaatggaaatgaaagatagataatgatgcgatacatttgtcattttgtctaataattcaattagttgcctctgcctctacacatctatggaaaacgtgatacatggatgttcgatagaaagtgaaccaaaaacttcaaactatcatcaatgattattaatggaaataaaaggtatatggtcgatgacattatacatctatcttttaagttttaaggagagaccgtgtgtttcagagagattctagatatcaattgacctcgatgaaagttctgtaggtaacggtcttctcaaggagttgtgagatttaaagtcgtttatggataatcatgtccgcttcaaaagacatttttttctatgttattatatcagatttattcactagaaatataattcattggtgatggatatggttgcgtggttctagaatttttgctattagactttcgttcttctgttaataatgatgttttggacatttggacatagtatccaatcttggcttatttttctccaaatcaaatatctcaaaactatgtaatgtaagttttgaaaagtattaacaaaacattagtttcacatgtataccttttgtttcaattgaaccgaactagcccaggacgactgagacatggccaaaatttcttcccacatgtttttgaaagggaatatatttccaaaacaaaattctgagtcaagtcaaattctgcgtgattgtatttttgcataagaacaaaaatcagatctgaacttagaaatcttcaaaacattatctaaaatacaaatacaccggtatagacctagaagacagagagagagctgacaacatctcccaagttccctctacaccttatctcagagttctctactcctgccaataaacagaatttaagacatcagaatcatctttatacggattcaacatttttgtatatgatcataatcatacattaccctgaatctttttcggcgtaaatcatcctgattgcatccaaaagactcgtttctgtatccgccatctctgttatccaacggctttctcgagtttctgaagaatccaatcttgtcccatgttagttcatagtctgcctttagccgagtgccttcctgctcagatgacaaaaccagaaaacatcagttatgtttcaatgcctacaagagagatacgacacaaataccagttgcctaattatttctgcataaacaatcatataaaattaaataaatcgactatcaaacaagaagtattgaatgtggtatataaagatgttacagagccggtaaaacatttagatgtggttacaacttagtttcgaatacagtagcaagaacccacaaaatcacactagcagaaactagttttgcatacaatctagctccgaattcagaagaagcattcaataaaaccatttctgctaatgataaaacctcatatgctatttaagaagcttacgcaacagtgaaaactactaacttaccatctccaaattttctcaaaatatttgtgtaaataaaacctgatagtggtctttgcaacataaagaataccttttccattgagcgaccacaaaaagccttcatggcattcacgaaatcattgtacttctcgaactgaaccacaatcttacaatggagacctgatatgaggtctccactatcctcatctgcgtccttacctagatcatcgtcctcagcaacattaagattcctatagaggattagttaatgcagcggaacatggaatttatgtaaactatcggaattatattaacatcagattcattggtaaacagaataaatgatccgaagaatactgagaacacatggtaagcaagttcaatacaatgattgtaattagtcttcagataagatttccatacaaaatgtcatttcttttgaactacatggacaaatactgtatactatgatcaaatgtagatgcatcaaatctatccaaagcagcacaaaactacttaattttccaataagcaagccatagatcactctcaactcacatagtgtcacattcttgaagcagatttatgaatgttctcttcactccgattgaaaaaaaaacaatcctaatcaagctggacatgaaagatgacaaaatcttacctaattttcccaaagctagagaagattgtatgtgtaaccaacatagaaggcttcgatgaaactcgtggctcagcaaaccatcttgatggcacacctctaagtataatcgtatcagcctctctccttccttcccttgaatgtcctgcaaatcacaatcacatcaattaccacgaaaaaatcgtaaaatcaaaatccaaaattgaagaaccaagattaccaaaagcgtaaaactcctcccaatccttcttcaacttctcgaaatcatctgaaatcggaagtaccacactaagcttatacttaactccttccaaattaagctcaataccattcatcttctccaccaaactcttcctccaatccaaaaacttcttctccaattccttcacatctctctctccatcattctccttcttcttcttcttcccatcgagaaaccctaaatcgcgtataaacaacgatccatgagcaactggctcctcacgcttccgtttcttcaagtccttgtgacgacgaactacgatgtcttcctccggaactgtgacggaggttacgacagagtttttgaggtaatctattaaggatcgcttgagttgccattcgtcgatggatttggatacggatgggactactgggtggattgtgagattgagcttgacgcgtgagacgagagcgagaccgttctcttcgatatctagagtttctatcggagatagctcttctaacgatcgcatttttcgccgtcgatgcaaaattcaaaatcgcgattggctctctctctcagagtgtcgtcggctattgagtacagagaacaggaggatactgaaaacagtggtaaaccagaattccaaatcggttatttccggttctcttggtttccaatattttgggaataaattgcataaacggtccaaaatagagataaattccaatgtaaattttttgaacattgactgaaaccattaataaatgttgaacgtttcatccaatgcctaaatatatatggtaaggattcttatcttagttatgagttttggcatactaggactgaagcattgcatcctactgtgagttttggtggtttgtgctcttctgttgaccttagcaatgcgtccatataaattgagtatggttggattactgttcatacctctagcgaaacattgcaattcgctaggtctctattgtggggttagatggcatgaaccattagttgcacaaatgaactctaatgcatatcatagaggcttgtttttggatatagtttacgaaatattgagatgatatctttcatacaaaaacaaaaaatgcatatgatgatgacactcttacatacacttttggtactatctatccgcgtatgattttaagataatttttttgagcttttactttaattagaatttagtgatatacttgtatgcacaaatttatacaagcaatttatgaatacggtatacacaaatttatatacaaacagttagaccaataccaaaatttggtgatatacttgcaaacctagcatgctaacgaatttgataacttacatgccttatcccatctagcgaaacaaattagagagattaaactgttggagataaatttagaactcggttgatcacaactcaacatttcgcactcaaacattacaaaaatactagtctcctacatcaggattacaaagtggtcttccgcatttgttcatttggaaaaatatacaaccaaacaagcgcattcgatgatacaaattcttgtaccacattgaaattcacttacaatattttaattcgaacaaatttagctgagaatgtctttattgatagcaaaaagttgtgttaatttatattttacgcatccacatttgtgtgttttatgctttcacatttgtaaagaatttctttgaacagttgtgaaaattttcaacatttatgaaagaaaagaaaaaaccacttaataattttcaacatttatgaaatttgaaaaatgtgttaattactacgtgtttatgtaaagttatatgacccgtcttgcccattctctccccgacgaagacacacacagacaaacaaatcctagcttagcaccgtcgcgaccgaattcgaaattccggtaacccaatcgccgggaaaatccaccgctcgtggctaccgatattgattctaatcggatctagcggctccctttcttcgtccagatctcgtacttcattcgacctcgattcgctgtgcaagttacgatggaggcgatcgatgagttgtctcagctttcggattcgatgagacaagcggcgtctctgctcgctgacgaagatcccgatgagacctcttcttctagacggccagctacttctctcaacgtcgttgccctagggaatgtggtgggttttctctcgctttttctgtttctgagatgtgactgtatttggcgtttgttgtaagttttatactgtgatcgagtgtagatttttgttgccatatcgtggatcttgtggatctcgatgaggtgttttcgaaatggtcccgtaacctaggagtttggtaggatgttttgtattcttcatctcttcgttcgtagcttgttttgttgcgtttctctctttattagggattatttgattctatgagattcaaacctgggaggtattactatagtagagaaggttgatgcgtttgttatttgaaactatgagaaatctattttagaaagtgtatatcagaacgaaaagtgtatgtgatttactctgtttcctaaaacacttatctgttggaagacagaaaaaatattgctatgtgtttgtgattgaaacttcttaggcttagaaaagaaaaatttcttatgtgaagactgaagttatttcacttttcttggtggatcagggagctggaaagtctgcagttctaaatagcctaattgggcatccagttctggtaagttgtgtattgaatttgagtgcgcggcaatttgtgtatgtcactattggctgatacattttcttaaagtaaccactttgtgttgtcctgtctactatgattaccatggatagccgacgggtgagaatggtgcgacacgggctcctattatcattgatttgagtagagaagaatcactgagcagcaaggcaataatcttgcaaattgacaataaaaatcaacaagtttctgcaagtaagagctccctatgtgcacatatgcaatttagcaatgatttgtgaagctatttctgcatgtaagatgcaatgcattagattaatatttgactaatatttccgtttttttcgaatgtgtgtattacaggtgcactaaggcattcactacaagataggcttagcaaaggagcttcaggaaggggtcgtgatgaaatatacctaaaacttcgtaccagcacaggtaattcctttctacttgcacaatcataaatgggaatccctatttaatgcaacatccatattacccaagcctaagtcggataatgtcccctacttaagtgaacagttcagctgtaatgagtttttacctctaaatctaacgcacattagcgcttcaacttcttttgggtagaatctgaagctaagttgtgaaaattggactatatatctaaatgaagatctaacttaaatgttctctttggaacatgaattatcacatatcgtttgttttgtactggtttctgtaatcatcataacatatttttcccttttaattgcagctccaccactgaaattgattgatttgcctggactggaccagcgaattgtggacgattctatggtaagcttaggaactgcttgatgcctttgtcatccccctaatccacctgtcaaccatggagaatttccacattttttattcggcattctggctgtagggcttcatagattcattatcattgtcatcttataatttgtttctctcctctctttgcaagattggtgaacatgcacagcacaacgatgctatattgctggttgttgtgcctgctagccaggcatctgaaatttcgtcatctcgagccctgaagatcgcaaaggagtatgatccagagagtgagtatataggcactttcgttatacagacccttcattatacttctaaacaactggggttactacatttggatagaaacattggaactaaattttgtgtatactataaccaaaaaaaaaaacatcactccttatttataggtactaggacagtaggaattatcagcaaaattgatcaggcagcagagaacccaaagtcccttgcagcagttcaggcgcttctttcaaatcaaggacctccaaaaacaactgatattccatgggttgcacttattggccaatctgtctcaattgcatcagcgcagtctggaggcagtgagaactctttagaaactgcttggcgtgctgagagtgaaagccttaaatccattttgactggtgctccacaaagcaaacttggcagaattgccctggtcgacactcttgctagccagatccgtagcagaatgaagctcaggcttccgaacatcttaactgggtatttcctctctccatatgtttttgcttttatatgtcaaatgaaaaatcgattgtttgtttgcctatttttctgtactggtactttagggaagatttacaattttctccatcaaagccaatttgttttgtttctttgaagttgaagtcgacctttaggcttagttagctagactttccagctcctatcatcattagcgcacttctcatgagatattttagaaacctttgtccttgtgtctttctaatcaacatatacggaccaggtcgaagctaagtttctgaaaaggaaaacaagattcatatctttaactgattgaatagatgataatctacctaaaagtcaagaaattaaacctctatgttgaatttgcaatggagaggaacggtgtttagtgaattggaataaaccaaaaggcaaagataaagcaaaagggaaagttgcataagaggaaatagttatctgaaattggatatgtgccagatttatctgccatcgttactgagttctgaaaataagaactcttgcttgcaagatctctggtcaatgctcatcatcatctgttaagctgatatattacttttgtctcccaaaatgtgatgtctatcttttgttttagtttctggatgattatttagggacatgattttggttcttatgatagtcctgaacttacaaattcctttgttacatgcagactccagggtaagtctcaaatagtgcaggacgaattagcgaggcttggtgagcaattggttagcagtgctgaaggcacaagggcaatagctttggagctttgtcgtgagtttgaagacaaatttcttctccatttagctggtggtgaagtgagtaatttcctacgttagctgaaccatactttagccttttcatttttctagttgttatggaaaatgtgtggtactgtttaaatatagacaattaagaaatttaggaagattgtctgatattatctaggatttcacgatactaatattggatctatatgtgatatgtttcacggaaaaggtttttgaattgcatgtctggtgattgtgcccgttcatgtgctgaaggcctttttggatttcggtaaatatttttctctaataaaaatttggttcagggaagtggttggaaagttgttgcaagttttgaaggcaatttccccaatcgtatcaaaaagcttccgttggatagacattttgacttgaacaatgtcaaaagggtgggtttctgaattttcctgcctcaaattgtataaacaagtaacggctttagactggagtgtgacagattgattttccaattgtttcagatcgtgttggaggctgatggttatcaaccttatctcatatctccagagaaagggttgagatcgttaataaaaaccgttcttgagttggctaaagacccagcacgactatgtgttgatgaggtgtgtccatgttagtgtttatagcttaactggtgttgtcttcctcttgtttgagatgcgtagcattgaaattcagaaatttactaaatagtgaaatattggctatggcttgtcacatgtggtctattcaacacatttcgttatgatattttaattctccagattcaaatttattaaattcctactcaacctttccaacctggttgccttaccgtctcatctgttactgagctaatatggtctgaacttcttattaggttcaccgagtgcttgttgacatagtttcagcttccgcgaatgccacacctggtcttgggagatatcctccttttaagagagaggtaattatgcttttactgctctttcagttgcatttttcgtcttactaatagctgtttcttttcttaaataatcgtcaaccaggttgtagctatagcaagtgccgcacttgatggattcaagaatgaagctaagaagatggtagttgcattagttgatatggagcgtgcatttgtaccacctcagcacttcatccgcctcgtacaaagaaggtaacatcagcttccctttttttgctttttggctgtcatttcgagtggcgttatcatactcaaaacttatagattattatcttaaatttccatcttttaatgtaagacggttttaaacatgttcaaatggatctactttcttgtgtgtcctgctatttttatatgttcgcctgtgaaatgaacatttgtgtttctgaatactttcattacattcacaagtttgacctttttatagtcccatagctagcattttgtcgcacaagtcatgttattgacagttataagatcttatgtgatgcatatctaactatattttcgtttttttggctgtacggtttactatctttatcagaatggaaaggcagcgtcgtgaggaggagctaaaaggtcgttcctctaaaaagggacaagatgcagagcagtctctcttaaacagggtttgcttttatctcagaacaatctggattcatttagtggatgtgcttctactatttttttgtgatatggaagtacataatgaaacaattctttttttgcttgtacatcaggctactagtcctcagccagatgggccatcatcaactggtggtagcttaaaatctttgagagacaaattaatgccacaagataaagataaagataaagaaaaagagactccggaggtgtctggtctgaagactgctggacctgagggagagataactgcaggtccttattcttacatatttctacagtggctgtctaacaaaattttgtttactagcgatccattttccttgcacgacattcttttactgctgttaaggttatctgtcagttcaattgcgtgattttttcttcttttctatttcctttctgtcatttaagcattgaactggtggaggatcagctttcccttatgtgttgataaaaaaaaacttcagagcttttctgctccaatttagcgatctcctttttgatagtctgccactttagctttgacctagcgtaggataagtttttgaggttttagtttgttataaaaaccaactgccaaggtcttcaacagaaattttattctgttgtgcagggtacttaatgaagaaaagtgcaaagacaaatgggtggagtaggcgatggtttgttctgaatgaaaaaactggaaaggtaagtgttgatccacatatttcgaaaaagaaagctgtaatcgtaatgctagaagtatactatccctcacaatgttactatcttttttattgttgttgaagtgatctacctttgcatttacctttcttcagcttggttatacaaaaaaacaagaagaaagaaacttccgcggcactgtaactttggaggtatcattttcttgcagttcttgcttttctttggtcaaagtcgaaaataactgaaataaaaagagtaatagtagggtttcatatttacattgctcttccacccggtcctttaagcagagtgattgttacctgtaattgtgaagcgtaccattattactgaaaagcgatatagccttttggaaattttatcgaagtacacaatattcaattatttttctcataaaactctttaatatgctcaggaatgcagtatcgaagaaatttctgatgatgaaggagaaaaatcaaagagctcgaaagataagaaatcaaatggaccggattcaaaaggaccaggccttgtatttaagataacttgcagggttccatataagactgtacttaaaggtatgtcaagcgattatcaaaatttactgcttgaccctctttttactctattatatgagcaaatcctcatatgctcttatattgcagctcacaatgcgttggttctcaaggccgagagcatggttgataagaatgaatggataaataagctgcaaaaggttatccaggcccgaggaggccaagtgggtagcgcttccatgagacaaagtctttcagaaggctcacttgtaagtaatacaaggaaactatcttaatgatctttcttttccactttcctttataagtttgctagctgatcttaatgcagtaacaatatcctgatgatatagtctttgctagaagttccctatataaatgagtaaaatctgatgtctttgttgaagagggttaagatagctttgtttgggcatgtgaggcgtttaggtttccggatgggtggtattacagttttgccttggttgtctaatttttttcctttttcaggataagatggtaaggaaaccggtcgacccggaagaggaattacggtggatgtcccaagaagtacggggttatgttgaagctgttctcaacagtctagctgccaatgttccaaaggtggactagtcacttttcttgtgaattcttaaattcccatgccaatatcgcttttcattactcgatcacattactaaatctgtgacttcaacaggctgttgttctctgtcaagtggagaaatccaaggaagacatgctgaatcagctatacagctctatcaggtttcttaatatccttccccaatgtattgttgtagcatcaatacagctgtttgcgttgtacttatatatctctcgcttggattgatctgcagcgcaattggtaatgagaggattgaatcattgattcaagaggatcagaacgtcaaaagacgaagagaccgttaccagaaacagtcctctcttctctcaaagctcactaggcagcttagcattcacgataaccgagcagctgctgcttcaagctggtctgacaatagtggcactggtatatatactcacacactcatctaccctttcaaatgtgctaatatataaccataaaatgcatgggatttgattcgttttttcgtgtgtcatctttgtttgttcttatttgcagaaagcagcccgagaaccaatggagggtcatcaggagaggactggatgaatgcgtttaacgcagctgctagtggacctgactcattgaagagatatggatctggcggccatagccgtcgttacagtgatccagcacagaatggtgaggattcttctggatctggtggcagctcccgtcgcaccacaccaaaccggctcccaccagctccgccacagtctggatcatcttacaggtattagaaacctgtttggtttccaggattgttattgaacgaaccataaaacacattcttttctttctttttctgccctttcggattggtccctgtttctgggactatttttcttatgtctcactagtttaaaaaaaaaaaaaccagaatgataatatgatgatgatgtacttgcgtgtgtttgtagatagatatttgttagagagacacatatatatgagtttggtcttcatattggtcatatgctttatattaaagaaaatgttacttttcttttactagcatctaatagtattgttaatttttttttttagcaagcttaagtatgtctctcttcgtagagtggtttaagtgtttatcagactttcgttaagcttaacatggaatttatctagcaaaattgtagtccaatttaatcagggggaaactagaataaggataacacaaccacaaattgcggcgaaatgaaaaaaactattttcatattaagataaactgtatgcctaccattatcgagttcatcattccactatatagtacaaattgaaaggtccatgattcaacaaaacacataaggaatatgagaaaatttgatcactcctctgtaaagtctcttcgccaaaagtaaatgttaaaggtcaccgagaaaaggtgaaagaaacatgatttcactaacgtagtcagttatcaaattgaaaccctagatataagatattgatgctccccaaatcatgtcgctgctcatcgttgggcatgtattggtcatgagaggatcgctaaatgtatgaagtggtggtagtcttgaggcaaactccagatcccaaacatgatcatcacaagatatccctacattgtaagtttggtaaagttctgccgccccctgaaagataatgacagcccgaaaaccctaaaatggcaagatctagtcccgtgtaatctgcatcttttgattcgtaattggaaacattctcgttcaaattcgttgattcgtaagtgtaaactgccgagaaggacaatgttatcagtgttgcatgcattttactttggtacatgtaatggatttggttagaataagaggtaaggctccaaatgagctgagagttaccaatgttgcatagtgcatctgttaaatcttgttggtacacatgtttgatttgatttacaatgaccatttgtccattatggtagctggctggctagctgcattgtttcagcagcctgtgatcaagtgagttttgttggttctggtggtatcaatctctggctcttcttctatataatcatttttctgtgtaaaaatttctaaagaagaggaatacttttttaaatatcattagaagacaaaatccattgtaatgatttccaccaagctaaaggaatttagctgaaatgtaaaataacacgtggcaagtaggaagttgctgggtggccaccggataagcggatagtgttgttgccttttgaagacttgttggccaaagattgtcggaaggtgttgacctggagtcaactctaataataatggatctttagcagagttcttctgacgaaacactaaaaaaaaaaaacacatcacaaacttctctatacagatcatttggaggaacatcgatttccagggaaggtgagattattgtattgatcatttttatcttttgtttctttaattggtttctgtggaagtaggtgcttcgatcctttgtagttttcaattttggttatctcaatatattcgcagtctctgcacaaaatagttgccgtaaactttgcaaaaaaaattatcatatttatgaactcacagacacttctttagtgataattgactactagtttcatggttgagcaggagacttatggctgagacacttttgtcatttggagtcgaaaagctttgggacctccttgtccgagaatctgatcgatttcaaggagttaaaaagcaatttaatgaattgagaagtgatttaaataagttaaggtgctttttagaagatgcagatgccaagaaacatcaaagtgcaatggtgagtaacactgtgaaagaggtcaaggaaattgtttatgacacagaagatatcattgaaacctttcttcgaaaaaaacaactcggaagaacaagaggcatgaagaaacgtatcaaagaatttgcttgcgttcttcctgatcgccggaaaattgctatcgatatggaaggcctaagtaagaggattgctaaggtgatctgcgatatgcagagtcttggcgtacaacaggtcattgtcaatgacgagtatatgcagtctttacaagaaagacaaaaggaatatgcggcaaacattttctaataacaatgaaagtgttcttgtggggttggaggaaaatgttaagaaattggttggccatttggtggaggttgaagatagcagtcaagtagtttctataaccgggatgggcggtattggtaaaaccacccttgcaagacaagttttcaatcatgagacagtaaaaagtcattttgctcaactcgcgtgggtatgtgtttcacaacagtttacaaggaagtatgtgtggcaaacaatcttgcggaaagttgggccagaatatataaagttagagatgacggaagacgaacttcaagaaaaactctttcgcctattgggtacacgaaaggctttgattgtccttgatgatatatggagagaagaagattgggacatgatagaaccaatctttccactgggaaaaggtaacaatctcttttcaatattcataatacatgcaaacatattggtcataaagcattatgtacgttcccttttgttagtgacttatatgaaaagagatatatattttggtataggctggaaagtattacttacttctcgtaatgaaggtgtcgcattacgagcaaatccaaatggtttcatctttaaaccagattgcctaactcctgaagagagttggacaattttccgaaggatagtttttccgggagaaaacactacaggtaagctttcaagacaatttaattaatatatgtcgcagctcgtctagttcttatgaacattcatttcatttcatcttatcttgatgatatattgcagaatataaagttgatgaaaaaatggaagagcttggtaagcaaatgatcaaacattgtggagggttaccgttggctcttaaggtgttaggcgggttgttagttgtgcacttcacattggatgagtggaaaaggatctatgggaatattaaatctcacatcgttggaggaactagcttcaatgacaaaaatatgagttcagtttatcatattttgcatctgagctttgaagagctgcctatatatttgaagcactgcttcctctaccttgcccaatttcctgaagattttacaatagatctggaaaagttatcttactactgggccgcagaaggaatgccaagacctaggtattacgatggagcgactattcgaaaggtcggagatggatacatagaagagttggtaaagagaaacatggttatttctgagagagacgctagaactaggagatttgaaacatgtcacttgcatgatattgtgagagaagtttgtcttcttaaagctgaagaagagaacttgatagaaactgaaaactctaaatctcctagtaaacctcgcagacttgtcgtaaaagggggtgataaaacagatatggaggggaagctgaagaatccaaaacttagatctctcttgtttatcgaggagcttggtggttataggggattcgaagtatggtttacgaggctacagttgatgagggttttagatctccatggagttgagtttggaggggagttaccctctagcatcggactgctaatccacttgagatatttgagtttatatcgggcaaaagcatctcatctaccttcgtctatgcagaatttgaagatgctgctctatttaaacctatgtgtacaagagagttgttacatttacattcccaatttcttgaaagagatgctagagctgaaatacctctctctcccactaagaatggatgataaggtaaaactagaattgggtaacctagtcaacctggagaagttggaaaatttctcaacagagcatgggggagtggggggatcttcagtttatgacccggcttagagccctctctatctatatcagaggcaggttgaatatgaaaactctatcttcatctctaagtaaactgagagacttggaaaatcttactatctgttattacccgatgtatgctcccatgagtggtatagaaggattagttttggactgcgatcagctcaagcatctgaatttgagaatatatatgccaaggttacctgatgaacaacattttccttggcatcttcgaaacatatctctagctgagtgttgtttgaaggaggatccaatgccgattttagagaagctgcttcaattaaacgaggtcagtttatctcatcaatctttctgtgggaagagaatggtttgctcggatggtgggtttcctcaattgcaaaagctcgatttgtgtggactagaggagtgggaagagtggatagtcgaagaaggctccatgccacggcttcataagctgactatccgcaacgatcctaaattaaaggagcttcctgatgggttgaaatttatcacttccttgaaagaagtgcatgtcatcttaaataattgggactttaagaagaaactgtccaggggaggagaagattactacaaagtccaacacattcctcttgttcgatttctttaagcctatccaattgtagtcactcaggtaatatattctttcctcatgtcattctagagctagtataattctctttgtgttgtcagttatttatgtgttaccaagcgactcggcttgactgctacaatcttttatctttgtatgtaactttgtaactttatatttatactagctgctttgaacttttgatttactatttcttgcaatgacccctcatagataaattattcaccccactagtcattgttaaagacggggacatgtggctgagactattgcacgtataatttggagttttatagctttaggagcccgtgaatcaaaaatctgaatattcgcaagaagtttatgagtaagttattgagatataacaacgtcatatgagattgttacactctttactggaagatgcaaattccaagaaacacgaacgtggaaagaagtttgatatacttgcatgggtgtgtaaacacattccaagaaacacacgtggaaagaagttctgattcacttgcatgggtgtgtttcacagtgtagttcacatgaaagtatgtctggcaaataaacttgcgaaagtttggaccgagttgagaggagcatacaaccttacagatggtagcagatgaactccaagctgttttaagaaactagttaatatgtgaaaatccctgacgatatatgtgacaacacagccaaaaatctcacaaatcctctgtttccaccgaaaaacaggggaacctcatggtccttttcttgaaatattttacttattacatgatagatattcataaaacatgcatggagggtttaatcaagcaaggccatgtatacatcatgtacgtactcactaatgtttattttcaatactcaatgttatcttaccgggcatctgttcacttattaattacacacacatatatcagctaaaagtttttgattttgggagtgcacaaaagtgttagtgaagtctaatttatttctaccaaacaaaagactcttaattaattagtgatttagttttttgctagtctatgcctaaataatgtcgtgtcaggtgaaaggagaagacaatatttcttacatttgttcaagatactatcgtgccccaaaggccaaagctcacaacccgtagacatatctatggtccacaggttgtgtgatggctgaaactgcttcttggataggttggagcactacttttgcaatacctatatgatttttgttctcggtatgcagcctctgtttcctggcaatagtggagtcgatcagcttgtcgaaatcgaaggaatgaaaatcctcacccttgcacaaggaatgctactaatagtgtatccattatcagtttatcacctaatatgaggatactttcatagtttgtttgaaatcagcatcggaagctctaaaatccatgaataaagatgttctttgatgagctaagagacccaaacactcgtctgccaaatggtcgacaacttcctccaccaatgataacgactccaaaaaaaagaaaataaaagtgattcataacaaaacaaaccacatgaagtttggttcagtctgatctaggtgttaaaataaataaaacaagaaagcaccaatggaaatcaaacttgtaaaagttcttcttgttcactagcttcagcaaaagtctctcaagttatggtgatcaaactgggaacataaacagaggactgaaacctacattgcactccatctatcttaatctttttgcacagatctcccctcacaatatagacccaagcttgtctaggtttcgtgctaggacaacacagaaccaagctcttgccatagatatcattatcgacaaagtaacttgtagagatgtgactaagtaatatggggaagtcaggtcttgagagagtcatgaacttcatccacaccacatcgtctccattatccccgttaccaatttccttctctgtcacccaaatgttaatctcccctgttcttttgctttgttgtaacactgaaaaccgatctcccttgtaaatcgagaggatacgagtattggaagtacttttattcgccttacacggtaggatacaaaagatctttattacctctttcgaaagatcgagcatttcgatgaaacactgaccagtgtcgggatatttgtaacctgtccaatacaaatttccattcagggagacactagaactaccgtcgtgtgatcctaactcttcgtgagatctgggacaatgagtaccttccacgcgttggttgcaagttccaagactgcaactctatagatcgcattagtaaagcaccgtccaataatcttgtaactcttttcgggtttagtaccatcgtaacccatgctcttgccacatatttgcttatccttcgcaatcaatttagtcgttctcaacaacgggttccaaaccatgcctcctacatcaaagtcttccatcgcatatcccatagagatgatattgataacgttgacggagtaaatcaaagcgtaaatctctcacttttatagttggatcttcattgagattgacgttgatcgaataaatatgggaatgtgtctgtaacatgaattcttggcgagcgcaagcaaagtttctgttgatgaatctcttatcgttgaaaagagttttccattctttgtagaggaaggaagctaggtaataacctacatatatatatacatagagttaaaattagggaattaacttataaaataggaaatgtaaaagcataaaacttagtagattgtgacacatgacatctctatagattacattttgacatttgtaaaaaagaaatttataaaaggaaaaagtactacaattttctaatgataaaatatgtatttattttttagtgttcaatttactttataaactatggatatttggattttccgaaaagaataacatcaaagcgaataaaaatgaatattttgctctgtcctatctaccatgacaaatcataaaagataagtggtgtggtaaaaccaaagaaaataaatattatgatatgaactttgttaaacgtaaaagacaagaatgattttagcaaaaacttcattttaacctaagtctctcttagagaattagattaattgttggagtttcgttctttcgtattaagaagaagagaccttatgtaggacacgatccattgtgtaagaagaaacatcaaatcctaatgctaaaaggaaaactcccaaaacccaatttatactgattagaaaaccattaaaccaaattaaacccaaactcttatgacgtatcatattaacccacaattctatgggccatgaaactttgaaccataatctatggtttatgttgcttatgctatacgccgaccccagatgtagccactttcacagtgaaagctaacccgtagcgacgtaggtttagtgaaaaatgctttgaagatgatacagagcatgccagttaacccacacaaaatggtgatttgatgaagcaactttataagctgaacctaaagaacacaactacgttatgttatgtgtgtgattttctctaatatccgagtagctgatggaacttgtgtttcatcctatggagattccttggagagacaccttacctattaggctattattaattcttttatatcctgttcaactgttcagcaagaacttaagcaaatatgtaagaatgagatacaattttataacaacaaacgttttttcttttacaagaggtttcttctactttaaacccttcccagcttgttttttcttgatgtcgaaactaactatatcttcttttctattttgctttcttcagaacaacaatatgatgtgtatattcacatccatatatttaaacctataatgagaatgagatttatatgtatgtatgctttttcttctcgggatattagagcttttagatcttatttgtagtaagatgatgaccaagtgttgtttctttatcaagacgttctttcgaaaccacctgatcctatctgcatgtgcaaccactctggtgatgctcctctactgtattccctcgtagactgcgacccgaactgtatctccggattctcaaacgcttgctgaccaaactgagtgtcaccaaatataacagagattagccaaccaaatcaagaaaacaaaacagatttttgaattttgtattttaagttccacaacagaaaatgataaattttccttaggcagtaggagtaaaaacagagcgtaaccggttcattgcaatgcttagatgaactaatagcgactcctactcgagaatatcgacagaaacatgtcatgttttgtgaaaatatagttgtcttaagttctgtttttggggagcaggagcaaaaacagaggtcactccgtttattgcaatgcttaaatgaccgaaccgcataaacatcgagactcctaccccgagaatacctcgatagaaacatgtattgttttgtgaaaaaaatggagaagattgagttgatgatcatgagaatcatcacctctttgggtggaaaaacctcgataccagggttcattcttgagttgactgcttcaagcttcatcgataagaactgaaaatcccaaaccatcacatcagaacacacatgtaaatgtatagtaacaaaacaacagaagagagagacgtttcacacctcaacttgacgttgcaatgattgtatatagttaattatctcatctagaacaagtgcttttccaataacctacaaaacatacacaagtttcaatcatgtcaccactctaaaaaaaatgtgaatctcccattgaaaagttttacaataccttgttacatcccggaacaagatcttgcaagattttcatccgctcacttattttctctcttctcgcctaccaaaaacacaaagcaaattgtcttttactcactcaaccaaataaaagaagctttttatatgatcatgtgaaatcattactctttcagctaaactgtgactatcagtagcttgacctcttctagctcgaacatgaatataatctttcgttggttccatctgttgcttcttttgttccgtctctgttcctagcgattctgcttctgctttcccatcacacacttcatctatcttctgtcttttgttctcaccttcactctaatcacacacacaaaaatagtattatgagcggcctaaccaaataattagaagtcgaaccattaaaccggtaaaaaccgaatcaaaccggacaaaaaaaagaaagagagaaaatacgtacagcgccaatggtggagacgatcttcgccgacttagactcatcttccctccgtttccaagcgccggagataccttcaataaccgcctgagacaacgcgtgactcatacgcgctggatcaccgttagcagctgtggttagatcagcatcaccgaactgattcggtccaacgaagcttcttctagaagaatctccggcggttgaaactccgttcaacggaaactgccagatctccgctagattaaacggtcctccttcgttcatcatcccactcggatccatcaacttaatcagttacaacacatacgacgaaaccagtaacaacaccgagttgactcagtcgtcgccgattcaaaaccagagagatagagaagagagaaatgattgtggcttggtgagtatgcaaaactccttggactgtggagtctgtgattgcgttactgtgttcttgttaataaattaataatattcccaacatatttaaatatataaatattattattttattcaagttttcagacataaatatatttgtttttctgtttcttgtacctcgggagctacggtgtttattaactttcacttcatggcgaggtttccttactctgacctatcgttgacttttgatcttctgcgacgcgagtgtacctacgctgctcttatgcttactgtttgattatttaagatctgaatcgatggtggttaagtgaaacacgtaaggctatgtgtgataatgggaaagaaacatactttatgaaaatggaaaatgacttgggggaagtggggacccacgtatgtttcgataatctgtttttgggtttagtaatgccctttattgattagtgatgggcaatgatggggttgtggattttaatgatgtgtaagtaaggactaagatcatctccaaggagacgccaaatcactaaatttggtgataattcttctccaacctaacatcataatggatgccatatttgatgtaacattgttcacaaaacactaaaaaatatatattattctatttatgtttttgatttagttttatatttaaattgttgattttcaaataaaagacaagtatactatcaatatttttttgaatgcttttgtttttgtaatatcaaattttaattaaattaatagaaaatgataaagtgcacaaatttttgaaataaatatcacattaattgagcacttgtggtccgaatatattaattctgaaatttagtacaatgtaatgtattttttattatttaatatttatcgattgtaatcttatattaattaaattaaaattaagcagttctaaattgaattagtttttatcaaattattaaaataactattattaaattaaatatttatatttaataatataataataaaaattttgtttttggtgtgggatttggtgtttatggttggagatagaaaaaaaatatgaataccaaaacactaaatttggtgttaaaatttggtgttttggtgtcaatggttggagttgctctaaggatgatggataatcctattttggatttttcaatttacttaaccttttaggtcttacaaatttttttgacataattataagcttatatttgtttcagaatatcgttatagttattttagtgcaattgtttttaacgaaatatctcgttttataatctattactttaatatatttaaccaatctaagaaatgatggaatatattaatgagagtaaggtggaaattttatttgtttcttttcaaaacttaattagttaaataacatatagtctaaaatagaaaagtattattttagtatcgttgaactaaaccctaaaatggcttaaaacaaattataaattgcagtaaaccacatgaatatcttgttaatgtttagtctaaactttggctataaaacatactttgagaactaaaaaattattcgaatatgatcaatgggctaaagacttttaaaaaaaccacttggatatctaaagaacatcaatagtgttagaatctaaatttaattgtataacttttctaataaactcctaagtatacatattaatctgtcgttataggcgtttcgttaatatgttttgtataattttataagaaaaaaaaaataattctgtatttatgataaatactttaagtcgttgataatttatatgataaatgttgcttggttgaaaatataacatataaatttatttaagtgttcagctttatggttgagaggaaaaggaatagtagtttgtgccaaactcttgcttgtgaccatttcttatgttaaatattcgttaggcttccctttcacctataaagctctttgtttctccttccttcttctattccgtaactcagtaccgcccatgtctctctcctatcacatttcgacacgtgtccttgatgattcccgacaactacgtgagtaagtgagcatcacgcaatcatcgccgtaccatgttccgcctaactcaactcttttcagatggattaaagtgcgacggaacaacgttttttcttttatctttatctttttaatttctcaattcttgttaagaaaaagaattagtttccatttaaagtaaacataattgtattatataagtacatctatatgtgaatcaaatacactccaacacattctcgatgattaacatccgagtaatgatcaagaaagaaatatgaaaatcatagttaacatctatcatctatgacatgttttttgtttgtttatatagagaccaattagaagtcgttaaatgattcaatctttaacggcgtccttacaatgatgctaagaagttttgggatggttaattgtaaatataatgacagctatagctaatctagctcacaacatgagcagcattgcttaacaaaatgcatcattatctttgctagttcaaaacttaaacaagcaagtattgatttagaagaagaaggtgtttctcttgtttgtgatatgctgataatcatggaaggtgacaggtgactgcaatgcttataatgatcttctctaaatccaaggaagggatgcaaatctagaaatcatgttggatgactttgaatatggctgacccggttggcagagttgtatttcgcttatatcccatgatcgataatcaaatagcatcccattttgcaaaagtggcccatcagcaacccattacggtacaaattcactattaacaccatgtagttcattttcacatacaaatatattatgcacgtggaaaatacgtaacttatgtgaaaatgaactaattgtctacgtcacggaatgaacaataacaatactccacgttgttttcaatccattctattggcgcacgttggaaattgtttgaaagttattttaattttaactttctgtattctcccaaattttaattaacaagtgttgtaaaaaaaagtttattagatgatcttgagtaaataaagaaaagaatttagtctgattgctaatgctagatgttaaagtcattgttcgtcaaacgaacaaaactcaaaaatagtaaaacataaatttttgttacaaaatgtatttgtcactccatcagtttatgatgaggggacggttggtacttgttttaaattgaaatatatgaattttttttttgaggtagaaaacgatggtacgctaacactgatcaacatcaatctctatcaaagtatcaattaatgatacaacaatatttgatcaacttgttgttgaaacaattttatacataaaattaaatggttgaatatatgtgtacttcatatcgttctcaatttgacgtttgaattgtgggctcgaaataacacataaggcccatataaaaaatgctgattgtaagttgtattatactttaccaaactatacaaaattgatttaagctttgaaggggcttgttttctattgaccataaaactaatattcgcagacaactcaaaaattgaactgtagaaattattgaaattcagattgcaaggtgtataacctgatagtagagcaatttgcttttatgtctaatctttaaactctaatttctatttttgagatcacattgtagattcacacaaacaaagtttcataataacaacttaattacataaaccaaaaacgtcggatgtgattgtcataaccttaaattacttaggaggaaatcacttaagagtccatgacagttaaaaactcctctagcaagatatgatgtgtatttataaattttctatatagtttttgattataggacaaaactaggaagttttcactatatatgcttttaaccttaatctaattatttaatttatgaaataaaaatctaactatttgattatttatgttttgttacattttgcttggcttataatatgattttaaagcgcatgcaaaattcactaatattcagaaaatagaggtttacatattgcggaagacgatatgttaataattcacacagttcacaaaagctttcaataatttggagatcgagtatttggctacaaatggacatgtaccatacgggctctctcacattgtcttaatcaacatttctataccattgacaagacactccacttttagaggtcgaaatagcgagtgacgatatctaattccaaaaattttgtttgataaaaaatggaataatagattggttgaaacttgaactgtactttggaacttgctatattttggagttgaaattgataaaaatatgttagagatggtcgtcaacccctccccaccacaaccacgacacgataagtattcttttttttggatagttgaaaagtaacacgttctgacattctgaccaaagaccatcaatcataattaagaattatatacgatggcaaaaaaagaacacaaactttgacttaccatggtaagaagtggatgctcaaaccaaccaagaaattaatgtctttgatgctctacttctgcatgaagacgttgtcttactccgctttagctacgtctctgtcaagtatgcatgtaactcgcggctttggtccacaatccaaatgggcctgtttggatgcggaagcggacgaataagtggatcttgattttggaaataaaagaatattgtatgtagaatgagttatgaagatttaaatttgtattaaactagtagtccatggtttttatttatttttaaaaatgttaaatgtatttattgataaattattttaattaatatgaatttttatataaatatgcattctttttaatatatatatttttctaattttgaaaccaataaattttgaaccagcaaaaatcaactaggcctgattgacagtccttactttaaatacctctcaatatataagacataaacactatttttaagtctctgtcaccatgtttatctgaattcaattggtttattataccactttaatttctccagagagctgttacatcgtcaaggaggatcaagttcatttgttacaatactataagaaagtagatcaaaagatttatatcacgcagtgcatgcgtagctctcttggttatcaaaggtttgttgtgacgatgatgttgaacctgtggtgatgttgaaacgccttatatatactgtggttacgttttactagctatacaccaatcctatcagaacagacaaaatgcaaccacttactagtttccaacatcttatcatttcattgcaaaacatgattataccatttcacaaaatgccaatctaataaaaacaacattttccattgaaaacaataaaacaaaaacaacatttttctcacttttataaaagtaggcctacaccatgcaccgaccgagttagttttgtaacattttatgattattggtgataattattgcgttttatatgaatattgggaatatgaaaaggaaacaaaggtgggatgtagatgtagtgagggtccatgaagaagagattgtatagttgtcacaagcataacaagtaagtcagattcatcaacctcctctttcattgtacaaccaaattcataactttttattcaccacctacattaattcatttatactcaactagattttagaacactggccaatagaacacatttacaaaacgtacatcaactttaaattttgggattcagtagtaccatagctattaatcttatttaacgttttgtactaatctttaattagtaaaatacgtacggcacaatatgcttatttgggggggggggggggggaaggggggatttcttaataatgtaacactttattatgtgatagcgaatgagattgtgtagattaggacactataatttttgtttataattttctgtattgattgataatcgataatatcagtaataagttttaggttcctttcaaacatcataagtaaatacgaatttgactttcacagtgtagaaataaatatatatttaaccagtaaaattagtttgcatattatacactcacgtaataagtttttttccattgacttcacaaattagtttgctcctcctacgaacatgtcatttgataatttcccgtaacaagtttttttttgttttatgattttttttgtcaaaaatctcaagcacatctaattatcaagatattgtctatttgtatagtttaataaaaagggcaagacaacaagtcgacgtgtgaaaacaacatcagacgctagtaaagatttgacgcgtgtaatttagatggccatactttgcctaacaaatgaaataaacaaatacaatatactagaaaatgatacatgataatactttttgttacctaaagtttctttgtaaagtatatataagttttatggttttatggttggaacgaagaagtcaaaagataatgaatgcactaatgcaccacatatacgtttgaagacactttttgacgcatgtttcagtcgaagtcaatcttttgcttctctagtctagaaataacttgtgtttattgtttaatgctcatctcttcacaaattatacttgttttgttgttgttaatacaaattatatatattttggacgatcgatgttaatttatgttaataaatattttctttgtagtaaattgtttagtaactcaccttcacccattttctaaccattgtcttggttcaagttccatatctacttacatataattgtactcttagggcgtgtttttttagtgtcgatgtaacacacattggtgacacaaaattcaaaggaaaaagagagtttaccttattttggactaatcggcagcttatttttttttttaccaaaacttgtatctccatcgagagtgtctttaaaaagccttcaagaatcggatcagagattgtagatctcgtaactagcattaacagattcgtttctcaaaaaattttggtaatgttttttttggctatcattgtatccaaaaacatagacacctaagttagagaatctttgaacaagagacggcgtttaatcctcatagtttgtcccaaatacatgttacacaccatgagcgtcttgcagctggtgttattcaagacgcaaagaatatatacataatcgatagtcatgtttctgaaaaaataagaaactaaaacataaatcgacaaatgttatgttttttgggtttttcttaattatatattttagtttaaattataaattgaaattgtttttctttttcttgggaataattttaaaaaataacaatcaaggttaattagtctttttacacaaatatctatatatacatttttgcagccattttgtgaaataaatcctgtagttgggacttatttacaatggctgccactgaattttaatgtttgtttttgataattaaaaaaaaatcttcgaaataaatatttgacatttaacaatcttccctaaatctctccacatcagttactaaaataaaactttcaaaatatttactatcatttaattacttcaaaattatcatttttgatattgcttttctccatgactataacaattcgattataatcatcaaatcgcagagatatttgatagcatttaattactacaaaattacaaaatatttagataataattcataaacatatcataaataagatcaacattaataaaataaatattttttttacgggacgggttggcgggacgggtttggcaggatgttacttaataacaattgtaaactataaaataaaaatattttatacatagatacaatttgcaaacttttatgtatactaacttcaaaaaataaattgtttccgcggtgtaccgcgagttaaaatctagtgagttagtatagttctagactgcgacgagagtcattttagttaattatgctaagatttaagtcataataggtaaatctcagtatatatatacgtgtatttttggataaactcttacctgtcgtaacgacacaaaaagaatacgcgccattaaatataaagatgtatatttcaaagaaattatatatatcttttttattgttaaaaagttatatgaaaaatgtattactataacattaaactaaacaaagaaactacaaaactacaaccgcgtattttaatgatcctaaatatttgttttgatattcaatattcagtgataattattgtatagttttcaattgtacatttgtgctgtcatcatatattcatttgatcaatatacatttttttaaaaaaaggaaaaatatattctgtgaactgaacaatctcttacctatactaaacaaatccaaattagattctaataactaaaagatattgatctttcacctacatgtcattaaaagaaaattatttgccatcctaatccacacaaataagcatatcgtatgtaatttactaattagagattagtacaaaacgttaaacaagataaaaccaaatgtgttgttgcttcaatcgtaaatctctaaaataagtgaccataattgctttttggacgatgccgttaactcaccgataactattgcaaaatttaacaacttgtcatttcataattacccaaaattttcattgacttcacatatctcaagaaaaatattttaaccaatcaaaaaattacttcttctttttttttttacttatttgtgaaaaaaagcttcttcttcaccaaacagtttgtctagttgtctgtgtctcatttaccatattttctctctaaatttttcccattactggatttgaagatcgtgtctggcagattttatctgattttctgatcagagagaagtaaaaggaaacaacttttttgttagctttctctctctacaagttttgggtttttaagagaaagagataaaggagacagctttctctctctgtctctctctaaaagttctgggtttagaaagagatctttcttatatgttgaatttgtgatcagaggtgagagagatgggaggttgcgtgtcaacgcctaagagctgtgtaggaggtaaaataaggtcaagcaaaaggagaaagactcggacaagacgaaagattcagaagaagagagttgtttcttcttctcgcttatctgacggatctttcgataataatcccactttcagaggtctctctctctctctctttctctaatctctaatctctcatttcatcaaaaatccatcttttgttcctctctgcatttctctattggttttggtcttgctctgtgttttttgattgatttggcttcgtgggttattgtctttcttgtgtatctcgaaggtttgttttagctttttgattgattgaattcgaaatatgttgtcttttgattggttagtgtgttgttttggggattacattgtggttagagtgttgttagatttgatttgtaggtctattactcaaaaagagtgaagctttctctaaatggttaacatctttgatgagcattgaatcgtgaggatcaaactaagaaacaacatgaaactgttgttaatttgacactcagagacttctgtcactttagctgaattcttcagtctctctattagagttataattattcacctgacttagtctcactgtctttatcaaacagcaagtgttgatgaagcatggtttgattccaatctcgcctttgaaaccgattgtgatgatgactttcatagtgttcaggaaggtacaagcaaaagctttaacattcttttgcttcgtcataggatcattatatcgcttttgttccaatgtttactggatttgtttcagatacgttgtcagtgaacggatgtgagcgtatctcagtatcgagtatgtcatctgttaaagactctaaccttggtggttccgctcggaattctctaagcgatgtcatctcacaatcaaaatcagagagtgctttgattgacactaagcaggctgttttcatcgacgagatatcttcaaatgctgatggtagctctaataaagatgaagggttgttggaaaactgcgggattcttccgagtaattgtttgccttgtcttaattcaactgttccttctattgaaaagagaaggtctttaagctctagccctccaagtacgaggaaaaaagctgcggttaaactatctttcaagtggagagaagggcaccctactggtcctttatgtaagtttcaattgtggttccaatgcatttgaactaaagagatttgaatccaagaactcactttgttctctacattgtttcagtttctacaacaatgcagttgcagagaccgatggcaggttctcaggttccgttttgtccactcgaaaagaaaatgtttgattcttggtcaattattgagcctggtagtttccgggttcgtagcaaaacttatttcaggtaaacttacggagagagcttgttgtttcaagtacctgattatatgttctgttactaactttaactgatatttcgttatttggtagagataagaagaaagagcttgcaccaaactatgctgcatataatccatttggtgtcgatgtatttttatctcaacgtaaagtaaaccatatagcgcaatacgtggagcttcctgttgttactaccaccccgactaagctcccatcaatccttgttgtaaatgttcaggtatattgtctagttccatggttaaactgttcctcttttgcatcgtctttggtgtttcggtttaatgatgatgttgctatcggaatcatagattccattgtatccagctgcaatttttcatggtgaaactgatggagaaggaatgaatttcgttttatactttaaactttcggataactatttaaaggagcttccaccacattttcaagaaagcattcaggtagtttaatcttccacgtcgtgattctgtttttttgtgctgtactcttgtgttgaaaacgcatttttgaatcgctttgtctttggatatatgcagagattactagatgatgaggttgagaaagttagaggctacactactgacacgaatgtaccctttagagaacggttaaagatattgggtcgtgttgcgaatgtagacgatcttcagttgaatggtgcagagaaaaaactcatgaatgcttataacgaaaaacctgtgctttcacgtccacagcacgagttctactcggtatgtcacaattatcataacaaatgcaaatcctattgaaacttgcaatataatgctgaactaacttaactttgaaatttgatcttgtagggtgaaaattactttgagattgatattgatatgcatagattcagttatatatcgcggaaaggatttgaagcatttttagacaggctaaagaactgtgttcttgatgttggactcacaattcaggtaatgtgtttcaatttgttacttctttgatgaatttttgggtctaattgctgtggttatttaactgtataatctcattttcaggggaataaaccggaggagttaccggagcagattttgtgttgcatccggttaaatgggattgattacatgaattatcatcagttagctcttagtcaagaagtcctatgatactaaacaaaagatatgacctttttttttgttgttgttctttatcttcttttcttttgttcctcaagaacacaaaatctaagagatacatcgttttgaagaagaagtcaataatggaagcatgagtatatacatgatacatcattccgaaacctgatcatttctcggagattgcctacgactctgtacagtggccaatattgctcatcataaatatcataattcaatgagaaatcaccaacaacagtaggatttaatgatgtcttcggaaaaccgttttctgatattataatgatgtatccgtaagaatatacatattttctctaaccaaatcatatcaaagctggtacgactataagtttcagtttgcttttactggttataaggggatggttttgacttttgagcaatgatcttgacccggggttttgagagaggagcaaggcaaagggctttcatatgtttcctctctagtctctacatgatgaacaaggcatttgggtttagacttcgtttaacctagtgtcgtcactaagtttctgttgtctctttataagttttagcttcttggttttggttttggcttttctatttgtgacttttgtccctctaactagttttggattcggtctctttcttttgggattagttttccaaagattttaccatattccgcatatcttttataattctcgtaacttagaaccaaattcacatcaaaaagaaccaaagattttgtctctctacctagttttggactagtctatattaaccgcgaacggaaatataatgtctaaaccaacctcactaaacccataaagtagcaggttgacaaatgtgcttaaaatttttcttctacaaataattgaaaaattaatcttcaaatattattatactaacaatttttaggtttaaaataactttagtatcactctttttgtaaatattataattcttctacattacattttttttaacacattaaatatccttatcaaatttgtaccttttgttttaacattaaatttttatttactcattttagaaaaagaaaaaaaatgttgtatttaatagaagaggataaaaattggaaaaaaagaagtaaaaaacagtaacaataaagaaacagaacagtgtttaaaaaaaaaaaagaacaaaaacaaattcacgtgggcgaaccgggaggaaatgaaccataattcgagtcggtccaatcaatcccatttcacaaaccgagctttggaaagacgctagattgacttattaaatacaacgcgagtcggtcgaaccgaataatcaatcctggttaacaaaccgagcgtcggagagacgctacactgacttgaatacaacgcagaaactcactgtttatatataaactcagcctcctcctccacttttcattctacgtacaaaaatactcttttaggctttttgattccggcgaggtctctgcttctttctcctccttctccgtcgtctccatatcgtgatacttcaggttacattcctcaaatcctcttttttgattctacgacgaacgacatcgctttccttaacagtttcggcgggtttatcacgcctgaatcctaatttttccaacatctgacgaacgagtacagaaatttctggttatttatcttgtgtgacattcgtgagacgtagtttagtttagttagattgatttccatcggattcatcataggtaatatttgttgaagtttatgtcatcgatttggttttgattttttgtactctgttttctaatttgatgattcctggttatgaaatacacaacttgtgatgttgccttgttcaatgtcgatcctatatacgactaattgtgttgttaattggtgtaaattggttcgttttggggttcttggtgtatatgattcatgatttggaacttgaaaagttccattacagtgtttgctaatgtacatgtttttttgttgttgtaccaggctagaagaaacaattcctttggctgagccgagagacgtgaatatatagacgaagatgttcggttcttctaataataatcgtaagtgatcctttaccttattgtttatttactatgggttttttttttgtttgtagtggcctgtttaacttgaaatctttcctttgtttcttaatcaaatttgatatttgtagcttttgcaatgctaaactcacccgttttaatatgttttacagcttttggacagtcatctataagcagtccttttgggacccaaactcattctttgttcggacagaccaataataacgcgagcaataatccttttgctacgaaaccttttggtacttctactccttttggcgcacagacagggagttctatgtttgggggcacttcaactggtgtgtttggtgcacctcaaacttcttcaccttttggtgcttcaccacaagcgtttgggagctctactcaggcttttggagcatcttctaccccttcatttggcagttcaaattcaccttttggtggtaagtaccttttatttatgttactgcattaactataccagggctggaatatactatgtgtttatatcatgtgagagatacattgataggcttcatggaataggatctactttctctcagtaggacttggagggtagcaatatccaagttttttggtcttcaaaagatttgttactacttccaaaattagtagtcttttgggttttctttgtgacagtactagcagctcctgatttggtctagtttgtttgttttctttaggctacaatttctcattagtcttttgatgtatctcctttgtgcactttttctaacgaagactgatcaatcttttcttacaggcacctctacgtttggtcagaagtcttttggcctctcaacacctcagtcaagtccttttggaagcaccacacaacaatcacagcctgcctttggaaacagcacttttggttcatcaacaccttttggtgcctcaaccacgcctgcctttggtgcctctagcacgcctgcctttggtgtctcaaacacttccgggtttggagccacaaacacacccggatttggtgccacaaacacaacagggtttggtggcagtagcacacctgggtttggggcatcaagcacgcctgcctttggctccacaaacacgcctgcttttggtgcttcaagtactcctttattcggctcctcgagctcacctgcatttggtgcgtcacctgctccagcctttggtagctctggcaatgcatttggcaacaataccttcagttctggaggtgcttttggttcatcaagcactcctacgtttggggcatctaacacttctgcctttggggcatcaagttccccatcttttaatttcggttcttccccagcttttggacagtctacctcagcatttggtagcagttcctttggttctacacaatcttccttaggttctacaccatctcccttcggagcccaaggttctctagctagtcctatgcaattacaaattataagtgaaagttcgcacccgttaaatggtaactaagtatgttcacatgttttgttttgcaggtgcacaggcttcgacttcaacatttgggggtcaatcaactatcgggggtcaacaaggggggagtagggttattccttatgcacctacaactgacacagcgtcaggcactgaaagcaagtctgaaagactacaatctatatctgccatgcctgcacacaaagggaaaaacatggaggagcttaggtgggaggactaccagcgaggagataaaggtcatatgccaaacaaatccatgatattcgttcgtctaaaggttagatgtttgtactttatttaccaaaatattgactctcttgttgttcaattttcaggaggacaacgttctactggtcaatctcctgaaggtgctggatttggtgtaacaaattctcagccaagtatattctctacgtcaccagcgtttagccagacacctgtgaatccaacaaaccctttttcacagacgactccaacaagtaacacaaatttttccccctcctttagtcaacccactaccccatcctttggtcaacccactaccccatcctttaggtcaactgtatcaaatactacatccgtttttggatcatcctctagtttaacaacaaacacatcgcagccacttggttcatcaatatttggttctactcctgcacatgggtcaactccaggatttagcattggtggatttaacaacagtcagtcatctccgctgtttggttcaaacccctcatttgcacaaaataccactcctgcattcagccagactagtcctttgtttggacagaataccactcctgcattaggacagtctagttctgtgtttggacagaataccaatcctgcacttgtacagagcaacactttcagtacaccttccactggctttgggaacacgttttcaagctcttcatccttaactacaagcatctccccctttggtcaaataacggttagtttttctgtaactaatttaaatgccagttcacttcagagttgatgtctctttcacttccgtttgagttatgtagggatttctaatatgagtttatttttgcagcctgctgttacgccctttcaatcagctcagccaactcaaccattaggtgcttttggtttcaacaactttggtcaaacccaaataggtatgtgaatcagtcaaaggcaccctgaatattatcatcttgaatactcgaagccaagtcttgtatgtttatgtttctgaagctaatacaactgacattgcaggtgcaatgggaacttttagccaaggaaactttaagcaacagtatggtctctctgacctcagtgtttccgactcttatttccgactagataccactagtttaattgtactttggaagttgcgtctctggagcttaattcttttctttttgttttgttttgttgacaggcctgcattgggtaactctgctgttatgcaaccaactcctgttacaaacccatttggaacacttcctgctttgcctcagatttcaattgctcaaggtggaaattcaccttcgattcagtatggtatctccagcatgcctgtaagtttttctgcctttttcaacacccacacacaccaccctttttcttcataacttctttccaaatttgaagcaaataaaatatagatattctcaaagatacaatgttacagaaacaaatgactactccatgttattaccctgaatattttcctttcttctcaggtcgttgataagcctgctcctgttagagtatcaccactcctaacttctcgacaccttttacaaaggcgggtcaggctaccaacaagaaagtaccgtcctagtgatgatggtccaaaggtatgtttttctattttctgaattttggctttgtcttgaatatttcagtctttagtgatgtttactgaaggtctttctacctgtttgtttcaccaatgtttgtccaggttccattcttcagcgatgaagaggagaattccagtacaccaaaggctgatgcgtttttcattccaagggagaaccctagagctttatttatacgcccagttgaaagggtaaaatcagaacatccaaaggatagcccgaccccactgcaggagaacggtaagcttcccttttttttttcattcattggcttatttattgcaagatttagagctttgtttcaattgcaaaaagaagcttttcattgtcccaatagctcggaagatgatctgcttgcatattaatatagtggctgaatttgatcatatctgaccccttattacatttgaaattcaggtaagaggtcgaatggggttactaatggagccaaccatgagagtgagtattttaaatatgcatttgtaacaaaattgtgattaaagtttgtgcattggtgaggccattcactgactctactgttaatatgtgcagctaaggataacggtgcaattcgtgaagctcccccggtaaaagtcaatcagaaacagaacgggacacatgaaaatcacggaggcgacaaaaacggttcacacagttcaccaagtggagcagatattgagtcattaatgccgaagttgcatcactctgaatatttcacagagcctcggatccaagaactggctgcaaaagaaagggttgaacagggttattgcaagcgggtaaaggactttgttgttgggagacacggttacgggagcataaagtttctaggagagacggatgtgtgtagactcgacctggaaatggtggttcagttcaaaaaccgggaagtgaatgtgtacatggacgagagcaaaaaaccgccggtgggtcaaggattgaataagcctgcggtggtaactttgctgaacataaaatgtatggacaagaagaccggcacgcaagtgatggaaggcgagagattggacaagtacaaggaaatgctcaagaggaaagctggggaacaaggagctcagtttgtgtcttatgatcctgtgaatggcgagtggactttcaaggtcgaacatttcagttcctacaagcttggagatgaatatgatgtgtagaaaaggaccaaagtcgttgtcatatgtagactagtgtctcgattattttttattttttttaccttgtggggttttgtctattggtcttttgcaatataatgtcaaaatgatacgtcttttacctcattggctcaacctggaaaaattcaatattcattttgttgttttcgccaattaatataataatatctcactaagaagcagaaaaaaaaaatagagtcgtggaggacacaaaactggtctcaccagttgtttcgtggtttcttctaaagatattattagttcctaatttataaaaaattttgatgactttaatcacatcctaaaaagtaaataaaagaaagattataaactatttagagaattttttataattttattgattagcttttataattttgtaaaatttctcaaataatttttctattttaataatatttttcatgactttctatgactttattttgtgaaaaaaatgtagaaagttatgaaccaataacataataattcaaatcattaacaatcagaaattattatattttaattgaataacacaaaacttttactgattttataagagtatgaatctaataactccaaatttatgaagattttagattactttttacaaatcttatttgaataacataaactttaacatatttttaaaaagtcttgattgaatatcaacagattctacataacactttaaatcactaactttttttttgaaatcatatataaaccaataacaccccctaattgtatacctaaactaaaaataatttagacaaaacaaagatgggagagagagaggaagtgaaactgttgggaacatggtacagtccggtcgtgataagagcaaagatcgctcttcgtctcaaatcggttgattatgattacgttgaagaggatttgttcggatctaagagtgagcttcttctcaaatcgaaccctattttcaagaaagtcccggttctcatccacaacactaaaccggtttgtgtatctcttaacatcgttgaatacatcgacgagacgtggaactcatctggatcgtccattcttccttctcatccttatgatcgtgcccttgctcgcttctggtctgtctttgttgatgacaaggtcagttttttttgtgtcttttttttctgatgtccaacaaatttaatttatgagtgatcagtaatactttatgcaataaaattttgatatttttagcgagatactaataattatatcttattttttgaatgacaaaaacttattgtttatgcatatctaaattgttgaaaatttgaaattaaatggaccatgcaaatatgcaatatgaagtgtggaaaattcggcttaaaataattgaaatctagtcctttttcccattgtttcaacaaaaacagaactatttatttatcactctaaataatttgatggatgattgaaattggtcccaaatatcttcaatgagttttaaacttgatcattataaaatcaattaggatgttcctaccatgaaataatcaatattttatcaagaagaaaccattaagcttaattttgatttagaacaaatttgtatcacactattttcgctaattttccatttcaagaatgcagtggttaccgactttgatggcagctgtggtcgctaaatcggaagaagcaaaagcaaaaggcatggaagaagtggaagaagggttgttgcaactagaagctgcgtttattgctctaagcaaagggaaatctttttttggcggtgaaacaatcgggttcatagacatttgccttggaagctttttagttctcttaaaagctagagagaagcttaaaaacgaaaagattttagacgaattaaaaactccttctctttatagatgggccaaccagtttttgtcaaatgaaatggtgaagaatgtggtgccggatattgataaagtcgccaagtttatagaagagtttgaggatagagctcaatatatccggtgcttctagatcttgagatcatcacagaaatcgttagaaaagagtggaggtttagtcttggcttcaaagtcaaacttgttatctccaaaaacagagtttcatatggtttattcatatgttagttaatctaaaagaagaacatggttctatttctcatttgctaaaaatcttttataactaattaaaaatattatgctgggacatattcaacaatagaacaagtgtctgtcactattcagcaaaatagttgttaggagatctcgggattacgagatcgttgtgaaatatatttccttattgttattaggaaacataatatttgtgtatatcttcctattattaaataagatatttagaattatcctaaatgtaaaaaacttgctaaacaaattatatatttgtataaataaacctcctattaggctaatcaataaaattgagagaaactattacatttcctccgtgcttatttccttcttaaagtgcaaaaataaactttgatggagtgagaatatatgacatgcttcttcttctttcttcacttatgtattatccttacatattaagggtcaaaggtgaaaacaaagaaaacatgaccgatgaaggcgctacttcacaaagacacaagactttcgatgtgatttgggtaaacattcatggtgtacatatacttgtcagaaagtctaacttcatcacccacagtttcgacttctctaatactgtttctcctgaaatcaaaatatagaatataaaccgatttagaaaaccaaaaaggtgaaaaataagctcaccagcattactaacatctttgaagtgtagctttttgttctgtattgggtccatttcagaaagtggtaacgagagaggttaccaaaattagggtttgtcaattgataacttcccacacaagtaaattgaccatcggaactattcttgtctacgggatacgagaaaacgaacagaatgtcaccttttcggacggttagcagtacagaaggccgcgatgccaaggacccagtcgcaaaggagttgatgaaattttgactggtggtgttggccgaccagagcttagagacggagcgaaatctcccaaccgatttcgcaggaagtcttgagagtatctcaatggttaaatccaaaggaacatggtctgattgagatgtatcattatcacgtgaggacattgtcgaagaagattatgttcttctctcgatctttcccgtcttctcttccatggtctatcgctccagtttttcactttctctgaaccctaattgagaatactcatttgattattaatataatattataatcttaatgttatttttacaaaattagggaactttgtcgtaaagtttaatttggtaaaattccaaaaataaattcaaattattttttatttgaatgtttaatacccaaaaaatattagaaacctaaagcgtctctcattaatattttggaaacttatcaatttacattagaagtttataactatattcagttgtaaacttatacaagttaatattaataaacctaaaattcaatttttttttttaataattatatgtatttatatcttatacaagttaatattaatatactccatgataataacaaaaaatatatttgataaattaagttatgtttataaaaaaatagtcaaaagctagcacaaggaaacaaaacgattgtgccctaagccctaagttaacaatttgtcttcatatatctcgagagaaaagagtgggcaagcgtagatagttaaaaacttagtttgaaatttgtaagaataatgacgacaatgtcagatctttctgtggatttggtaggggagatactctctagggttccgctaacatctctgagcgcagtgcgatgtacttgcaaatcgtggaacactttatctaagcatcagatttttggtaaagcagaattagcagcgactaagcagtttttggggttcactgtgatggattataaggtttgttccttgagattcgatctccaaggaatccgcaacgacggtgatgactttgttgatcacggtaaatccggtttaaaaataaggaataaagcggttaagaaaaatcacggtaacggacttcaccggaaaactggccgatgccacattgtcgaaagaagtgaacttaaccaagttgaagtatatgacgtctttcactccgacggcttattgctatgcgttaccaaggaccactggaggctcgtggtatggaacccgtatttggggcaaatcagatggattcgagccagaaaacaattcggctaatctaacatgtttagtctgggatacaacaacagtaatcgtaaccacaaaatcatgaagtttcttatgtttatgacaaaacagcatgtccacaatactcagaaatctatgattttaactccagttcatggaggctggttgagatcaatcccgtctggtttttacatagcgaccgcgtgtctttgaagggaaatacttacttttttgctcaagatttactaaaggatgcaaagattgagaattatttactctgttttgattttacagcagaaagatttggaccgcatcttcctctgccggttcactcttatgatgacgtgactctatcttgtgtcagacaagagcagcttgctttgttatatgggaacaacgagacagatgattcattagagatttggattacaaatcagattgatcccaatgcagtgtcgtggagcatatttttgaaagtggatatcaaaccgcttattggttttccaaaagacttcgatcctgggagcttcttcattgacgaagagaagaaagtcgttgtggtttacgatttggacggacatttatatagtaccaagaagaactgtgcctaccaaaggctttacatcattggagaagatggatacttcacatctgtaaaaatcaaatgctctgactcacctgaattctctgcttatgctccaagtttagtgacatacaaaccaaccaactacgcaaaatgaaaagaaaaaggaagaataaaagaagaaagatgcagattacttcttagttccatttgcaatactttttttgttacgtatttttttgcatcgtctcctgttttcattcattgtctttcatttccttttgaacatttattaatttgttttttgctatttatcatctaactaagtatttagatttatcatgatattttaggctttttttcaattgttagtatcaaatttttcaatataaaacaaattatatctaccacaatgcagattcgtcttgatgttctttgtgattgtcttggcattctctatatgtttttgtggaagcatcggagttttagattagatatgattaacgtaggagttcatgtagaagtagagagatgtgttgtaatttataaaagaggcttcatgataagatagcttttgttgtttgtcttcacttccatggttcattgtcttccttttccattgatgtgctggtgaatcacaaagatactcatgcatttttcaatcctaattttggcatatgtaagtttttttcaattttgtttgctttttaatccaggcattggatgaaaacagagagaattcagggctaaagaaagcctttgatttttttttttttgtgtgtgtgtcaaaacagataataaccttttgtttttgggtcgtttaattgctatatgatgcatcaaatcttgtaaacaagagtgattccaagaaggtggaagtatttccgcatgattacggttgttgcttcacaaaataggagacggcttgtttcctctgccgaaccattgacatgtaaaggtaaatgttcatgttttgagtgattgattgattcaagccttaattagcatgtttatattctcttttccatatcatcaactaacattcataccagttgtttctaagagatttagtcgctggcatgaactaatatatatgcaatagtatagaggcacacaaataaaagatttgatcggataaagatcataagaaaaatcagagacataaagaacatgcatcatataaaataaatgtaattgaaagggataacaaagaaaacatttgataagcattgacctatgaaggcgctacttcacaaaaacacgagactcttgatgtgatttgggtaaaccttcatgttgtacatatagtctttaacaaatccatagcggcttctaaattcatcacccacaattccttcaaccgagacttctctaatactgtttctcctcggatcaaaatatagtagataaaacgattcaaacaatatcgatggtgcaaaaacaatctcaccagcatcactaacaccataaaagcttggcttttctttccgtattaggtccatttcagaaagagtcaaaaacgcgattatgcgtccattcgtgtctatctccattcgtcaaaatccatatatcaatagacgggaatttaaaagtcttaactagggctaaccttcccacataaggtaccatataacaacttttcctataataaccctctggaagtttgatctggttgaacttttcagatctaacgtctaagctcattagtttgcgttccacttcaataccatcaccaacataaacagttgctccatagtacatgactccattaattagtatatgcatcccccacaacgtatagtagatcgatgcctagggacaccgttggttattattctccatgatcttagtccttaagctcccagtgtacgaatgcaaatcttcgagtctctctagtaacatgtagtagtacaatgattcaagttttcaatcaatctgatcatatttacgctaccattcttgattagatgcttatcctgctcaaaaatgtattcagatatatattaacaattacttttgaatggtatcaaatatttattaactaattctttttaataatttaatccaattaaattttaactttttaatggattcaaatatatactcattctttatttagtgttaaaaaaaaaaaagtagctcaactggaaatgtatgtaaattatatattaaaagctgacccgggtctagaggatgtatggaaagccaatagcatcgtttcgaacattgcaataatattgtgtggtgacaagcaacacatgatatgtccgtttagaaacagacaaaataagaagaagaagaaagagtcgtggaggattcttcattcttcctcatcctcttcttcaccgattcattagaaaccaaattacaaaaaaaaacgtctatacacaaaaaaacaaatgggagagaaagaggaagtgaaactattaggagtatggtacagtccatacgccataagacctaagatcgctcttcgtctcaaatcagtggattatgattacgttgaggaaaatctgtttggatccaagagtgagcttcttctcaaatcaaacccggttcacaagaaagtccctgttctcctccacaacaacaaaccgattgtcgagtctctcaacatcgttgaatacattgatgagacgtggaactcatctgcaccgtccattcttccttcacatccttatgatcgtgctcttgctcgcttttggtctgacttcgttgataacaaggtttggtttctttcttttcctttatccaacaatttcaatttcttattatttctttcagttttcttttgatggaattttttggaacttttttattattattgttacattccaatgaatttatctttcgtgcatggattatcttggggatatatacttagatcgtcctatttgagtgatttatatatgacaaaaataaaagagtaatgttgtattacataatacgtggatataaactcggatgaagacacattaccaatactatcacaagctagtcaactcaggtctaatgaaatccagtaaatacttcttctagtagtagcatataagtttgttctggtatacattattagtcctagataatcatacattatttctaacataaaaatgtcctaattcttatccataaatttaaataagaatcatcaggcttacaagagaacgacatttgtttgattactctgacactagaccacatttgtttgtttgcgtctccgttggtgtttctatgctacggtgaataggattttatgatatagggacgcaattcaaacataaataaacaattgtagcttatatattattcaaaaactaaaaatgcagtggtttccggcgttgagaatggcggcgatcactaaatcggaagacgcaaaagcgaaagccatggaagaagtggaagaagggttgttgcaactcgaggatgcgtttgtttctataagcaaagggaaaccctttttcggcggtgaagcaatcgggtttatggatatttgctttggaagctttgtggttctcttgaaagctagagaaaagtttaaagcagaaaagcttttagacgaatcaaaaactccttctctttgtaaatgggccgaccggttcttgtccgatgaaacggtgaagaatgtggcaccggagatcgaaaaagtagctgagtttctacaagaacttgaggttagagctcaatccgcagcttcaagatcttgagatcatcttagaaatgtattgcaatgcaattgtgttttgtgtacatgtaaaacgaaaataagttgaagttttaaagtgttgtgttcagtctatgctaggatttatgacgcggtgtatgggctacggactattttcagtttatgtttatcgaaaatataagggtcagcccaagattattaggggtcgtcccccctttaacatggaaatctatttaattcgggatcataattatttttggtaactgagataattttggaaatttttcaaaaatctttttaaaaaacttgctttaatattaagtttctattgggttttcacttttcagaccttcacatctttcttaaccaatatgagcccgccgggataatgtgctttcacatcgaaagttaaacgacttatcttgaccactagtacaatttgtctaatagtagtacttaattgaccactagtcctaattaatctactaatttttctgttttacattttaattaatctgctagtactaaattgtcctccatggaccctcttcattgcatctgctcctgataagccaaaaattttaatatcttgaaccaatcaaatttctctggtcagagagatctagtagcacgaatatatttattaacaaaaaagctaacaattattagagaaaattaagtaactaccaaaaagagtaacattgacaaatactttcacaaactcaaaaaaagaaagatatgaaaaatgagtaataataattttaaaataataaaataccttttctgtaaaatagacaaggtcccaaagacccagctcaagtccagctctctgtattcattaagttaccttctaaacattcacaccatctctttctctaacaatggagatttttcaaaaggccaaagccgttcgtctacggagccatcacgacaagtacctagtcgccgatgaagacgaagaatctgtaactcaagaacgtaacggctcagcaggtgcagccaaatggaccgttgagataatcccaggctcaacaaatctcatccgtctcaaaagcgcttatggcaaatacttaacagcgtctaacaaaccgtttcttcttggagccaccggaaaaaaagttctacagactaaacctagtcgtcttgactcgtctttagcttgggaaccgattagagattctgctttggttaagctcaagactcgttatggtaacttccttcgtggtaacggtggtttacctccctggagaaactctgttactcatgatattcctcatagatcggccactcaagaatgggtactttggcatatagatgtcgttgagatcctccctgcaaacgcaaactccgatcaccaccaccagcacctgcagctgcagcaacctccgtcgccgcttcatcattctgattctcttgatttcacacctggatctccttccagatctgaccgtttctttagacaagaggtgatttttttttttttgttatcattttttgtgctgatgattcgttgacttgatgttttgtgtgtggtagtcaacggattcactggcggttggatcgccgccgaaatcggaagggagagtgatatactaccatgtggcggatgatgatgatgatgttgaagatgactctgttgaggtaagttcgtttactttcaaaggaaatggtgttgaagagctgactatgagattgaaagaagagagcaatgtcgaagacgttatcgtttgtactcgtagtccgttgaacgggaagcttttcccattgcgtcttcaacttccacctaacaatgctgacatgactgttgtcttagtgccaaaatcatcaaaaagtgagtctcttttggtcctaatttcaagtcaagtcgttgcattgtcactgatgttctctgttttcttggatttaacagtagcagaaaagttcatcaagtgagatctttcttttgaagctgagctgtgaagtgaaggctttggctgcaattggtttgttgctactaagaaaggatttggattgacttagagatactgcttgattaccaaacttatgatttagagataccattctttcccttttgtccaactctaatgctcaatctctttcaattactgcgactagttttttttttgctaccagtagtctaaacaagagcaggatccatctttgaagtgatggaaacgaacacgatctctcacgatgatctcagtgttgaagacttttgagatcagtttagtaacctcgtggcaatcgttgcagacacgtagattcttgaatatacggattggagtctgaggtggtaagtttatcagaccaaaagcaatggcaagtctttcactgtgcagcctaagggaatactctttgctaccatcattggtggcatccactaaaggtgcttgagagcgatccggtaaataaccaattgatcttagcctgtcgtcgatcaccttcaactgttggtatatctgtttggtctgaggatgcgacgtgtctcctgcgaaaaactcgtgggagatgccatttatctcaatagaactgcatccaggctcttttctaattccatgttcactcattagttttctaacgattccaacatcgttccagcggctagctgatgcataaactctagacaacagtacatatgcaccactgcagttaccattggagctttcgttatcttcctttgttccaataatatttctagcaatttcttcacttagctccacactagcaccctttttgcaacaagcatcaaggagacttctccatatcactgcatctggtttcattggcatgctcattaccatgtcaatagcttcagtaatgtagcctgcacgagcaataaggtcgacgatgcaaccgtaatgctccaacgcaggttcgatgcaataatctctgaccatcatgtcaaaatactggcgccctttgtttacaaagcctcggtggttgcaggcgatgagcaagccaacaaacgtgactgagttcggtctaacattctctcttttatccaccatacggtcgaagaaattcatggcttcctcagctcttccatgtgtagcaaaccctagaatcattgcattccatgaagctaagtcacgtttttgcatcccctgaaacacttgctcagccattctcaacgacccgcatttgcaatacatttcgatcaacgagttcttaaccaaaacatccatagcaacatcgacatcacattttcgcagcagaaacgcatgtgcccaagtacctagtgacaaagatccaagaccagcacacgcactcaaaacactctgcatcgtataaccatctggttcaaacgatctctgcatctctctaaacagttgtaacgcagaatcatactccccaaaccgaaccagagcatcgatcatcgaattccacgaaacaagacttctctcaggcatttcatcaaacactttccgtgctaaatccaaacacccacaagacccatacaaatgaatcaaaccattattaacatacacatctccaccaaacccatgtttcacaatctgacaatgaacttgcttcccttcggagaacccgaatatataagcgcaagctttcaatacaaacggaaacgtatgcttatccggtgaagattcacctctctctaacattttccggtaaagcataaaggcttcttctttccttgaaacatcatgagcacatgctcttataagagtgttccacatgaaagagctatggttttcgatggagtcgaaaacccggaacgcgtaattgacgtcggagaaggaggaagagagctggaggattttgccgtagagaaacagagttgcgggttcctcagggtaagtagtacggagagtgaaggcgtgaagttgcttgagctgagacatgtctgaacatgtttctgctaaggagaaaatacgttggtgatggttaccggcggtggaggctgagggagaacttgccggtgggatatgaggagataatgggtggaccagaagaccgatagacattggatggtaataagttatagttgttggaggtgaaacgataattgaacgaacaaccatactttaagtttggaattcgtgaaaaaaccaatgtttttaaaccgaaccggatggcaaaccggatggcaagcaagactactcatcgagtcattggattaaccgagagtcaattaatatttttaaaaaatatatttagaatgattatctaatttaattaatttactagattttaatttacggtaaaccgcaaaactatatttaaaataaaataaattataatataattcgtttaattgatcaatagattttacaacctattgttttatatatttaaaatgtacaatttttatttatattacaattttatagtaattattttgtaatatatatagaaagaaaacgtagaacggtagcatgaaccctatccaactggtaacagcttgactggccaaggcttacattggaggatttctgtcgcaaccaccaaaaaccactcaagacactccaagctttgctatttagtatcgaatatgtattctgaatatcctacaaatagaatatacataattggtctccaagctgttacatagatccataaaaatgttacattacttggtctccaagctttgtatcctccatatacattgtcaaaaaacaattcttaatctctttgatcatgatacactttattatcttaaagttgtatggacatttttcgatccattcatatgagaacattatgatataattcatacacgaaaatgtttacaacattacaaaaaaataaaaattattttagtagtatggtagaaaactataaattaatgactgataaatcatatcttttggtacatttacgcagaaatactattttccatcgcaaaatttaatcaatattaaaagaaaaatcctaaaacttatatataattttttttttctgttttggtcaaccatactattatttctataggatacaaatacataaataagcaagacataagataacaccatatcattatttgggactttatgtttttggacaaaccattatttgggactaattaaaacacattaaaaccccctttttcggtttacaaatcttatctatcttcttttgtattttaacctcatcaagtccttctcccttcacggttagcaagtcgctttgtatattatatgttacagaactaactcctaacaaaaaggaaaaatacatttatatagatttttaaatattatagtgttattgaaatgttttctatgtaaactatatatttagtagcaactatatatataaaaaaatggtttattttggctccacaaaactattcgattgtgtttgtgtacctttacggctattgatatagtctaacgttttttccctagctctttcatcagtagatccaaacttgaatgtatattcttcctatcaaacaaaagagaaattgtattaaaatcctagggaattcattgtataagaaatccaaggtgctaaatatgtaaaactacatgtataattttcctttttaacggcttttaaaaaaattaacgaaccatttattgaaacaaagttcagaaatttcagtagagatgatcaaagcaatgtgactgcgagttttcaacttagtggcctgcttataacatcttttttatatattgatcattaaaatgcacaattttgatacatttatgtagtgttacaggaatatgacacttattgaaacattgtactattataatataggttccgatatatgtctaaacaattgtaaatattataacatatcttaagaaaaacaaaaggaaaattgtgataatatatatatatatatatatatatctgaaaggtttcaagaactttatatttaacaataaagttttcaataacataatgagcaaaataattaataattgtaagcatatatttttgtgctaaattaacctttaaatggaaaaataataaaactaaattgttattgatagaaaaatatataagaagttttctttgatcaaatataagaaaaagtaaaagtaagtatggcatatgaagaagtcaaaagttgtaaaactttatgaaattttatcataggagacgtgttatcttgtaatccttgagattttaatgtgtattaaaacataaaaatttagaatgaataataaatctctagaacgaacatagaaaatgaaaagaaaaaaatcatgagcaatatttccttgaaacttttttttggttattagaaaaatatgaagatcaccatagtacatttaagggtcaatgttattttaaaatattacaagaatcatgaacctaaatcataacacaaaagtttctagatttcattgattttaagcgacagtttctattctcaaagatttcatacaaaagtttcttaatcataacattcatattattcagaagtacctttcaaaatataactctaaggttaaacgaaatctactatataataaagggtaatattagtaaatagccaaattctacaaagaaaaaagaaattaaccatgactcagttttttttaagtaaataactttttttttttggtggagtagaggtgaagaacagactaaataaccttgtaaagttataaattttacaaaggatatatggagatctgaaaagaaggcgatggaaagaatatgaagaataaaaaaaactatagcgtgaaatataacataagtgcttggtttaaatagaaatagcatgtgatattttcatttattaataatataacatgtgctttacagaaatatttgaataacattttttactaaagatatcatgaaatatatagaacatcattgcaagaatacatgtgattcttttgaacagtatgaaatattaataaatatactgatatatgtattagtggcatgattttcaaaaacattacttgtattcttcaatacaggtttcaagaaatcaatgcttccatggaaggagagtttcatctatggaaaatgagttgatttgcttcagtgatggaaagtgagttgttaatgtcagcagaggacgtttggaaagtgctcgcgttaaaaaaatcagtggctcccaaaagtgggttgtagccagaaacagtccaatcattagtaaatagtgttgatgaaaaatcaaaatctagccaagaaggatcccaaacaccattgttggcacagaccccccaattatatgtgacctccattggatcagctgggaagtaatcgcctacggaaaaccctaacgtgaaaggatccatgagagaaaatccggctgcaacatccttagaaaccttggaagtagcagaagatccccaattggaagcagtttcttgggagaaacggaaacgtagcccatttcgtcaaagacaccaccaaaccctaatctctgaccttcagttgaaaccatcttgcggtttgagatggtggtgttgttgtctgaaatcctaagatgatcatcatcttccgtttctttcggcttgggcttcttcaagtttcttttcattatacttatattttgttgcttgactccaactaagctaagtgtttgcttgattgttttgtttctatttgcactcatatgagaaaatttgagataatccgtagataaacaaactttctttatttgaaattttatcatttcaatagtatggtaaaaatcagtgagagatacatattacaacaaactacggttcttttttcttaaaaatgcatctactagatttattttcgatgaagcattataagagtagaaatatagaacttgggtttaatcatcaacaatcagagaaaaattcacacacttttataaaatatgaatgcatagttaaacgccatacaattattagtcataatccaaatactttttacaaataagaagaaactaaaaaaacaccatgtcattacatgggaatacaaccaaataggtacctagtctttggttttgggttataaagctcatctatctttttctgaatttcggtctccttaattccttctccaaacacgcaaaatgcgttcatttgtgcataataacgtacagatacaactcctaacaaaaaaataaatacatttgtaaatttgtgaacatattttaaaatttgaaagccaaattgcaatgttttatatgtaatatatataaaatggtttattatagcttaacataagtacataaccattagattgtgttaacataccatcaaaactataaatacaggttagagctttttgcttggtatcttgattagtatctcctaacgtgaatacccaatttccctgaaattcatgatataagcaatacatgagttttgtatacataaaggatatatatatttttatccatttatttagtttaaaaagaattcttaaatatcaactcaccattttttgaaaccttaaaattttagaatttcaatagagatggtgaaaacaaaacactgattgtaagtttgaaccttagaacatgtatttatattgaattaaaatctatatttttgatatgtttatatagttacaacaatttgacacataatgatatttaacttccgaaatctgtaaaagttattctttttttttttttttttttttttttgtcgaatgtaaaagttattcttaagaataataacttcttcaagaaaagaaaaagattagaattatttattgatgtcttaaaggttaattttccaaacacacaaagagcaaatacaaaacattttactaaaatagtaagatatataaccaaattttaaagtaattatggtatattgatgaaataatgtttttatggatatatgaaatttatttaatgttattgtcaaacatgagatatgttatattgtaatttctaagattttaatgtgcaccaaatttataatgtgagaagagaaaagattaacaattttctctcaaaatatttactaaaacaaaaaaaaatactttcaactaaaatgtgttcttatctttaattaaaaagtgaattgttagaaattcaattatatatttacaaacataatattaataatatatatatatatatatatttgtcaactttctccatatgaatgacatatcatcacataaaatgacatgtgcccttttctattacttcaataaatatatttcagcaaatttagttgaaaaacaaaacacaaaaatcttctattaatttttttaaatgctctattagtttgtttcttaattcatctctttcaaatttaaaaggtataaaaagtcatgctaatttatcaagcatcacattcattctattcttcttagtttactaaaattttattatcaatgatcattataattacttgtgatgcaattacatgtttacaactcaagctcatattaatttaataattttatcttgagtcttttttttttttttttttttgaatatctgcaaattcaagcctaatgaccttacatttcttagaggtggaatccacaccatgttaaattcatcttttttggagaaaagatcatttccaacgtgtttcgaacccatcacctctacctaagagatttactactgggccaacagatcgttggtaatgaaatcttgaaaatagatataacaccaggatggaagaaaggaacgaagatatatttccttgagaaacgaaaccaagaacccggtgtcactccagcagatctcatttttgttattgatgagaaaccgcactcggttgatcaaaccggtgttactcggtttcttatatacatgatctgattgtatataagaaaatttcgcttttggaggcgttgacaaggctcacacttagcttaacaactctagacgtgaggaatcttactatcccggttttggatataattaaacaaacgccggtctctaaagactagagacaacactaatacaaaccactagaacgcataagtacatgtctttttactattagattttattaatatttgcctttttgtaatttaaaggtatatgagaatttgagataattcatagaaaaacaaaaaattcttcattaaaaatatatattatttcactagtatggtagaaatcaatgagagatacatattacaacaaacaaactactattattattcctcgccattcttgtgataaaacaaaatgcatctactagatttattttaaatgaaaatagaactttgtgtttaatgagaatcaaagaaaaatccaaacacatttatgaaatatgaatgcatagttaagcaccatacaattattagtcataatcttaatacttttacaaataagaagaaagacaccatattcattattcgggagtacaacacactagggaccaactctctttgtttgggttataaatctcatcgaccttcctttgaatttcagcctcgttgattccttctccaaacacgcaaaatgcgttcatttgtggattatatctcacagatataactcctaacaaaaaatatatatacatttgtaaacatattttaaattttgaaaacccaattgcaatatttcatatgtaatatattaaaaatgattaattgttgcttaacataagaagttaagtacataaccatagattgtgttaacttaccaggaaaactataaatacaggttagagctttttgcttggtgtcttgataagtatctcctaacctgaatgtccaatttccctggaaaaaattgaagtcaaagttttaatgtatttgtgatataggcaatacacaattatgtaagtgtaaggcatatatgtatgtatgttaacagacttcttaaatattaactcaccattttttgaaaccttagaagtttagaatttcagtagagatgataaaaacaaaagtctgattgtaagtttgaaccttaagagcatgtatttatatattaatttcttaaaatgtacattttgataggtttatgtagttacaacaatttgaaacatagtaatatttagcttccgacatctttaaaggttatttttatgaattaaaaatgcttcagaagaaataaataataattcttaatagatttcttcaaggtttatttcccaatacaccaagagcaaaatttttttttattaaaacagtaagatatataaccaaatttaaaagtaattatgctatgtagaaagattttttttttattgatatatgaaatttattcaacattattgtaaaacatgagacacgttatcttgtaatctctaagattttaatggcatcaaagttttaatgtgagcagagaacaaaattaaatttttttaagattttaagattttattgcactatagcactgtcaaacatataagacatgttatcttatcaaaaattaaaactttatataatttcagatttaatgggacattattggaaagatgcacaccaaaaggggcatgtctaaatctcttacaaattagcttctttatttttatcatctcctttattaatataattgtagaacaaatgtaatatcaattaatgtaacatttgaaatggaaaaattggaacaaaataatgaaaaaataatattcttgaggtgttctctgttttgctaatagatcagcaagttactcgttttaatttcatatataaaaaacagtggataagtattaatttaataattttatcttaagtattttattattactaggttttgtggataccgcttatcattgaaccttcttttgtgtgttcatgataagttaataatattgacatgcaagtattttttcaagttatggacctttgaagcattataattacaaatgaataagactaggaattcaatatacaatattctcacctatatggcaatatgcaagggaaaagatctaaaagatttagagaactcctcttctcaagggtttcaaattagagttgaactcctcttcttgagggcttcaaattaatatattatttaacaaaatttgaaaaacttgaaaatagccaaaaatgactatattgcctttgattttggatttcatagaaatattctgcattttttgaaaatggagaataaagttgcaaaaattgaagattttgagggttttttttatacacaaaacccacatattaaacatctatatataatccagttaaagatatttaaatataatcccaagaaatttattttaatcatttaattatttttattgtgataacatactcttattatgtgtaatataatttaaaaatatttaaaataagtttgagaaaaccagaaaattaaaattaatttacttcactttagttttcctgtataaaatttaaaatactatttacaaattagcttcttctttaaaatactattttcttctaaattagtaacatagctttgaggttttgcttctaaattagtagtgtcagatagtcatgtaaccaaggcattaacataacaccctatagctacacgtaattattggagaggagagtttgagaaatttcaggttaggagctcaacatttagaacaacaaatgaacaatgtacagtcttccaattcgaaagagaaatcaataaataaaactcagaatgatacaacttaaagaaaaattgaacaagtttaaagtatggaagattaatataatgtaactaataatatcacgttaagggattaacattttgataaatcattataagccccagtaatctacaacaaaaattaacagagagacgagaaataatggtgagatgccaaataaaaagattcaaatagaagattctagatactcaattttcatttaaaaataaaattgtgcctataaactataaatgtatctgtatctataatatataatacataagattacaaataaaataacaacaaatatttgaaacagaataaaggttccaattaaagtattcaaagattatgcttgtcatgttcttcttctacctttcttacatacacgtacaccaccacttctctcttcttcattatctccttcctcacgctttctcttcatttttgattcttctcattactctgtcttcgtctttctcaacgacgtcctctgaagcttcgtagcgatttcgaactgttcttgtcaatgggggttgattactacaatgtactcaacgtgaatccaagcgcaacggaagacgatctaaagaaatcgtatcgaagacttgcaatgaaatggcaccctgacaaaaaccctacttcaatcaagcaagaagctgaagctaagttcaaacaaatctccgaagctt

SEQ ID NO: 98 - DNA, 144422 bp, Arabidopsis thaliana
gaattctctgcttatgctccaagtttagtgacatacaaaccaaccaactacgcaaaatgaaaagaaaaaggaagaataaaagaagaaagatgcagattacttcttagttccatttgcaatactttttttgttacgtatttttttgcatcgtctcctgttttcattcattgtctttcatttccttttgaacatttattaatttgttttttgctatttatcatctaactaagtatttagatttatcatgatattttaggctttttttcaattgttagtatcaaatttttcaatataaaacaaattatatctaccacaatgcagattcgtcttgatgttctttgtgattgtcttggcattctctatatgtttttgtggaagcatcggagttttagattagatatgattaacgtaggagttcatgtagaagtagagagatgtgttgtaatttataaaagaggcttcatgataagatagcttttgttgtttgtcttcacttccatggttcattgtcttccttttccattgatgtgctggtgaatcacaaagatactcatgcatttttcaatcctaattttggcatatgtaagtttttttcaattttgtttgctttttaatccaggcattggatgaaaacagagagaattcagggctaaagaaagcctttgatttttttttttttgtgtgtgtgtcaaaacagataataaccttttgtttttgggtcgtttaattgctatatgatgcatcaaatcttgtaaacaagagtgattccaagaaggtggaagtatttccgcatgattacggttgttgcttcacaaaataggagacggcttgtttcctctgccgaaccattgacatgtaaaggtaaatgttcatgttttgagtgattgattgattcaagccttaattagcatgtttatattctcttttccatatcatcaactaacattcataccagttgtttctaagagatttagtcgctggcatgaactaatatatatgcaatagtatagaggcacacaaataaaagatttgatcggataaagatcataagaaaaatcagagacataaagaacatgcatcatataaaataaatgtaattgaaagggataacaaagaaaacatttgataagcattgacctatgaaggcgctacttcacaaaaacacgagactcttgatgtgatttgggtaaaccttcatgttgtacatatagtctttaacaaatccatagcggcttctaaattcatcacccacaattccttcaaccgagacttctctaatactgtttctcctcggatcaaaatatagtagataaaacgattcaaacaatatcgatggtgcaaaaacaatctcaccagcatcactaacaccataaaagcttggcttttctttccgtattaggtccatttcagaaagagtcaaaaacgcgattatgcgtccattcgtgtctatctccattcgtcaaaatccatatatcaatagacgggaatttaaaagtcttaactagggctaaccttcccacataaggtaccatataacaacttttcctataataaccctctggaagtttgatctggttgaacttttcagatctaacgtctaagctcattagtttgcgttccacttcaataccatcaccaacataaacagttgctccatagtacatgactccattaattagtatatgcatcccccacaacgtatagtagatcgatgcctagggacaccgttggttattattctccatgatcttagtccttaagctcccagtgtacgaatgcaaatcttcgagtctctctagtaacatgtagtagtacaatgattcaagttttcaatcaatctgatcatatttacgctaccattcttgattagatgcttatcctgctcaaaaatgtattcagatatatattaacaattacttttgaatggtatcaaatatttattaactaattctttttaataatttaatccaattaaattttaactttttaatggattcaaatatatactcattctttatttagtgttaaaaaaaaaaaagtagctcaactggaaatgtatgtaaattatatattaaaagctgacccgggtctagaggatgtatggaaagccaatagcatcgtttcgaacattgcaataatattgtgtggtgacaagcaacacatgatatgtccgtttagaaacagacaaaataagaagaagaagaaagagtcgtggaggattcttcattcttcctcatcctcttcttcaccgattcattagaaaccaaattacaaaaaaaaacgtctatacacaaaaaaacaaatgggagagaaagaggaagtgaaactattaggagtatggtacagtccatacgccataagacctaagatcgctcttcgtctcaaatcagtggattatgattacgttgaggaaaatctgtttggatccaagagtgagcttcttctcaaatcaaacccggttcacaagaaagtccctgttctcctccacaacaacaaaccgattgtcgagtctctcaacatcgttgaatacattgatgagacgtggaactcatctgcaccgtccattcttccttcacatccttatgatcgtgctcttgctcgcttttggtctgacttcgttgataacaaggtttggtttctttcttttcctttatccaacaatttcaatttcttattatttctttcagttttcttttgatggaattttttggaacttttttattattattgttacattccaatgaatttatctttcgtgcatggattatcttggggatatatacttagatcgtcctatttgagtgatttatatatgacaaaaataaaagagtaatgttgtattacataatacgtggatataaactcggatgaagacacattaccaatactatcacaagctagtcaactcaggtctaatgaaatccagtaaatacttcttctagtagtagcatataagtttgttctggtatacattattagtcctagataatcatacattatttctaacataaaaatgtcctaattcttatccataaatttaaataagaatcatcaggcttacaagagaacgacatttgtttgattactctgacactagaccacatttgtttgtttgcgtctccgttggtgtttctatgctacggtgaataggattttatgatatagggacgcaattcaaacataaataaacaattgtagcttatatattattcaaaaactaaaaatgcagtggtttccggcgttgagaatggcggcgatcactaaatcggaagacgcaaaagcgaaagccatggaagaagtggaagaagggttgttgcaactcgaggatgcgtttgtttctataagcaaagggaaaccctttttcggcggtgaagcaatcgggtttatggatatttgctttggaagctttgtggttctcttgaaagctagagaaaagtttaaagcagaaaagcttttagacgaatcaaaaactccttctctttgtaaatgggccgaccggttcttgtccgatgaaacggtgaagaatgtggcaccggagatcgaaaaagtagctgagtttctacaagaacttgaggttagagctcaatccgcagcttcaagatcttgagatcatcttagaaatgtattgcaatgcaattgtgttttgtgtacatgtaaaacgaaaataagttgaagttttaaagtgttgtgttcagtctatgctaggatttatgacgcggtgtatgggctacggactattttcagtttatgtttatcgaaaatataagggtcagcccaagattattaggggtcgtcccccctttaacatggaaatctatttaattcgggatcataattatttttggtaactgagataattttggaaatttttcaaaaatctttttaaaaaacttgctttaatattaagtttctattgggttttcacttttcagaccttcacatctttcttaaccaatatgagcccgccgggataatgtgctttcacatcgaaagttaaacgacttatcttgaccactagtacaatttgtctaatagtagtacttaattgaccactagtcctaattaatctactaatttttctgttttacattttaattaatctgctagtactaaattgtcctccatggaccctcttcattgcatctgctcctgataagccaaaaattttaatatcttgaaccaatcaaatttctctggtcagagagatctagtagcacgaatatatttattaacaaaaaagctaacaattattagagaaaattaagtaactaccaaaaagagtaacattgacaaatactttcacaaactcaaaaaaagaaagatatgaaaaatgagtaataataattttaaaataataaaataccttttctgtaaaatagacaaggtcccaaagacccagctcaagtccagctctctgtattcattaagttaccttctaaacattcacaccatctctttctctaacaatggagatttttcaaaaggccaaagccgttcgtctacggagccatcacgacaagtacctagtcgccgatgaagacgaagaatctgtaactcaagaacgtaacggctcagcaggtgcagccaaatggaccgttgagataatcccaggctcaacaaatctcatccgtctcaaaagcgcttatggcaaatacttaacagcgtctaacaaaccgtttcttcttggagccaccggaaaaaaagttctacagactaaacctagtcgtcttgactcgtctttagcttgggaaccgattagagattctgctttggttaagctcaagactcgttatggtaacttccttcgtggtaacggtggtttacctccctggagaaactctgttactcatgatattcctcatagatcggccactcaagaatgggtactttggcatatagatgtcgttgagatcctccctgcaaacgcaaactccgatcaccaccaccagcacctgcagctgcagcaacctccgtcgccgcttcatcattctgattctcttgatttcacacctggatctccttccagatctgaccgtttctttagacaagaggtgatttttttttttttgttatcattttttgtgctgatgattcgttgacttgatgttttgtgtgtggtagtcaacggattcactggcggttggatcgccgccgaaatcggaagggagagtgatatactaccatgtggcggatgatgatgatgatgttgaagatgactctgttgaggtaagttcgtttactttcaaaggaaatggtgttgaagagctgactatgagattgaaagaagagagcaatgtcgaagacgttatcgtttgtactcgtagtccgttgaacgggaagcttttcccattgcgtcttcaacttccacctaacaatgctgacatgactgttgtcttagtgccaaaatcatcaaaaagtgagtctcttttggtcctaatttcaagtcaagtcgttgcattgtcactgatgttctctgttttcttggatttaacagtagcagaaaagttcatcaagtgagatctttcttttgaagctgagctgtgaagtgaaggctttggctgcaattggtttgttgctactaagaaaggatttggattgacttagagatactgcttgattaccaaacttatgatttagagataccattctttcccttttgtccaactctaatgctcaatctctttcaattactgcgactagttttttttttgctaccagtagtctaaacaagagcaggatccatctttgaagtgatggaaacgaacacgatctctcacgatgatctcagtgttgaagacttttgagatcagtttagtaacctcgtggcaatcgttgcagacacgtagattcttgaatatacggattggagtctgaggtggtaagtttatcagaccaaaagcaatggcaagtctttcactgtgcagcctaagggaatactctttgctaccatcattggtggcatccactaaaggtgcttgagagcgatccggtaaataaccaattgatcttagcctgtcgtcgatcaccttcaactgttggtatatctgtttggtctgaggatgcgacgtgtctcctgcgaaaaactcgtgggagatgccatttatctcaatagaactgcatccaggctcttttctaattccatgttcactcattagttttctaacgattccaacatcgttccagcggctagctgatgcataaactctagacaacagtacatatgcaccactgcagttaccattggagctttcgttatcttcctttgttccaataatatttctagcaatttcttcacttagctccacactagcaccctttttgcaacaagcatcaaggagacttctccatatcactgcatctggtttcattggcatgctcattaccatgtcaatagcttcagtaatgtagcctgcacgagcaataaggtcgacgatgcaaccgtaatgctccaacgcaggttcgatgcaataatctctgaccatcatgtcaaaatactggcgccctttgtttacaaagcctcggtggttgcaggcgatgagcaagccaacaaacgtgactgagttcggtctaacattctctcttttatccaccatacggtcgaagaaattcatggcttcctcagctcttccatgtgtagcaaaccctagaatcattgcattccatgaagctaagtcacgtttttgcatcccctgaaacacttgctcagccattctcaacgacccgcatttgcaatacatttcgatcaacgagttcttaaccaaaacatccatagcaacatcgacatcacattttcgcagcagaaacgcatgtgcccaagtacctagtgacaaagatccaagaccagcacacgcactcaaaacactctgcatcgtataaccatctggttcaaacgatctctgcatctctctaaacagttgtaacgcagaatcatactccccaaaccgaaccagagcatcgatcatcgaattccacgaaacaagacttctctcaggcatttcatcaaacactttccgtgctaaatccaaacacccacaagacccatacaaatgaatcaaaccattattaacatacacatctccaccaaacccatgtttcacaatctgacaatgaacttgcttcccttcggagaacccgaatatataagcgcaagctttcaatacaaacggaaacgtatgcttatccggtgaagattcacctctctctaacattttccggtaaagcataaaggcttcttctttccttgaaacatcatgagcacatgctcttataagagtgttccacatgaaagagctatggttttcgatggagtcgaaaacccggaacgcgtaattgacgtcggagaaggaggaagagagctggaggattttgccgtagagaaacagagttgcgggttcctcagggtaagtagtacggagagtgaaggcgtgaagttgcttgagctgagacatgtctgaacatgtttctgctaaggagaaaatacgttggtgatggttaccggcggtggaggctgagggagaacttgccggtgggatatgaggagataatgggtggaccagaagaccgatagacattggatggtaataagttatagttgttggaggtgaaacgataattgaacgaacaaccatactttaagtttggaattcgtgaaaaaaccaatgtttttaaaccgaaccggatggcaaaccggatggcaagcaagactactcatcgagtcattggattaaccgagagtcaattaatatttttaaaaaatatatttagaatgattatctaatttaattaatttactagattttaatttacggtaaaccgcaaaactatatttaaaataaaataaattataatataattcgtttaattgatcaatagattttacaacctattgttttatatatttaaaatgtacaatttttatttatattacaattttatagtaattattttgtaatatatatagaaagaaaacgtagaacggtagcatgaaccctatccaactggtaacagcttgactggccaaggcttacattggaggatttctgtcgcaaccaccaaaaaccactcaagacactccaagctttgctatttagtatcgaatatgtattctgaatatcctacaaatagaatatacataattggtctccaagctgttacatagatccataaaaatgttacattacttggtctccaagctttgtatcctccatatacattgtcaaaaaacaattcttaatctctttgatcatgatacactttattatcttaaagttgtatggacatttttcgatccattcatatgagaacattatgatataattcatacacgaaaatgtttacaacattacaaaaaaataaaaattattttagtagtatggtagaaaactataaattaatgactgataaatcatatcttttggtacatttacgcagaaatactattttccatcgcaaaatttaatcaatattaaaagaaaaatcctaaaacttatatataattttttttttctgttttggtcaaccatactattatttctataggatacaaatacataaataagcaagacataagataacaccatatcattatttgggactttatgtttttggacaaaccattatttgggactaattaaaacacattaaaaccccctttttcggtttacaaatcttatctatcttcttttgtattttaacctcatcaagtccttctcccttcacggttagcaagtcgctttgtatattatatgttacagaactaactcctaacaaaaaggaaaaatacatttatatagatttttaaatattatagtgttattgaaatgttttctatgtaaactatatatttagtagcaactatatatataaaaaaatggtttattttggctccacaaaactattcgattgtgtttgtgtacctttacggctattgatatagtctaacgttttttccctagctctttcatcagtagatccaaacttgaatgtatattcttcctatcaaacaaaagagaaattgtattaaaatcctagggaattcattgtataagaaatccaaggtgctaaatatgtaaaactacatgtataattttcctttttaacggcttttaaaaaaattaacgaaccatttattgaaacaaagttcagaaatttcagtagagatgatcaaagcaatgtgactgcgagttttcaacttagtggcctgcttataacatcttttttatatattgatcattaaaatgcacaattttgatacatttatgtagtgttacaggaatatgacacttattgaaacattgtactattataatataggttccgatatatgtctaaacaattgtaaatattataacatatcttaagaaaaacaaaaggaaaattgtgataatatatatatatatatatatatatctgaaaggtttcaagaactttatatttaacaataaagttttcaataacataatgagcaaaataattaataattgtaagcatatatttttgtgctaaattaacctttaaatggaaaaataataaaactaaattgttattgatagaaaaatatataagaagttttctttgatcaaatataagaaaaagtaaaagtaagtatggcatatgaagaagtcaaaagttgtaaaactttatgaaattttatcataggagacgtgttatcttgtaatccttgagattttaatgtgtattaaaacataaaaatttagaatgaataataaatctctagaacgaacatagaaaatgaaaagaaaaaaatcatgagcaatatttccttgaaacttttttttggttattagaaaaatatgaagatcaccatagtacatttaagggtcaatgttattttaaaatattacaagaatcatgaacctaaatcataacacaaaagtttctagatttcattgattttaagcgacagtttctattctcaaagatttcatacaaaagtttcttaatcataacattcatattattcagaagtacctttcaaaatataactctaaggttaaacgaaatctactatataataaagggtaatattagtaaatagccaaattctacaaagaaaaaagaaattaaccatgactcagttttttttaagtaaataactttttttttttggtggagtagaggtgaagaacagactaaataaccttgtaaagttataaattttacaaaggatatatggagatctgaaaagaaggcgatggaaagaatatgaagaataaaaaaaactatagcgtgaaatataacataagtgcttggtttaaatagaaatagcatgtgatattttcatttattaataatataacatgtgctttacagaaatatttgaataacattttttactaaagatatcatgaaatatatagaacatcattgcaagaatacatgtgattcttttgaacagtatgaaatattaataaatatactgatatatgtattagtggcatgattttcaaaaacattacttgtattcttcaatacaggtttcaagaaatcaatgcttccatggaaggagagtttcatctatggaaaatgagttgatttgcttcagtgatggaaagtgagttgttaatgtcagcagaggacgtttggaaagtgctcgcgttaaaaaaatcagtggctcccaaaagtgggttgtagccagaaacagtccaatcattagtaaatagtgttgatgaaaaatcaaaatctagccaagaaggatcccaaacaccattgttggcacagaccccccaattatatgtgacctccattggatcagctgggaagtaatcgcctacggaaaaccctaacgtgaaaggatccatgagagaaaatccggctgcaacatccttagaaaccttggaagtagcagaagatccccaattggaagcagtttcttgggagaaacggaaacgtagcccatttcgtcaaagacaccaccaaaccctaatctctgaccttcagttgaaaccatcttgcggtttgagatggtggtgttgttgtctgaaatcctaagatgatcatcatcttccgtttctttcggcttgggcttcttcaagtttcttttcattatacttatattttgttgcttgactccaactaagctaagtgtttgcttgattgttttgtttctatttgcactcatatgagaaaatttgagataatccgtagataaacaaactttctttatttgaaattttatcatttcaatagtatggtaaaaatcagtgagagatacatattacaacaaactacggttcttttttcttaaaaatgcatctactagatttattttcgatgaagcattataagagtagaaatatagaacttgggtttaatcatcaacaatcagagaaaaattcacacacttttataaaatatgaatgcatagttaaacgccatacaattattagtcataatccaaatactttttacaaataagaagaaactaaaaaaacaccatgtcattacatgggaatacaaccaaataggtacctagtctttggttttgggttataaagctcatctatctttttctgaatttcggtctccttaattccttctccaaacacgcaaaatgcgttcatttgtgcataataacgtacagatacaactcctaacaaaaaaataaatacatttgtaaatttgtgaacatattttaaaatttgaaagccaaattgcaatgttttatatgtaatatatataaaatggtttattatagcttaacataagtacataaccattagattgtgttaacataccatcaaaactataaatacaggttagagctttttgcttggtatcttgattagtatctcctaacgtgaatacccaatttccctgaaattcatgatataagcaatacatgagttttgtatacataaaggatatatatatttttatccatttatttagtttaaaaagaattcttaaatatcaactcaccattttttgaaaccttaaaattttagaatttcaatagagatggtgaaaacaaaacactgattgtaagtttgaaccttagaacatgtatttatattgaattaaaatctatatttttgatatgtttatatagttacaacaatttgacacataatgatatttaacttccgaaatctgtaaaagttattctttttttttttttttttttttttttgtcgaatgtaaaagttattcttaagaataataacttcttcaagaaaagaaaaagattagaattatttattgatgtcttaaaggttaattttccaaacacacaaagagcaaatacaaaacattttactaaaatagtaagatatataaccaaattttaaagtaattatggtatattgatgaaataatgtttttatggatatatgaaatttatttaatgttattgtcaaacatgagatatgttatattgtaatttctaagattttaatgtgcaccaaatttataatgtgagaagagaaaagattaacaattttctctcaaaatatttactaaaacaaaaaaaaatactttcaactaaaatgtgttcttatctttaattaaaaagtgaattgttagaaattcaattatatatttacaaacataatattaataatatatatatatatatatatttgtcaactttctccatatgaatgacatatcatcacataaaatgacatgtgcccttttctattacttcaataaatatatttcagcaaatttagttgaaaaacaaaacacaaaaatcttctattaatttttttaaatgctctattagtttgtttcttaattcatctctttcaaatttaaaaggtataaaaagtcatgctaatttatcaagcatcacattcattctattcttcttagtttactaaaattttattatcaatgatcattataattacttgtgatgcaattacatgtttacaactcaagctcatattaatttaataattttatcttgagtcttttttttttttttttttttgaatatctgcaaattcaagcctaatgaccttacatttcttagaggtggaatccacaccatgttaaattcatcttttttggagaaaagatcatttccaacgtgtttcgaacccatcacctctacctaagagatttactactgggccaacagatcgttggtaatgaaatcttgaaaatagatataacaccaggatggaagaaaggaacgaagatatatttccttgagaaacgaaaccaagaacccggtgtcactccagcagatctcatttttgttattgatgagaaaccgcactcggttgatcaaaccggtgttactcggtttcttatatacatgatctgattgtatataagaaaatttcgcttttggaggcgttgacaaggctcacacttagcttaacaactctagacgtgaggaatcttactatcccggttttggatataattaaacaaacgccggtctctaaagactagagacaacactaatacaaaccactagaacgcataagtacatgtctttttactattagattttattaatatttgcctttttgtaatttaaaggtatatgagaatttgagataattcatagaaaaacaaaaaattcttcattaaaaatatatattatttcactagtatggtagaaatcaatgagagatacatattacaacaaacaaactactattattattcctcgccattcttgtgataaaacaaaatgcatctactagatttattttaaatgaaaatagaactttgtgtttaatgagaatcaaagaaaaatccaaacacatttatgaaatatgaatgcatagttaagcaccatacaattattagtcataatcttaatacttttacaaataagaagaaagacaccatattcattattcgggagtacaacacactagggaccaactctctttgtttgggttataaatctcatcgaccttcctttgaatttcagcctcgttgattccttctccaaacacgcaaaatgcgttcatttgtggattatatctcacagatataactcctaacaaaaaatatatatacatttgtaaacatattttaaattttgaaaacccaattgcaatatttcatatgtaatatattaaaaatgattaattgttgcttaacataagaagttaagtacataaccatagattgtgttaacttaccaggaaaactataaatacaggttagagctttttgcttggtgtcttgataagtatctcctaacctgaatgtccaatttccctggaaaaaattgaagtcaaagttttaatgtatttgtgatataggcaatacacaattatgtaagtgtaaggcatatatgtatgtatgttaacagacttcttaaatattaactcaccattttttgaaaccttagaagtttagaatttcagtagagatgataaaaacaaaagtctgattgtaagtttgaaccttaagagcatgtatttatatattaatttcttaaaatgtacattttgataggtttatgtagttacaacaatttgaaacatagtaatatttagcttccgacatctttaaaggttatttttatgaattaaaaatgcttcagaagaaataaataataattcttaatagatttcttcaaggtttatttcccaatacaccaagagcaaaatttttttttattaaaacagtaagatatataaccaaatttaaaagtaattatgctatgtagaaagattttttttttattgatatatgaaatttattcaacattattgtaaaacatgagacacgttatcttgtaatctctaagattttaatggcatcaaagttttaatgtgagcagagaacaaaattaaatttttttaagattttaagattttattgcactatagcactgtcaaacatataagacatgttatcttatcaaaaattaaaactttatataatttcagatttaatgggacattattggaaagatgcacaccaaaaggggcatgtctaaatctcttacaaattagcttctttatttttatcatctcctttattaatataattgtagaacaaatgtaatatcaattaatgtaacatttgaaatggaaaaattggaacaaaataatgaaaaaataatattcttgaggtgttctctgttttgctaatagatcagcaagttactcgttttaatttcatatataaaaaacagtggataagtattaatttaataattttatcttaagtattttattattactaggttttgtggataccgcttatcattgaaccttcttttgtgtgttcatgataagttaataatattgacatgcaagtattttttcaagttatggacctttgaagcattataattacaaatgaataagactaggaattcaatatacaatattctcacctatatggcaatatgcaagggaaaagatctaaaagatttagagaactcctcttctcaagggtttcaaattagagttgaactcctcttcttgagggcttcaaattaatatattatttaacaaaatttgaaaaacttgaaaatagccaaaaatgactatattgcctttgattttggatttcatagaaatattctgcattttttgaaaatggagaataaagttgcaaaaattgaagattttgagggttttttttatacacaaaacccacatattaaacatctatatataatccagttaaagatatttaaatataatcccaagaaatttattttaatcatttaattatttttattgtgataacatactcttattatgtgtaatataatttaaaaatatttaaaataagtttgagaaaaccagaaaattaaaattaatttacttcactttagttttcctgtataaaatttaaaatactatttacaaattagcttcttctttaaaatactattttcttctaaattagtaacatagctttgaggttttgcttctaaattagtagtgtcagatagtcatgtaaccaaggcattaacataacaccctatagctacacgtaattattggagaggagagtttgagaaatttcaggttaggagctcaacatttagaacaacaaatgaacaatgtacagtcttccaattcgaaagagaaatcaataaataaaactcagaatgatacaacttaaagaaaaattgaacaagtttaaagtatggaagattaatataatgtaactaataatatcacgttaagggattaacattttgataaatcattataagccccagtaatctacaacaaaaattaacagagagacgagaaataatggtgagatgccaaataaaaagattcaaatagaagattctagatactcaattttcatttaaaaataaaattgtgcctataaactataaatgtatctgtatctataatatataatacataagattacaaataaaataacaacaaatatttgaaacagaataaaggttccaattaaagtattcaaagattatgcttgtcatgttcttcttctacctttcttacatacacgtacaccaccacttctctcttcttcattatctccttcctcacgctttctcttcatttttgattcttctcattactctgtcttcgtctttctcaacgacgtcctctgaagcttcgtagcgatttcgaactgttcttgtcaatgggggttgattactacaatgtactcaacgtgaatccaagcgcaacggaagacgatctaaagaaatcgtatcgaagacttgcaatgaaatggcaccctgacaaaaaccctacttcaatcaagcaagaagctgaagctaagttcaaacaaatctccgaagcttacgatgttttaagcgatcctaacaaacgtcagatctatgatcaatatggtgaagacggacttacggcgacagaagcaacggcgtcgtctcaacaacataattactcttctggtaacaacaataattacaatgcagggtttaggtattatccacgtgatgctgaagatattttcgctgagtttttcggtgcatctgagaaagtctttgatggtggcgtcggcggtggcgggaggtttaaaagtgcggaggcgggaagtcagacgaataggaaaactccggtgaacaggaaagctccggcgattgagagtaaattggcttgtactcttgaggagttgtataaaggtgggaggaggaagatgaagatttcccgcgttgttcctgatggtcttgggttagtatttcataacacatgatctaaatgaaatcgccttttttcattcagtttcgttcgttatattagtagttcgtgattacgtaaattatatttggaaaagtgttgaccaattattttgtggtttcttgtatgagtcaatggataatcctctgtatatatgctctgtttttgtgatttatcttgatggtaaaattttgtaatcaagacgaaacaattatccaaattgttgtgtttttgacatttttctttgataagttttctttatttttctctgtttaatgttgttgttattattggtttttttttttgtttttttgacaattttcctttgtttaattgcgtttttatctctagtgatgttgatattgtttgatgattgatgtacctaattattttcttgttgctacgtttgatttttctaagcctagttgcttttttggttgtgatcaatatatattcatgttttgatatcagaaagtcaaagccagtggaagagatcttgaagatagatataacaccaggatggaagaaaggaactaagataacttttccagagaaaggaaaccaagaacccggtgttactcccgcagatctcatctttgttatagatgagaaaccgcattcggtttacaaaagagacggtaacgatcttattgtagacaagaaagtttcgcttttggaggctttaacagggatcactcttagcttaacaacactagacgggaggaatctgactatcccggttttggatatcgttaaaccgggtcaggagatagtgattcctagtgaaggaatgcccatctctaaagaaggttcaaagagaggagatctaagaatcaactttgagatatgtttcccctcgaggctaacatcggaacagaagacagatctcaagagagttcttggtggtagctgaattggcaactagtttcaagaaagctcttgaattcaaaaggtcaattcagtgtacatacatatacagaattgatcggttttcgtttttgatctcatatcttgatcacgaaatagtaagcagaattgattgttttttgttgtaaaagctatctttgttgttatctaatttattctgctttcataagttatatatgtaactctcaacttcatacaagctcttcgaaaatgttatgtaacgtttgtttttttccatttagtattttaacatatacttggaatgggactcttttttttttttttttatggtatagttcttttagtcgccatactcacattaccattgttatgttgttttgcttacgttggggtgattagatttcatacaaatataactacaacatttttgttaattgttttcatttttgacattattatttatattgttttgagaaattaaacaacaaaccagaaacccaacttcaaacaatcaattcagaacagacattcaaaagtataataatcatttttttgtaagggaaaagaaaaaacttaaaccctatgttgttcaatcttcttcacgagctcatcaggtttggctccaacaaccctatcaatctcttctcctctcttcacaaaaacaaaagctggaagtgtaatagctctatatgtcccagccacatcctggaatacataccaattatagcttagtcttgaaaccataagatgattcttcttcaagtaataaaaaaaaagagtaattaccattagcctatccacatcaaccctagcaaacacagcttctgagtactttgaagcaatctccctaactctaggttccattgctttacaaggtccacaccatacagctgtgaaatcaattactagcttcaaaaccacaataattttttcagttagtttaagagaaaaaacatgtcatttacttgtaaacaaaattagaaaacacaaatagtataagatttaaaacaaacattataagtttggttaaaaaaatttaatacgttttaggtagttttcgagtaatgtataccaatttgtttgagcctttcatggaatcaaagagagatttccattgtcttcttgattcgatttccacaacaaatccattactggtaatttccattgatgaatgaacatcatgcacagatgaaacattggaacccattatcttcggaatgtgtatgtatgaagaaatggtgttcacttatttgctagtgatatactgatatgcaaagaagagagacaaggaggagcattatatagcttttaatcggagaacttaatttgttggttataaataaataagtaaatgcaaaggaatatgattcaatttgctatccttctttagttctagccgttgatttttttattttttcaagaatatatagcttataccaatttagtttcgctttgtgtttttaaaattccagttagttgttaaatattctccactacataaaaatatagctggttgcaaggaactagcttgcctatcacatttgcaaacgaattttttatttttgtgggtggataacaatccgcggcggatcgattttctaattaaaaaatggtagcctaggtacttgatttattagtttagattaattagttattgtcaacgctataaattaaaagtagttaaaatttgttttgtttaaataatatatgcaccatccacttcaaggatctaatacctatataatattaatgctattaattactataaaaataaaaatgtcacatggcaggagagtttctaatgagaactcatttttatttttttcctaattgatggtgatactcttatgtctttactgaaatctttaatttacatttacataaaactttacagaacgaaattagattagaataaaacgagaaaaaaatttgcaaaatgaccatgcatgtcattgtaaatttgtaatgttgtttggtgtgtccgtgtgtaagaatattgatttgtgttaaaaagaagctgtcatcaaattcttcctcaaggtccttcttattccatttcagtacttataggaatcattgtcgaaaatgagtttgaaattaacaatttattcgatactgggggacaagaaatgcacgtcgtagccacgaacatcatctttaactttttgcccataaactttcacatcatcctcttataattctcattctcaaggaactaggaatgctgattcaaaaatacagttcggtgatgctcgaatatcttaaattttagaacatattgttggggtttaagatctcgatttgcaaatattaatttgaaaccattttttggtctgatttctaataaaattgaaacaccactgttttataagaactaaaaaaaacttgtagaaatgttgcatcaaagtatgctttataaaacattaaatatatatatgttgggatcaaaatatgcatatatatatattatatatatatatatatgaaggcgttatcaaagaaatacaacaagttttttagaaaactgaaaacattaaggaatacttcttaaatttgtaagtacccttcctaagactttctttcccttacttttactgtatttggaattttggaattgtgtagtttaagacttaaaagaattctcaaatatttattgtactggtaattcataaagtaaactaatcacgtttagatatttaaacatgtgtagaaaatcgtttttaatttagattttgcctttgaatttattcattttttaatcataatttatcgataatattacacatgactttcttaaaggttgcatgagttctgctacccacatatttctttattcctagctcgatctataaagattctaatataagtttttccacaatctaaagaattttattccatgaaatcgtatccatacaattttatattgttgattttctctctttttaatttatgtaggaagagtaacacaattagttcaatacctctgtatttacttttctgctactaagcaatatattacagttacttataaaatagttctgtataatagttcaataaagttagttatatttttgcaaacagaaagtgtgaaaaagatacaagagcagaagaaacgattcttaaatacaagtgcaagtgctttttccttgaaatatacggtgatttgaatcacaaaccttcttagctaaatgaccatcttatgataaaaacaagatgtggccgccacgagaagtctaagcaaggaagtaggtgcatatgatgaactaggtacgccgacgaacatagaaaaaaatgaggtacagattaaaatccatttgtggagtatacacaaaatgtttgtttgaaaaacaaattatgaagagtttcaagattgttttcaaggaactatcaataatttatgtttgactctatatgtagactgatatgcaaaagatcaagtgtggatgaatgaaattggattggatgacattattttgaggccaggggataaagattatagaagtagcaatattaaatgtggtagatttaaaacaacgacaatagcatgaactaagttttgctgctggtcactgtcatttatcgctggccaaaattagacgcatcctaataattagcccaccttatgttgaaaacctaattaggctaaatacactagagcatacttcgctaacacatcgaaaaacactgaaaacaaacaggacgtaggatcaagttgctaactcacgtatctcatcatagtaacaaaagaattaataactgcacagcgagagataaatttaaccctaatctaaaataatgaagaagaacattgtggattttaaggtacaacatatttcgtctgttcaatctttcacaccacttagctctctcgtatttggattatattgtccaagtttggccctagcccatactttactaaagccccattaaataacttcaacaatgttcaacccaatctcacaatcacaaatgccactttttggttacattctccttttctatgtttttccaaaggttaaattcctttcttatggcttatgttggcttatgacgtatccaacatttcactatcaagtttgggtttaaacaaaacaactggtgtggtgtagattgaacattcgctttctcatggattctaaaacgtataaaaagaataaaaccttaggtccacaactacaacttatgaggtagaaaaaaacaaaacttatgaggtaaaatatatatataacttcagaaaatatgaggtatatatcgatttattgcgcacgtaatttatatatactatatttacccatgcataagtattcacgtatctctatagtcactgtatacgtgtatgcttacgtaagaatacgtacatgacatattcatggaatttttcgatgcatacgtatatttatttttgataactttggatgtttcgtattaatttggtatcgcttaacattctcttttttattaaacaattagtttttcagtctattgacttgatgccttgatggcaattcaaaaatttgataaatcttttgactgctagctcaattaatttctctttttttttttgttaatattttttttataaatcaagtggtattccaagcatgaaaaaggtttcatgaagggtccaatcacaataaaatagttcatatcatcttggtacgaaattagggggtagaatatgtattacattatatctaaaattctgtttatttttctaataattaggaggttttggcatacgtccatgcatttcctcagactcagaaccaaaacatgttatatggtctcgtcctaaaaactactcgaatgagtaacttcaagattttgccataaattgttaccagttgaactattgaatcttgataatttaattatctttgtttactttgtagtttgtgcacatgcatggttcattatttttcaactcgaaatcccaaaaatatagcgtccactataatatgtccacctctcgttcttgctgttaaaattttccacttgcgttgatcataaatccaccttgacgaatgtttatttactttttgattttctattgaagaataatttaagaaggattattgttcaatagattgtacgatttagttattattcaaaagttattgttattttcaaaatattaattagtattgattttgtagttcttttaaaatctagtgttattagtatacactttgtataatttatacatatacaaattcaaaaaaatgataggtatcaattgaattcatagagtttttaaaataaaactttttaaatacacaaattaagctctctaaaattttaataaatctttcaagcttcttaagaaaaaagcgtatattttaacttcaattttgtgcacagtatcttttctatctttagcaaattttagtgtgcttcttaaccccaactcatcaaatattcaaatttattacccaaatatgtgttttgagcaaaaaaacaacaacattgatttagacaattttagtccaacactaaaaattgatgactcaaagccaagtaaagtaagcagctatgatatgaaagcaggttcgtgcagagaatacgctgtttgaaaggtctcagaattttttgtccggttgaaatgtgttgccacgcaagataagcatgtcgcctgcgtgctgctactcggacgacacaatggttttttttttttttaatatcaaaaagttctgggccaaagcccgtaatctcttatatccgaaactacagtatgtaatattattttcatcctaaacgtcactcaaaccggtgatctctaaatttcgtttatacaaaacacttcgttttttgcttcttagagtccaaacagtaaaaatgatgtagttttagaacttgggcaaatatcgattttagggatttcaacattttcttctttttcttattcctaagtttatgtttctcttttacgacttacgacagtgtgtcacagtttcacacaaattgggaaatgaatttctctgtagaatacgaataacaggaaaaaagtaggacctgatgttaaaatccctaatgtttgcgttaatttcataattacgttgttttcaatgtttggactataaaaaacaaacaaactgatatagttttgtgtaaacaaaatagcacttgtcgatctccttgccaccgtgtcgtcagaatgacctatttataacagttattaaatttattaatgttaacgttggtttcggttcaaaacctagagtctgagttatatttttgggttttggatgagttagaattgaaaaaaaaaaaaaacgaaattatgatgagaaagataccgtacgaaaaattgaggttgaaatacacatttccccccaccttttaaatgctaccaactatataaatcaaatttttatttacacaaactacaccgtttgtacattcaaatcccatatagagagacattcaacgaggtatattaccaaaataatttgtttgtgaataaattaagcatatgagatgctaaaaaatgtttttttacatttttgatgaaaaaaacttcaaaagaatgttaaaagaatgtttcatctgttttaaattgttaagtaatgtttgcaaaaaagaaaagcatacagtaaaataaatattttgaaaataaaggagtagtatgtatccaatcaatgatgtttttaatttgtaatcactaatcagtagtctttacttcattggtattattatttgataataaaacttaactaaaattataatgaaaattataatcactactaagcacatcaaacctttttttggtagttatagtttatagcttgacattatagaatattacatttccctttttccaatttggcggcaaatggaaacatcctatctttgttattccttttcagaaaagttgaccctaagtggctctcataattcgatcgtaaatactaaatagtaagtataaaatatccaagtcatcatctcttcctgatcatccataacttgatacacaaaatcaaaagtcaaaggcctttgacgtttgtaattagaatctaaacattctttcaaaaagtgatcgcctcaaagatttttttttctttttttcttcaaataaaaaattaaaaagtgtaatgaatgggaatgactaatgactatgacaatcaatttatatcccttaattattttgattcactaaagactcataaaattaatttttcctcttgcgagaaagaaaaaaaaaaagtgacaggaatcgtaaagtgaggaacaattgttggccgttctttaaaaaaaaaaaagagcaacaattgatggattaggtctattgatggacattaacaagactaaatgaaagtgatagaattgttgtgacaacgatttcggactatatggaactatggaagtcaaagagtttcactattactttgtctttaatagtatattcatatttttggcattaatatagccaataaccattacctcaagtataatgatgtagtatattaacattaagaaatgaaaaaaaaaaactttaagaaacaaataaagaaataattaacacttaattgaaaaagttaaagctatcaaagccaactctttgaaaacggtctgagtgtcattgcccatttagaacttcttcttttcataactttatgtttttattgcattcattctcacgtgattgtattatcacacttagtaaaacactggggaaatatagagaattgcgttcagattactgacttttcaaaacttatcacatttattttgattagtggatatatttattattagaaaaacttagacctaaacttaagactaatttagatgttgtaaaacgtttggaattttaactttaactatttatatattgtggctaacaaaacaaatcacaaatccacttatccacaacaaccggaacaacgccacgccaccacttgtttagtgtagtgtttgttgataagatcaaaaggatcataatttaaatccaagtaaaattaacaattactacaaaccacattaaatgtttctaattatttccttcatcttttctcgtgtatgaacaaaactatttggtcttcttttcggaccagaaagtgtgtgctacgtacgtaataacgtaatcctatagatcaatagtaatgttatttcacgtcccaataaaactttaggttttcttccacttacaaaatcgagttttggccctcctacatgtcacaccttgaaaacactacttttctaaatcggggtgataaaaaacaggtcatggaattcttttatagaatttgtcaatttcaaaaccaaaagaggaattgtatcatttcaaaagatgcattttaattttgtcaaagaaacgcatttcttatagaataggtatgacatgattgcgcttgacactataatatttcatttttcctattaaaagtgtccttttataattatttcacacatagtaaaaagaaaaacagttaacattcatgctatattcattatattataatgaagatcatttaataataaactatcatgttctttataattaataaattaaattaatagggatttaactggactatgttaaataaatttatgtatccaaaatataaaacgatatttatgtaactaaataaattcattaaccttggtgtcgtataaacaaagcgaataacctttaaatgaattaattgtatttttagtatatatatctctatgtatatatatatatatatatatatatatattgtttttttttaaacatgtaatggagaactaattgtgtcaaaaactctcacgcatagactactatgtttaaactcatgtacaaacataacgcaactttcagagtatacatgctctggttgtatacaaagaaaaaaaaaaactgtttttgtacaaatatcatctaattatataacttaaacacgatattttttctcaaatattatctaatcatattgttctagttagttctgcaaattattaactaaaacattttctgcaaatcatcatttacttctgtaatggtagacaagacttgtcatagaaatgtttcattttctatattcagaagtaaatggaaatcttcagatgttttttctttttccttttttctttaagagagcatttatattttatttttttgctaatcagagagcatttatatagaaagattaacttagcgacgaggtcgatcattataattgcttttgaagaatttgtgtgcaaagttccgagcgatttttagccattcaaaggggagtgaatatcggctttctagcccaacatggatttgaatcatcctccattttcagcaaatatcaaatatgcatttaaattagtcagattactttttgtatggagtttggtaaaagcattatatagttctagtggtaacgtttgcactgtttgatccacctgtttcttcattataatacaatatgttctatgctcagactgatttgtacaattaataaatctctgttgggtgaccatccaaaattgtttctagatttaacgttccgatccaacgaaagatatgtcacaatcgaaacatgtaagacgtcaatatttaagttgaatatgctcctaagaaatttaacgtacctatttttggagatcgactaagcttgtccaatatcaactgagagtctagactgaccgagattaaaaatacaaaactgagattggaattcaattattaaagtcatatatatttataaaaagtcgtatacatttataaaaattctagtttgaaaaacttatttttattttcagtatataatctccatttaaaaaagaaatttagaaactgaagttacttatatctctatgtaagtggatatatcttttaactttattattatgataatcaataataccacctgaacaacattttaatgttctaaatttcatcaatttaccatgaaaatatgaacatttatatacgtcatgatccaagatcattaagcttatgatgcaatcgcacaatgtctcaaactatcgtctaaccttgactcatataccacttgttacttcttttttttttgctaagaatataaatattttataaaaatgaaaataatattattttttgttaaaataaaatgaaaatgaaaaatgagaaaatgaaaataatttaggtttacaatagatgattattaacctataaaccacttgttacttatcaatcacaatgttaatggacctccaattctctgaaaatcttattgacccataggattcacttttctatcacaatcgatcactcataaaaatattcatacacaacttcttgttgattttacgtacccgtagtaagacttaattttaaaacaaaatacgatagtatgtagaaaagctttaagtacttagtagactttttataccatttgtgatgcgcatgtcagggcctagcacatgtcagaaaatttgggtgcctacttggacatatattttaacaatttaaaaaaaatactatttaataatttgagtttcactgattacttattttgacatataggcatgaatattaatttgaattaaaaatatgaattttaatatttttattaatgattaaaatgaaactaatttatatataatatttctatagttttatatattgagtcggatatttggatggattaggaagactaacaaatcgttccgattatattccatccctctttttacttctgcatagttacatcatacagtcttgattcttgttttgccattagatgtaagtagtaacatagttgtcatttttgaaaaaaaaaaagtattttaataacattcactatgagggtttgaaattgtattgtttttttcataacgatggtacctacagataacacatgttttgacataaaaaaaataaagaaaactaaaattagaattttttaccaaaaagtaaatataaaataataatatagtattgtcaaaatcaatcatcaataaatccctaaatatatgtttatggattttttatttgaagtcatgaaacaaaatataatcttcgattacggtggataactccgtcacatatttcatatagtaaaacatgagtaaaaagaatcgttcgaatcaagatgattagctgataatgttgtaataaatttgtaaatagcaaataagcatttggacgaacttgtgtagaatctctaatttttattgtgcaaatacttgttttattcatcaaatatagttaagtataaaatgatgaaaagattcaaagattccaaagtttaagagataacaaaaaaggtatttccgaaaaccacaaaatgatagctaaaatagatcgatgtagattctatgaaagctttaaggcaaaagctagatagtattttgacacatttaagattatggttaataaaaaaatctttcgcgaacaaatcgatgaataacataatagtcactgtccaaaaattagatgacgttgaaaaagaaaatcaaaaccatgattctcttcaacgcaagaacttgtataaaatctactaacctaaagttgggtaagagacatgtaattgtttgagtttgaaaatcggtgtcagacccaaaatgtttacgaattttccatactaatgtttatgctcacatgtaaaactacttttcaatagatcatctatagtaacatacatatggattaatactaaagtttctatagatcgacattcaagccgttttttcaacctacataattttgaacgtgactatatacaacaattaattaaaaaaattggttgataggaaagtaaaaatatatcaaaatatggacccaaggggaatgtaaaattgatccactatagattaaagaaacttttatgaccactttaatatgcggccgccaatgccattgctttcttttcattgtacttgtgactcaaattttcaaactcacaccacctatgttcatcttatttttatattatacgtatttaatgaatacaaaatttctttatagttatttcagatgcattgcacttggaacttagacaccgtttttccagtttcaagccgactaaccaaactgtgattgccgcgtgtacaatagatccaacactgcatttgtaattaaaaaggagctcgcttatgagatttgacaaatctagcagaaaattattagacttggggtccatatttcttcttaaatctaaaaccaattgttaaaataatacatatgaatgggtaaatcacctttctctgaaatcggtctttagactcatatatagatccaccttctcatcgacatataatatttgagctgaatcatttatctaccgaatataaatacaaattttggtttttgctttcggaaaattatactgaaagtgtaaaagagaaatgcagatcaaataaactagaaatttatgcaatagaatttagaatatcacttcatgttacgtcgtacattaaaagagtagaaaaataatatataggtcaaatacaactccagttagtatgaaatatcttgaaaacaatgtctaaaatcaaatatatacggaattggtcacttgacttaaaacggataattagtatcagcacctatattaaaaaagtggacttaagaaagtagtttagatttgatcaaaaaaaaaaaaaagtagtttagaatgcacgtttgctgtagaaggaacctttaatttgaccttaattggtgttggtgtatgggtatgatcaaggtttcattggaggaaaggctatcggttcgtggtccttagtttgagcaggatattgaggagaagtggccaaacccgcacatatttgtttatgtacttcttcccaatatatcgttctaattagagttagactcgacttatatattaggcagttagtttttattttaaatttttcgatgtaagacttgggttgatattccaaaaatggtgctctacaacctttagattatgtatatgtcaacattggtatataatgtcctccaagatattacaacatcacaaccaatttaggaagagctatacgatatgattcaaacatcatatttttaattttccaatggatttccatctttaattaagaaaattttgtgcgaaattaacgcatcttattttagatggtgtataataagaattttgaaatgcatataaaacttgcacatgtttctcctttttgatgtgcattcttcaatgactaacataatctcctaaatacaacaacatcatagcatttgagtctctgaaaaaatgaaaaattatagaaataattgaaacaattagtaattaatgccaaaacagtttcaaagtcagaaatcagaacaagaataattatacacgtcttagattggtatatataaaaataggaagctctttacgttgcatttgacttttgtttttaaggataatggaatcatactgtaatgttaacaactaagcaaaaatgtttaagaaaatggaacaataatgtaatgtttagaagaaaaaaacaacatgataaattgatatgatgtcttgtgggttttaattaaattcataccgacaacctttttgacttgcttctctgtctttgtttctacccacacagagatcaaaacaccacattgctgttaatctttaaacaaaagaacattaaaaaaaacacttaatgaatattccttaaatctaatcatttctattcaaataagtgcaacacactccaaacacctaacctgccgattccttcatacgatataccttttgtattagattagattaattaatagttggaatagttccatgcgacagtaaatcactttgataccatcggctttttagataatagtaggctttattgaattaccgacaagtggaaaaattttgtatatgcgttttaaattttagatccttaatcttgtcttatgctttagtattatttatttatttttctttaatatttcaaaattattgacctctgcagcagaaggcaaagacgaggtttcaagtaaccattcccatgatttgatattgtgcatttttacccaagtcaacagccattattcgtcctcacattagccaaatctgatcaatccaaagaatctggaccgcttcgttgttttctactatctaagacaatgtttctctctcgcatttcttgctaaaaagctcattttctgatttgtgacaaaatgagattttttttaattaaaatattatgactaatctctttatttcttataaaatattatatcttaaacattacaatttttctaacctcttatatcacaatttatttaagcagttccgtaaatttttcagtcatcatttttcgtggatttgtttttttttttttacgttccaatcaccaaccactaccgtcaagcacccaagaaagttgcattagttttacactgacaaatcgtcggtaagcacgtcacaattttttaagtcttaactaagctttttgccatatacatttccacaaaaactgctttttattgtcattttccaaaagcatatatttgtccatacatatatatctatatcaaatgcatgcgcaaatgtatcatctaattagtatactgagcttgaaagaggataaattttgtaaagagagtcgtgtagaatgtggaacatgaggaaaaaccaaagtggcaacccataaaatgttagaatattgctaagaaaacggaatcgacgaccagatttcagtgtatgaacaaaagaggaagaaaaggaaagtgaaagacaaaactaagattaaaatgaaggaaggaaaagaaatagtacgaaaatggatgtacttaaccccaaaaaaataagattatgtagctaaattttagtttaaccaattattacaatattcgtaaattttaatgtagcactaatcaaattttttttgtgacctcataatttttaacttttgcatctgattactatattaacacatgaacataattttattgacactagaagttttacatgttttcgtgggcgtcgttaccgatcatgttttcatgtagtcaaatggattcagaaaaacatgaggtataaaatagtaactccaaaattccgaggaaaataattttcaagtggccaaaacaaatattttctagtatttaaattacggaaaatgaaaaattaatgacatgagtttagagtaaacccagcacatctaaaatgacaaagaaagcgggtcaatcatctgaaaactgcaatttagaagcactattaactagtatgattgggagctttactgttatttttagctagagaatttaaaattaataattttgttccggaagatttaagatgtttatcgtacaagaaagtgtttaataatgtgtatcatgtattagacctaaataaagtatgaagagacagtgaaagaaaaacagagtatgatagcacaacacaaaagcaatacaaatataattaacaccatccttatcaacaaatacactgcgtcccttaaatattccactaaattacaaccaaatactttaaacatgcacgatagtgagctgtatcttggaaattcataaaaatgacataaacttttgactcatatatatacgttgaaaaagtatttgaaagtagactgaccaacaagtaaccatcaagaagcataaaatctaaaatatctattgtatttaaccatcccttatgcccatcattttcacaaacccacacatatacatacttatatactttataacattccaaatttcaaccgatctatcataattaggcatcaaattaaaaaatggaatatttgtggtgggagagagatccacatcttttgtagaaagtgcgtgtggggctaaacttagaaaaaaaagcaggaatagtgagagaggagacacacggcgttttcgtttctgcctagaatctacacttagtgttatacgtaaggccaaagagtcaacgactttggctccctctcttcacctcttctctattataaattgaagggccaataacccaactctatttgtcctcaaagatagtaaagaagccaaataataaccaatctttcttctatcttctctccctcaatatctttctctcactctctgatctccctggcacaactaaagtagagatatagagagagaggaactttggattgtttgtgtctttgtgacagatggcagagataaacaaacaaagcaacaaatgggaacaagaagaggttagtaatgaaaataattgggaattggctgaagaagaaagtgttgactggagagggagaccttccaaccctaacaagcatggtggaatgagagctgctctctttgttcttggtaatattaaaaaaactttcttagtgttaaacatttgtttgtagccttagatggatcatcttgtttttgtatcttggtccataagaactccactttttatccaaactttggtcccactatctaagattatatattccatggaccttggcaagggttagatttctcgatttaattatgtcttattgatttgtggtctttcattctatttttttaggactacaagcctttgagataatggggatagcagcagtagggaacaaccttataacttatgtaataaacgaaatgcatttccctttgtctaaagcggccaatattgttaccaactttgtcggtaccatctttatctttgcccttctcggcggctatctctcggacgcctttctaggcagcttctggaccattatcatattcggcttcgtcgagctttctgtatgttcatcatctctttccagtacttttttgacatatatgtacatacaattctccaagttacttggcttgcaatttaaaattaaaatctaaaccactttcgatatgggatttctaaccaaatctgtttttttacacgtaagtaatttacgtgagtatctccaggcaaacatgccttttgtgtgtgatcccattacgatttaattaactatttacaaaaataccagcctataaacatcaccaattactgttttagatcaaagtttctcattccgaaaactttctaataattttttttccttttcttttaacgatgtattgccacgtgtattctcagggtttcatactactatcagtacaagcacatttaccccaactaaagccaccaaaatgtaacccattgatagaccaaacatgtgaagaagccaaaggtttcaaggcaatgatcttcttcatggcactctacttggtggctttaggaagtggctgcgtgaaaccaaacatgatagctcacggtgcggaccagttctctcagtcgcatcctaaacaatctaaaagactgtcatcttacttcaatgctgcctattttgcattctcaatgggcgagcttatcgctctaactctccttgtttgggttcaaactcattcgggcatggacattggatttggagtctctgctgcagcgatgactatgggcatcattagcttagtctccggtactatgtattttcgtaacaaacgtccacgtcgaagcatcttcactcccattgcccatgtaagtttatcttgtcttttaacaattcttaccacacaaaaaaaaaaaaaagacatagtgatgatatattaaattgcagcttttcatcagggatattccattaaatttaaactttaagaaatatatgttgattcaacatagaatttagtacctcaaataaaaggccacataaatttttaaaaacgttttcaaacttttcttctacagagaaatatattagctttgaaaaccaaataatgagatttatgatagttccatcggtagtaagatgaacctagaattctttttataaagtttgttttacacgtatagacatattgaatcattgataatggcttttatttattcataatccgtcgctattttactacactacatactttaatatgattattaatatttactttacaaaatcattccgatcccttgggtttttacctacaaaaatagttgacttctaagataagtctgtttcgaattttgtctgcatgcgtatgtatacgtaagtccatctaagttggacccgtgagcatattttatatggatatatttaagactaaccacacatataaacaatagagttgacttctgtctctaccggatactagttaaatagccaaaattttaaataagttgattatgattttatactattgcaaaggaatcataacactttatatgtagtcgtaataaaagaaagaacactttacatattttgcgctaatgttgacccccatatcattgacaaatcccgattatgttttgttcaaaacttacggtttaggataacgttataagtaatttacggtttaggatgacattaaaacatttttatatttatttagttaagcacatatttacatctatcctattttttaaacttaaactttcagaaatttacttatacatgtatgcagacaaatcagtgcgtataatcactcatcttatacaatcataaatctataatactcatataattttctgactttttacagatttagaaaatttgacttactttttctaagaaatgaaatttcaagtgttccaaatcgatatatgccaaggaaatttcgacccacttggctttatttttagagaaaaattattaacatgccatatatatgtatgcaaagtgaggattgtggtcacgtgtgtggacaagacaatgctaaaacagtttggtccatgctgactcatatgaaaagagagaagctgatggtcaagcaaaacattataattgtgcgttttcaaaaaaaaaaaatatagtcattaatgtatcataaatatatacatatattcacaaaaataatatatctatacacaataacaatatgtagtgatctcttgtatttcaggttattgtggctgccatattaaaaagaaagcttgcgtctccctctgacccaagaatgctccatggagaccaccatgtcgcaaacgacgtcgtaccctcctccactttaccacacactcctcgtttcaggtcatagtcatacattgaactcattatctcactttttctatcattcatgtttcactttttggtcattttttgatttgatcatttatagatagttatatatattttcttattagaccgaacaaaaacttcaatcgaaagattccaaacattggtattttgtttacatttccgtccacgtgtaatgtctccttttttttttttttttaatttaacaaaaactttaaaggttgtaatcaaaatatcatttctaaatcgtaaaggcgtaagttaaaggaaatattaagactttttaaaaatgttacaatgtagtttttatataaaaaaatgtctcatgtaatcagatatacgcatgaaatccgacaagaataataaaatctaaggattgtatttgaaaatttgggcaggttcttggacaaggcatgcatcaaaatccaagacacaaacacaaaggagagtccatggaggctatgcacagtaacacaagtagagcaagtaaaaaccctaatctcacttgtccctatctttgcaagcaccatagtcttcaacaccatcttggcacagctccaaacgttttcagtccaacaaggaagttccatgaacactcgtctctcaaattccttccacatccctccggcttcactccaggccatcccttacataatgctcatattccttgtccctctctacgactctttcttagtcccttttgcacgtaagctcacaggacataactcaggtattcctccattgactcggataggaattggactcttcctctccactttctccatggtttcagctgccatgctcgagaagaaacgtagagactcttcggttcttgacggtagaatcttgagtatcttctggatcacgccacagttcttgatctttggtatctccgagatgtttacagctgttggattaatcgagtttttttacaagcaatctgcaaagggcatggaatcattcttgatggcattgacttattgttcctactcctttgggttttacttcagctcggtgctcgtttcggtcgtaaacaagatcacttccacgtcagtcgactctaaagggtggctcggggagaacgacctaaataaggacaggctcgatctattttactggcttttagcggttcttagtctcttgaactttcttagctatctcttttggtctcgttggaacattaagtcttcgagacgcaacaacactaatgttgtgggtgatgagaacatttagcttgatgcataaaaaaatgtacaatacatataatatcacctattaacatgcatctccagcatataattaatataaataaactggtgtatttgtccttcgatttcatagtctcacttttaattttttgtcaacaacattaatttcgatagatgctttattacatgctacaaatatgaatagaaaactaaaacaaaaaaattggaaaaaagaaaaagaaaattaatctttgtttccattttattgctaagaggttctgagtctatacttgtatatcctctcaagccgaagaaaatatattttatatgggtttctcgtacgtgctacttgaaccagcgggttgtaggttttgtttgagatattttgccacttgagctatatattgacacttggtaaaaaaaaaacattaaaatgatatattcaaatatctagtatagttttttccctattatattcatggaattacaatgaaaatataaaataaatgttatcttaatatattttgtgaacaaaaaataccaaaaaaatgttataccatttttaagttgatatgtggaatcttatatctagttttttttaatcaaggtattcattaaggatattttaggttaggtttctttttgttatttattctttgtcattattttcttgggttgtagagctagatgaggctaaagagagagtaataagtaaacattaagaaactgttttttcttatacatagtaaaatccgacgcgacaaaatgttgacgtagctcttatatttatgataaaccagtataaatgacgtgtgccttttacctttttacttttaaatccttttttaaagatcaaatttaggatataaaccgtaacgttatatttgagtgacatgtttgtgttgtagttcagaaagcaatggaatgcaaagatggttcgacgtacaaaattaaaatgtttgacgatatagaaaagacaggattcgtagattaaatcgtgattcgtgaaagtgagctgaaattcatacgaacaataaaaaaaatagatgaaacgaaaggagacagagaagtaatgatgcagaaccgaaaacaaattgcgaagaaccaataaagatgatcatcggagaaatcagagagtattaatgatgaagattatcgagagaatttctgaaaactcaaggtcatagagaaagaaaaatattgaacaattcatcgttgtgttactattacaagaactttttttatggtttttttttctcacatctaagcttgtttacatgcaagtgtaaaattggagtatcaacaattacaaacagaagtattcaaataatgataattaactctgatactaatcagctaatgaaactaattagtatgagactaaccagataagataactcgaatgttctttatcgaaatttaccggaatcattgtcacagtacacaaacaggaaacacaacaccaacattttctttcccacaaaagttatctatgtaaattagaaaagaggaacacgatgaaaagtgatggatttgttatttcctcaatgatgttctcaatttggacacaatctaatggtaagaaacatgtctggaacatgttgggtgttaaagattggctcgtccttcctttatccactagtattaatagtttctttatattcaactttactttactcattgatggttaaaatattgcatcaatttgtcccccattttaatggcattattacattctcccacttagcacagttacttcaactatagagttattacaagaagtgggtttcataatttgtgatgcttttgtattattttcctgccgctcttgagtttctgaaatgcgatttttactctttgtactatctctagatatatttactattcaagcgtattcaatagtggatacctcatctttaaattttgtcagtaaaatataatgacgttgaatcttccttttttttttctttttctttttgttgttgctatgaatgttaatatcatagatttttttggcttttacaaagtaagaacctcattaggaggatagcaacgcagtcaactgtttaccacatttggaaacaaagagaaagtgtagttcacaaccatgtctcgatcccaaccgctactctcttcaacctcatcaacaaagatatccaaaacattatcacagcaagcagtgccgtgccaaggtccattgtggcttaagacaaatttttaaaatgtggccaaacatattatatttttgagagaaattttttttaatgtaaaaggataagaaaatgttgcttgatttaaaaaataataataataaataaacaagatttagtagttagtgaaaatgaaacacaaacaaaattttatataaatgttaatgatttgagttttatttccaaaaaaaaaacctaaaacactatataaaaataaatgttttacttaatttaggaaaaatgtggcctttttatttgtttaatttttggtggcctaaggcaaatgccttattttttgtacatgaggcacggctctgacagcaagacgtaagcgcaagcgttatcgcaaccttatgcttctcaagtgatcttgagctcacacaatgtgactttcaaatcttttgttttaagaaaaaataaaaataataatcttttatctttttgttttaattgttttttgccaagaattcaaatccatcggtgaatctactggaatccaagatgatttacttttacttgatggattgtttttggtactttcgaataaaacgtacaacgaaatgcaagaagctatcttttaatgatttctaatcgacttgatatagccatatatatacacacaaactgaggttcaaagtcgttcgttgaatttaaatccgtatatttcatgttttaaacaaaataaataaataaaaatcatcgatgttagaaatcaagacgagctacctttttttattttcttattacaagacgagctaccttgtaatatcagattggtgtcgtttgaaatatattttgcaaactaaaatatatattaaaaataaaaatcaaaaactttaatatacttactcttgttggttatccaagatgaatacgttataattagggcttgctgttaatttagcaacatgcatgcaatagtctatagattttctatatggtttgattttacaaagtaatgataatgtattgtattatgatgctttcaatctattactaatatttttctcgtaacttgcatgctttcataatcctgtgatcaattgatgatcatatgattcctgattgttatgtgtttacgtctattgagttaatattgactttaaaagtaattttccactatattttttgtgtactccttggtataccttctctgtaattttagtcactttcaattttataacgaacgttactccaaatcgtaatgtatcttgcttttgaatttatgagtggaaaatatatatggtaggctgttaaagagttttttaataggtctgtattgggcctcaagattgggcttactaatgaatgtgtgtatattgttttggaaagcttgaaaataatgtgaacgatggcttggcaaatattcattattccaattagagcccaacgttataaaaataaaaaaccggaccggggccgaaccagattaatgtttgaactacagggtaacttctgtaaaaaagtactaaaaactagaaatgttctcatgtttcctttacttcatgacttgtgttcatgatatcattaccgcaataaaaagtctatgccaactcattgccatcttcttcttctttttttttactgatcattgctatctttttaaatacaaagtaacaatgagtaattgcaaaattcattttaggaacggatttgttcacctcggaaacagatcggttcaccttaaaatcgacttggttcaactcatgagtcatgattagacttaagagcaacacataacccttaaatatgtatccaataacgcctaaaaccgaagttctaatatctcaataaaataataaagaccaaaacaggttatttagtttcgtcgtaccgttgaaactaattgtaacatttatgttttttttctttatgtaacttgttagtttaaagaaagttttctatttttgaattaaatttcagaactaagaaaattaggttttggttgcaaaaaaagaaataatcagaataaaaagattggttagagacaaaggagacatgtccatgcttaccgagaagaaaacacgtaaagctagtggtggtactgtcaaagacaaaaaagctcaattattaagcatacattaattattactgatagcctgaatctctaattttgttactagttaatcaaaaatcattttattaatccaagtggtatgcttcttttgcagcgcgtgaatctcaattgagtccccaccacaggagacaagcagtgaagctgtaaggaactctggtgggtttgcattattttccatttaacaacacatgcaatttttttttaataataaatataaatttgataattgcattaagtatcaacaaagttaatagtattattgtagtgtaatttttgagttgaaattattggttttattttataaatataacttttgtcaaagtttcaagttttttttcaaagttaatgaataacaaataaaaatctattcgttgaattttactgtcgccaccaccagtttgagtagattccgcaatttgagagattacattaaaaatgataaaattagttgtgatgtggtgtttcacttcgagagaatatgagtacaatgagattatgagagattgatttttttttttttttcatttctcaaactttctctaatgcattttgctcatattcgaagatcgcttgtggtgacctttgtgttttataaccaaaaaatcgttgctaaaatcaatactaatatcgcatgaaaaaataaacattttacacacaatgtaagtcattttcaactagtataaatatgcattgttattttaataaaagtagttttgttaatcagttattacgatttttatcatggtacataaattttaaaaagaatcaatttgttaagaatggtataccaacgaataacaataattcaatcatatgttaggaatcatttatatgtttacctatatattattttgaagattttcactcaatgcaaagatgaacctcaaaattacttttatcaatgacacatttttaaagagaaaatatataaagatatgaaagtagtcactagggactatgtaatcaattgtgctatttactgtttaaacacactaaaatatatagttttaatgtaattaagtaatcctacaactttcatgtgaaaattcctagtcaaatatttcacgtagtgagttatttaaagtaaaacagaataataggtatgcttatacgggtcgagttgctttattatgaatatgattatatgaatcaaaggatatgaatttatatttatcaagttaccacgttacgaccaaatttgggttatgggtttcaaatcttgaacggttcatggtattccgccgcttttgtcctatcaagtatggacacatttttcaaaagtacgctggtgccgaagtagtttgttgtggccttggttaactgtaccattaatgcgtgtttataaactacatgctaactctaataacttctcatacattcacatcaaaggacgatgagcctcatatacatacatagtgatcagagccatcctctaagcaaaaagactatcctttttaaaaaagagaatcatattaagggcaaaaattaactttcaaaaataattggccaagaagcgatgactaatgtttttgccaaaaataaaacaaaatctcaaatctcaaagcctgtttcatatctcttttaagaagagagaaagaaacttaggattccagaactaaacgtcgaaagttcttagatatcttatttcaaagggttctcctctgtcagaaattctagaataacagattatttcatcttaggtggactgtcatttcttctaactaggctagtagcaaatcattatgcccaatttaaagctaactcgctctccatctccattcgattagattagtagttaactttaaaccaccaaaaaattttatacatttatttgttagagaatatttggaagaattgggtggtctcgctttgtgccgctttcttagctcaaggatttttggattctatctacatgaacttcgttatcaattttgatgcttgatatttttgcctagagtgtttcagtttttttgtttttcttttctttttctagcagaattgtcacatgttatattcatattttgagtattttctaagaaacaattaggatgctacatagacatatttttgaaaagaattaagaaaaagtaataggttttggaattttgcaaaacaagcgagaagatgctacacttgattgttttcaacaaaaataccctcagaaataatggatgagattcacatgatagcactaaatcgctacaaaatctcttcactagtgtctcctccatagtcaaatccgagctccagataaaaacattacagattcatatgacaatattaattttgtcactcatatgaatttggttaaatatataatctaatttgaaaatacaaaaatcatgattcatgatgcacctttcaattcacataatgttgaaatacagaaaaaataattactctctcatttctttataatataagttttagaaagaaaccaaaaattgtctcataaagataaatgtagatttttttttaattttatctcctattaactagggttgaattaataaaacaactaatgaatatttattaaacacgaatatatttgtagtagtaaaaaaattcttaatatgtatgcaaagtctaaaaacatacaagttcactaatctctactaaattaacagctaaacccaataaatccgttaattatggctagtttagtgaatttttctcaaagaaaagctcttttttcaaagttaaggagactagagagcaagtcatttgcttgtggttggaaacaaaaacccaaagcgacgacacaattaaaaaaaaatataaagaggagaggagaaaaagaggcaagccatagccaaagggttcgtgtcggcttcaaccaaacactgacggtgtgtgtatacacctttacatacacacctttatctctctctctctcacatctttgttacaaatcaatcttctactgttttctttttcctcttcttacattattttttgacagcaattcttagtttctcttctatcccctttctgggttttgtttgaaccctagctcgctttggatccagtggttttaagttaaaggttcgatttttatttctgggttttgcttgttttgcttggttctgcttagtaaatgttggaaaaggaggagactttagaggatctgtagtcagatttgagctgggtttgtcgattttactaggattttgattttggggataatctagatcaggaatcgttactttgtttcatatccaaaattcaactctttttctcgttcctgatctaaaaatcgttccttttcaagctttctaaatgaggtttctctttggtggttctgaaattttgtctgtagctgttgtgttcttctcttagatttgattctgtatgataattttaggttctgagtttgaagtcttgtcattgtagagatggttttagtaacagttttggtgttgctttgtgtgaagttattaaggactaaaatctgttcatttttggtatgttattgagcaggttcttgtcttgcttttgctttatttgttctttctttttacctctttgtttgagtgattattggattttctcttcaaattgggtaataaaattttgagaatctgagtcttgtgatgtgctttagacacaatgtagaacaaagcagttacataaatggcccacatttttgtcagtaaatttatgaatggggttttaaatgtttctacataataacatctatcagagttttgtttgtctaaattagaggaggataggtccatcttcttcttttctctttcagaataacatttcaatcttatagttttctcttcttttgttttgttgcccaggtaaatttatcgaaagtaagtagattcctaatggcagcttccaatcattcatctggtaaacctggaggttcgtggaatatttcttgtttttataccattctttgctattttctactgggaatccactttctaagcttgtttggggattctgcataacttgaaatggatgattaagaactggataagggttttaaagccttggagattgcaaccattgctttgtttttgagatatattgttgcgtcacataacccatatctgtttctttgtaggagttttaagtgatgctttatgtagggagctctggcatgcctgtgctggacctcttgtaaccctacctcgtgaaggggaacgagtttattatttccctgaaggccacatggagcaggttggttattgggttgaatcatttaacattatcatttgctaaagccggttatgttaattggactgttattactgtgtcaactgtcgcttcaaaataccttgttggtgctttctagtttaaaagtaaaatcacaaaacatgtattgttgtatagaacggataaatgcactacctgttttgatttcacatgattattgtttctttcatcttatctgattatcacatttatgcatttaattggtcacttcctgtgcagctcgaggcatcaatgcaccaaggtttggagcaacagatgccttccttcaacctcccatctaagatcctctgtaaagttatcaacatccagcgcagggtaggctaaattccatgatatatgataaaagtttcttaccttttcttcatgaaatgggttggctaaagaatattataccttgttgtgcttcactttgcaagctcaggcagagcccgagactgacgaagtatatgcgcaaataaccttattgccagaactggatgtaagtaaattttgatggtttggtgtttcacaaaaaacggttcggtaattttttttcctgtacttgattttggtgaaactattgtgtttggttatcagcaaagcgaacccactagcccagatgcccctgttcaagaacctgaaaagtgcaccgtacattcattttgcaagacactaactgcttcagacacaagcacacatggtggcttctcggtgctacggagacatgcagatgattgtctcccacccttggtcagacttgcttccggtgttctggttgctttttggaaacatctccactgctattttgtgtaacagtttgctttctcttttctaggatatgtcccaacaaccaccgtggcaagaattggttgcaactgatttgcacaatagtgaatggcattttaggcacattttccgaggttaatacacttggtatcttattatgagatggtctttaaactgtggttcctttaccccaatgctactgctactgggaacctttaaagctttacataattttgcattaatattattgtttcacgtttgttttaatcataaggttgtgactacaggccaaccaaggcgtcatttgctaacaactggatggagtgtttttgttagctcgaagaaactagtggctggtgatgctttcatattcttaaggcaagctcctcatttcattcgtctggatattatttttgccacatacggctggacatgtgacatagtattatctttcaggggtgagaatgaagagctccgagtaggtgttaggcggcacatgagacaacagactaatatcccgtcatctgtcatttcaagtcatagcatgcatattggggtccttgcaacagcagctcatgccattacaacaggaacaatcttttctgtcttctacaagccaaggtctcatcaaatggtccaaaacacatcagttgctgcatcagactttcagctccatttagaaactgaaaattttgctatgttagatttatttagccggtctgggacggacacaccagccattttttaataaatatgcatcttattccattgagttactgttgcctgcatatgcttgatgataatcattttgctgcaaatccaggctgacatatcttctattatcaggacaagtaggtcagagtttattgtgagcgtcaataggtatctcgaagctaagacccagaagctgtctgtaggcatgcgtttcaagatgagattcgagggggaagaagctcccgagaaaaggtatcaaaactaactatattgttttctttttgctgataaagctgaatataacttctagtctttttttttgtgtgcgttttaactatgcaggttcagtggcacaatagttggtgttcaggaaaataagtcttcggtctggcatgattctgaatggagatcgctaaaggttagaatattctactgttatactttgcagtggagcaagttgtggatttgtattttcttagttgaatgaatagagtgatgcatcttaatatgcttattggcaatctgatcatgcttcaggttcaatgggacgaaccctcatctgtatttcgtcctgaaagagtttcaccttgggaacttgagcccctagttgcaaatagtactccgtcttcacaacctcagcctccgcaaaggaacaaacgaccaagacctcctggtttaccttcaccagccactggtccatctggtcctggtattctgtgttcttttctctttgaactgttcttctttgtggcggctcttgctctttttattgatgctctcttcagttactccagatggtgtgtggaaatccccggcagacactccttcctcagtgccattattctctcctcctgccaaagctgctacgtttggtcatggtgggaacaaatcatttggagtatctattggatcagccttttggcccaccaatgcagatagtgcagctgaatcctttgcttcagcgtttaacaatgaatctactgaaaagaaacaaactaatggaaatgtctgtaggctttttgggtttgagctagttgaaaatgttaatgtggatgaatgtttctctgctgcctctgtgtctggtgctgtcgctgtagatcaacctgtcccatccaacgagtttgactctggccagcaatctgagccattaaacatcaaccaatctgatattccttcggggagtggtgaccctgagaaatcctctttgaggtctcctcaagaatcacaaagtagacagatacgtagctgcacaaaggtgtgactattagcctcttgtatcgctcgctctttctttgaagatcaattttttttgtcacaactccaatattggtcttaaattggtggaccgtgtctgcggcttgcttttgactaaaacgcaatgtttttggcaatttgatttaggtgcacatgcaaggcagtgcagtaggcagagctattgatttgacaaggtcagagtgttatgaagatctgttcaagaagctggaagagatgtttgatatcaagggtgaactcttagaatctaccaaaaaatggcaagtcgtttacaccgatgatgaagatgacatgatgatggttggtgatgatccatggaagtaagtgcatttgctgtctaatactctaaattttgtttggtgtcaacaaataaagcagtggttaaaattgcaaagcatcatctgctgtaatgtgtccttttgctttaccgttgatgatcattttggtcttctcttttgtgctgcagtgagttctgtggaatggtgaggaagatattcatctacacacctgaggaagtgaagaaactttcaccgaagaacaaactcgcagtcaatgcaaggatgcagctcaaagctgatgcagaggaaaatgggaatacagagggcagatcatcatctatggcgggatcaagatgagtatatcactgtgttatgttttaaatgtacttgccacgtaggaaatatgaaagcagaagcaagagatcgttagacaatatgaaagttgagatgtctgtgtatagcaatgaagttttatgtcttcaagtcttatgaattcacttagatgcaatgtgttttgaggagttgtgtagcttttgtacgggaaatatggaaattaagtttcacgtcttgttctaccttgaacaatggtcatggtcaaaaataaaattatgataaatctcctcttgctttatagttcttagtacacattataagactttaagaataaatgatggtacaaacaaaattcgttgcttttgttataatcttgttgccaggatgaaataagcacgacatcacaagtagagagacgccgcgaatacaatgtctcttttgatcttggaaacagcttcttctagtttagcttcaagctgtgtttctcctatagattttgcagctactatgagctgttgcagaacttcctccattctccttatcgctctgatcaagctcccttcgaaaacacgagcaatctccatgacctcatagaatttggacccttttgcccaagcatacaccgcctccattatatcaggtctgaaagactgcacaaaactctccacgtctatttcgacctgtcaatgtcataaaagacagaaagttatggaccaaagcctcttcaaatggtcaaattcacttttagctgagcagagagaatatgttagtgaataccttgcagtcaagctgaacttcagctacacgcctggctgtgtcttgtaactgtatgaagagcaagtcgagttcttctctgggtttagcagcgtcggggagtctctctcgccatacaaagcaagagaggagcgaaaccaactcctccacctttgcatccttgaagataccactgaacattaactccgttaatgtcaattcttctgcactactgatttcacatgcaaccttacccttcaactccacgacattatcactagtgatgtatctgcgttcaatagcataatgataaaaattaagctaatagaatcagcaatggaacatacagtcccataacattaaaaagagcatgatagaatgatgtagctgacgtataagattgagttggtttcacaagtatattttgaaagtgaatgaaataaatttagcaaatatttaccctagccttcgtaaaacacgctttctggccttgagttcatctttaaacgccaatgctgttgacgatcggacagttttcttaagtgacttgatcttggctattagctcttccttcatctgtagaactttcaacttttctgttatgagtggagattttgcaattttgtgtttttcaaataggttttccagagcctccagccgccgaactgtctttttgtaagagctgctcttaatctaatgaagtaaaagttgtattcatctcttgtgacaaatgaaagagcagaagcagaaaggtactgggggaaaaacaaaataccttcatatcaacttcaggatctaggggtattccatcgggatgtctagagagtaactcagaaaccttcttcagagcattctctcgagcttccaaaggtacaagatcttttggtatattcatgattgcactgcttaaactctttatctgtcaatgataataaagaaaaacaataagatcatcaagagcagaatttggggaggatagctatacatgaatgtgtataagattatataggactatgaagaggagaaaaggaaaagaaaacggagcagtcatgatacctgcgataaaggaacagtgaccacaacaggctcaccacgttccttaattggcacagccttaactttctttttgccaacgccatctttgctaaccatacatctagtcaacacatctacggtgtagtttgcatcctctggtcttctactatcatcatctgaatgaattagtcatgccaagacaataaacggattacattgtgtgaacggattaatagcgctatacgaaaaaataattctcagagttccaaccttcagataaacttttgactttgttaaatttcatgatcactccccatgtatcctggtcttcaatgctgaatgattgtggctcttcatcatcatttgtgcaatcgagacaaacagctctgtttggcagcaaaaagggtaagcagtactttggagtgaacacaatttcacgtatatccttcttcagactcttatattgcaaaatcaggttatagtaattttttaagctttcttcttcttcaatcaccaaagagtctctctcttcttccagagattttatttgcttctgcgaagatcagaccacaatcaaatcatatacataaagtgaacactatatcatcaggaaatctaacattttgcattttgcaacttcacctcgagatcaggtatagcacgatcagcttgaaactgaaagaacgaatttcgcagaagattctcaggatcaccttcttcacaccgcaattgatttagaagcatgttatagctcaaatggaaggcactggtgaataaaggaaacaaaacagtcttggtgagtgaatatgtcaagaactctaaccctcttaaagcagactatcaatcaggttgataataaaataaatatcagaaatacttaacaatgtacctgttcaaagaatcagcacttcctttgagcattgatttagcaacagcgggttccatcttctcgtcaaccatgaggatgcagatacctcgtttgtcaatacctcgacgtccggcacgaccactcatctgtatgtactctccacttgatagccaccggaacttgtctccatcaaacttacgtacattggtaaatacaaccgtctttgccggcatgttcaatccaatactaaatgtctctgttgcaaacaaacactaagagaaaatacttcaaacttcagtggcaatacttcaaactaaaggaaaacatcacaaaattacataacaaaaggtagcaagaattgacaatatgaaaattgtagttctacgccttcacctaccttaataagaccttcctgaaataatatctcaattacttctttcaaaattggaagcagtcctgaatgatgaacgcctataccacgtttcaagatgggtaaaatatttgacacctgcagtacatgaagccatgaatcatgtcaatttcgctgcaggacaaatatatttgccaaatcgcatctgaaactagatcaactaaacaagcaccaagatgaccctttatggaacatcagatgtaaggaatataagctattacatgttacatgttagagaaaagattaatatctagggaaaaatcaatttttgtgcaagaggagagccggctacaaggcaaacaaaataaaatataaaatttgagataatagaggcgagattggtgggaaatctactacttataagccaataatactagccatttcctacagagatgtgcacatgatcatcctagcgcacagatacctcacaacattaaaacatgacaatatgtttcaagaagttgtgaaaagtattcacaaaagatataggttaaggtgcattatacaaacactcaggcatcttagaaagagctttaatgaatgcttgcctgaggtagctttttatcatcatctgaaagcatatcaattgcactagcaaagattgtctccacagcgtctttctcatcatcgctgttcaaaaccatcttagacatctgtggaacaaacagacaggtattagactcacgttttaacagtaagacccacagtacgcagacaatgaacttcaggttgtaaaatacacataaaataaaacacaccacagagtacgcactacaaggtgcaggcaaacacactagaaaaatcataaaaaacaaaatttgaacagtctatacaaacaaaaaatatagagattgaagagaccgttgctgcaatgtaataacagactatcaagattaagaatgacgaaagttttttaattcagtggtgggaacagtactatagaaaagtcttgattcaagtgaggacttcttttgcgatccaactcatacagtataatataggtaccgcatcttcacataagactccaggagcttatcacagtcactccaacccaatatcaattttaaaaggataagactgatcccaagcataagaagaagacaaactaaaaaaacacctaactttctggaccaattttcttatttcagcagaaacaaattcagattcatgtttggctaatagttacaaaaaaataacatccccaaaatgagatgacattctcatatgacagggtaaagatccagggattttgaaagaagtcaaataaaaaatttgtcggtaaatgatttatttacttgcattagacaaacagaagaagaggaaactaacctgcatagcaagtgcctcgcattcctttttgctgaaactgaacaaaatcacgggatcatattgccgctgaattatcattttcaccaatttgaaaatatcactttcttcaccaagttttccaatcactaatcccttttgaaactttccattatctcttttcttgtcactctcattagtcggaaccagtgcgttgagagatttctggaagctatcctcatgaaatttagatttttcgtccacaaccaagtaaagtccattacctccagcaggaaagacatagtgctgaagtggagttggccgataatcggtgtaaacaatgtgacatggttgttggtgaacctgcaataccaattctataatcaaatctccagagcaacaacgccaaaaaaaaaaaaaaaaaaaaaaaatcatttgttataaacaggctgttttactaagtctactcaaagaaacacgacatatgaaaactatattgcattttgccaagacatgtttctacttcctccaaaataaataattgatgtgaaatcataattacaagttgatacaaaaatgtatcaatccattcacaaaagagaggtagaaggagtagcaagagtgaaatacctttgcaacccaatcagcaaactccttggcattgggaactgttgccgatagaaacacaaaacgagaattcttcggagccattacaatactctcttcccaaaccacacctctttcgctatcacgcatgtaatgcacctcatcaaaaataatccacgcaacctcccgcataatctctgaccctttatactgcatactacgcaaaatctccgtagtcatgacctgaaacaaagaacacaaaactaagaacaaatagcaaataaaagaaacttctgagacaacattgaacagtttaaaaggtacttacaagacaagaggcattaggatcgatagtcacatccccagtcatcaaaccaacatcagaaaactcttctttaaaatctctgtacttctgattactaagtgcctttataggagaagtgtaaataactctctggttttccttcaaagacatggcaatagcatacgacgccacaacagttttaccagctgatgtatgagctgaaacctgaacatgaaaccatactcttcagttttctcacaaaactagaaaagttcacagcttgaaccaaaatatgtaatctttacaaattgattcaccaattcaataggacagattagaaattcagtgaccaaaatcaattgaagccagagtaaaagcttaccatgactgactcgccattatcgagacacttgatagcttcagattggaaggagtcaagtgtaaaggggaaatctttagctggtggtttattgtgaacggagggagcaagaggaacgtaattttcagggaaggaaacatcgtgaacgcaaccaactagctcttcgttgatgatttgggtggaatcgtcttctctctgaaccttttgcggcggagcagaatcagaagattcctccactgattttctcttcacggaacccatgagagaatggtgtgtgtagttttagttttccgccgacgagaaacgattcctccggtgagtttcacgaaacgaagacgatgaatactttgtcactctgcgttttagggtttcctttaagcccaattttgtttactcacttaaggcccaaattgtttttattttctccacgatagctgttggttcatttttttcccattggctcaatttatgaacttaatcattctgaatataagaatgttaaacttttaaaaagaagaaaggaagataactctcattgttattttcttgtatgtagtaatttacatacctaaatcttttaatttaattttagactaatgcaaattttatatacccgttttggatttcatgtcggtagtttcaaaacgtttttgtgcaaaaaaatacttctcaaactcaccaaattttacaattttattttctacctcttttaaatacaaattaatcatattaaatccaaaaaaataagaatgtaaccattttttttgttaccgtcaaatttataaaattttgtcaattaatatgtcaaatcgaagtcttctctaggaggacttcaattctacctttaaaattttgaaacttttatgtatgtggctgtgaaaacatttacaatatacgtataaagctatattgcatattattttatttgttttacttcgtatgattaatctgcaatttttggaaatatatggtaaagtagcaaaaattagcaagttggaggattttttttgacacaaaacctttccaaatataaatttatttttactaaaaaaattccaaaaacatatacttttaaataaacaagaaagagaatgtgttcccctttctcttgataatcatgtgagtatgtgcttagactaaaatttacctggtactctcttcttttagaaatatctcaatcttcatctttactagagaaataatacgtaaggagtatgttggaattttatatattcttctcctcccttattagacaatctgtttgtccattttcctcttcatatattgacttataagtagagatgttgtggtgggtaaaaaagcccagcccgacctgaacccaaaataaacccgcccaccaaaaacccaactttagaaaattcaaatggatttttgattagtgggaaagcccaaaaaaaacccgattgttctgatactacccgtgggtacccaacttgatttttgtcttttttttagtgtttatgtttaattactaatatactattatatatattttatatctatattttgcttataaactaagctggtatgtaaatatatcatgtaaatttttttcatagcaaaataataataatttgtatgtcaaattaaacaagaaaaacttaaaaagtaatcaaatatctgaaaatcaatttaaaacaaaaatacaacatcttctcatattccagagctacttgctaccgatgtagtagcttcaattccatcatcaaagtattcttcaatgtcacctacaattagaagatataaatcaacaaatgaaaaaaaattaagtccaaaaaattagactattctttttttaccttccaactctgcaaaaccacgcaaccagttcctagtacataacaaggcttgaacatttctcgaaagaaggcggtttctgaaagggtttaaaatccgacctccaatactgaatgatgactcagctgccactgtagtgattggaatgctaagtatagcagaagctagagaagctaaatcaccatagcgttgcccatcgcctttccaatagctcagaacctccatgtctgtaaaagacctcaaatctagccttggatcatccaaataattttgcaaattggactttgtgttgtcagaaccaggttgtatgctcctctcaagctcaaacacatcctgtatgatatagagtatagacactagttagacaataaagatgatatgatataaacaaggaatggagaaatacttacataatttggatcatcctctagtggtgattctgtaagaaggtcatgtggagtttgggttgttgagaaggtggaagaagtccaaactttttccctgtgctctttgtaaagatctttcaaattgtccacaacaacattgaccttttcttccgaactactcgaatccaccttattataagcagatttaagaatctgcactttcaaccttggatctagaatagctcccatagctagaatgatactgtactgatcccaatacttatcaaactttacttgcatcctactagccatctcttccactctaaaatcaccacaaactgcatagtctttcaaaagacgctcaattttccacacttgcagaaaatacacgttagcagtaggatacttgacacctgaaaagtaagtagtgatagtactaaacggctaaaatcaaaggagagaaaggacatctaatatcaagtgaaactagagtttgatttttcaaggagatgacgagagacttacggcggtgactccggcggtgaagacggcggtgactccggcggtgtagacggcggtgactccagcggtgactctcatggtgactccgacggagagaagaggagagaagagagagagactgttgtggtggtggcaaaattttggggaagaaaaggaatttagggtttctcaatagaattggcaattgggctattgggcctttaacatactaaaataataagttaaaactcacgggtacccataacccagtagggtaaaacccgtgtaagactttaacgaaatgggacctgcccatttaaaacccacgttttattttatacaaaaagtagatcaatgggtttgaaattttagatgggtttcgggtacccagtgggttttaacccatcattaacatccctacttataagttttctcaaagaagtaatgtatcatgaaatacctttttaacttttggcaaaacatagtatcgagagtctcaagaagtggcattgatccttcttctactatccattcttctaattcaagttgtgcaaaaaaattttgagattatcctaaatagttcgttcgatttttagaattttaaaccgatataaacattttataaacaacagatgacgcataattttttaaaacgtaatatgtaacgaaaaggtaatcaatttgataaacagaacagaaagcagaccaaataacttgttttaataatgacttaccatacaaacaccatgataattaaaaaaaagaaagaatagaactgtatttttgttcatttagtatggtagtggaacagtagccaatagtttgattaggagccaaaacacatcaacacaatgcaacacagttattatgatattatagcctcacaatccaactgagaagatattaattgacctgaaaaacaaagagagaataactagttatatttccatgaaagtacataatcaaatttgttttgcataaaaaatgaagacattctcattcctttaatctttatgaaattgtttctcagatgattggactagggaaagaatatatcacctcgttgttttctggttcttgtggccagttatatcgaataagagggacgtgttgcattttatagtaatcttctcctcctttggataccttcttctgaaatactttttcatttgtgcggatagccaattcctttaatgaactgataaatcgcagcccatctggaatctcctttaatttcttacagtctacaatatgcagagtatgaagaaggggcatggagccttcttctactatccactcttccaaggcatctagtccccatatttcaagcctgtgcaatggaggaaacccaccgccggtgcaaaccattctcctcccaacataggcgttgtaccataaagaaaccactttcagttgtagcagtttctctagagttggcatcggatcctcctccaaaaaacaatatactagagatatggttgtaagatgagaaggaaaatgttgcacatcaggtaacatcggcctatatatcaacttcgggtgcttgaactgaacggaattctcggaaggtgttactgtaagatcttccaagtgtcccaacatacttagagctgaagacagagtttccatatgcaacccctcgccactgattaagatttggagggtccttagctttgtcatacggtgaagatctgtcacactgctatcctttgttgagaaatttatcaacgtctccaatttgagtagattacccagttccaactttgtcaaactacttctttcccatggtaagctgaggtatctcagttctagcatctctttaaagacattgggcacgttaatcagctgaccagaatttatacgtagattgagatagagcagcgacttcaggttccgcaaagatgaaggtaaataagttacagatgcctgatataaactcaaatacttcaagtggatgagctttccaatgctagagggtaacttccctcctttaaatttagctccatcgagatctaaaaccctcaacaatggtaactctatgaagtttgatcccatcgaaaacctactatacccaactggaataaacaagagagatctaagtttggaattcttcatatcgttctctccactaaaaatactggtgttgtacactacgagtctacgtgatctgctagaagctagagagtgtacgcttgagctgctggttggatcagtaacaatctgtaaaaagttctcttccttggcttttaacaaacaaatctccctcatcaagtcatgcaactgacatttttcaaatctcgaagtcaacgcgtctctttcggaaataaccatatttctcttcactaactcttctatgtagagatccgcaacatctcgaatggtagctccctcgtaattcccaggatatgttattccttctgcagcccagacataagacaatctctctatttcgatttcatgatcttcgggataagaggctaggtagagtaagcagtgcttcaaataaccaggcaatccttcaaagctcaaagacagaacatggttaaccgaactgctatcgttttcattggaactagtccctccaacaactatgtgagatataatattctcagatatcagtttccactgacgcaatgtgtgtttggcatctaataacccgcctaacagtttgacagccaatggtagtcttttacaatgttttgtcatctccttagccatctttaccatttctttatcaattatatatcctacacaacattatgcagtcaaaaatcaatcaccgttggatctttacttttgtaagatatagagaaactagacttgtttgattggatcaattgttgattgttcaagtgatttttactaattgttttttttttattactttttcaaatcatttggtattagaataattgctaaaaatgtcttttcaacactatcccttttcaattctaccatttcgtatttgccattttcatttgtatcattttcaaatttttaatgaccattttacccttatttggaaattgttttatgttaacaaattttcggaaaaaaaaatctcgccaaaaatattcggaaaaaaaaattccagccaaaatggttcacaagagttttaaaatggtttataagggttttaaaaactcttgtaaaattttttaaaacctttcgtaagggttcacaagagttttaaaatggttcaaaaagagttacgaatgttttaaaatacttacaaaattttttctaagagttaaaaaaatgatagtaaagactttataagattttaaaaggatttacaaaagtttaaaaattcttgtaaatccttttaaaactctttacaaactcttgtaaatcttgaaatactattgttaaaggttttaaaatgatttacaaaggttttaacaggggttttaaagtatttaaaatgtatttaatgactttataaagattttcagaggttttaaaaaatttacaaatatttttaaatgcaatatttttgctaggaaaagttttgttatagttttttttggcggggaaataaattttggcggaaaatttcagtttctaatttcatgttctcattaaatgagggtagttggctcatttttcaagagaagagatattttttaaaatagataacataaaagaatattgttgtaaaaaggtagtagaaaaaaggtaggtttgcgaatcccttttttaatttttattttgtttaaaataatcgatggctaatttgcgccgtaatattttgtttccttaaatcattcaaatacaaacatttcctaatttttgtcacgggctatatctgcctccttctgttttctttttgttaatatttctcgcaaaggaggaagcttttaataagaaactcaatttttcccctttatgcttttttcattttcaaaattacgaaagagggaattttgtgacaataaattgagtagaaaagagtatgattttataatatagatttataaaacagtcggtctaaaaaagcttaccagttattgttttttgcttagaaaatgctatcctttgtaaaagtttccaacattcgtcatgagttaagagttctggtttgaaagtcacacaatgtggatgtattgcatcgttgcgtgaagtaagtagtaccttccaaccagctgcaataaaccaaacataagtgtttgtgaggaatttgggtcctgttatctcttttcttagaaaatatcaaatggtaaacatattagattcgcctaaattattatatagttatatatgtaataaaagggtcaccttttctctctggaaacatgggcgctattctgtaccagtcctctcttttccataggtcatcaaagacgatcaaagctttttttgtttccaacaactgaaagagtttcttctgaatatcgtcttccggcaagtctgagtctttatatttaggactaagattccccaagatggttttccacacatctttccgtgtaaactcttgtgatacacacacccacgcaagtccatcaaaatgactttttaccttatcatgatcaaaaatttgccgtgcaagggtggttttgccaagaccacccaaaccagtaatagataccccatgactgctatcgtttcccaccaattcttcaaccaatttctcaacatttttctccaaaccaacaagattgctctcagattcactagaaaatgtatgacgcaactcccttttcctttccagttgagcatgcgaatccacaccgtccataatgtctgattttatgcctaaattctgcataacttggataaccttggagatcctcttactgatgcttgtgatttgcaaggcaatctccctacgaccacctggaaagcaagcaaggcttctcatgttgacactgccttttagaagaaagatttctattatatcctcagcatcataagtgatttcctttatctcttcaaggcagtttcttgcaagtgcacgggtttgtttctttgcatctgcatcagatagaaaggccattaacatcttcagatcatctcttagctccgtaatttgctcttcaactccctggaatcgctcatattcttggctcaggagtttccaaagcttttcaacaccgaacgatacaattgaatcaaccatatataagtcctgcatgaatagtacgaaagtagaggtgaaacctttttataatgaagaggaaacattaattagcaagaacctacatcacatatattatatataagttcaaactgctaaagataaaagtgatttaatatatacttgcatttttcattattagcagtctatcacatgattctttaagaataggtttggcttagctaaatttttttttgggcaaaaacatacttgactccattaatccacataccaaatacaaagttcaaacaaacatccaacacatggttcgaagtcaattacgtccgagtcttatggagtctaagtagtggagttgtggaattgagtcagttcgtgtagtggagttatggagtctgttcctattttttagtcgttttgttgttccttttgagtctttgtaaggctatttaaagccatcttttcacgttaatgaagtatcacttttagccaaacaattcacaaactagcattctaacaagtgaatggtagagatagaatatacgataatttgacggaagatccaaacatcggagacaagaacttgaacgtagtttgcaacaagcgagagaatggcgagtcgaaaatcattccacaaaaacttggggagattgaagattagttacggtccaataaagacataataatgttgaaaagaggttctttaacttgaatatcaccggcttaatatccacatcatctaagaatctgggtaaagtacataaacggttccttcaaaaggaggtgagagtccaaaccaaggttctttctattaaagaggataattgtaacatagagttcttagaaaagataaaacgattaacaacactaaggatgtcttcctccaaggttcgtaacaaattattagctttcctaaccaccgatgtccgcacaaagtgaaattggagtccttgaccaatatcagcaatgtcaagagacatcaaaggattaggaaatgccaaaatatttataaaaaaaacagacctgggccaagatgctaattgggttagccctattatttcagacatgggccgagaaagatatcttagtgggccaagaattgagaaacccatctcaaagaaagagtccatctgagcaattagggatttgagcagatccagaagttgagggctgcttggagggggatgcaagccgtcgtgggagaccaatagttagggaccaaaggttttgcaggtttggagcttccgcgattgtgagtgagagaactcactagctttgtcaatgaaaacccattggagagccaatgaatcaccacccagaagatagacggtccaagagagacttctcttgccacaacgaagtcgagtgtgagatttcttctgaagggatttgagcagatccagaagtttagaaaggaaactaagtgatggaagaatattcaacttttaaagatgcatcgcagtgggggaacggtttcagcaaaaatagaacgtgcagagagctgagcgtaagagtagtcaccggccaccaccgtcttcctctgccgtgagattgttttgccttttaaaaccggtgagggatataggtttcacgagggtttatagaagtaaatcggaaaaaggaaaaacgtgaacaaacaaaggtggccaaggaagcagaacaaacttttgaggattcaagtttcttcaaacatgatctaagattttgcattgtttaagaaagaaaaaaaaaactaattgaacgagtagagtcgaattgatggaaacaaatcaaggacagagcaaaagaccttctgcaatcagaaaacaaataaactttgacagaaaagtaaaaatcaataacaaacaaactggctcacctgtcgaaaccacttttttctcgttgtcctttggaagaagaaagatgattgttctttgttctttagttatgaagtctcagcttattcttagatatgggagtaagtatgaaatcggtagccaagttgacgatatttaaattaaaataagaccgggaaaaagttaagactttgttgtgcatgtgcagtgcacgttaaaacttggggtcaataaataaaaaaccaatatctttactccggtacttttaacgtttctttaattatttgatccataatctccgttaaatcttaatcttgacaaattacaaaaaataaaaacaaaaaaggctggacacgattactattagttatcactcgcttcatagtcgttacttgacttttacccggacgaagaaaataagtatccgtaacaaacaaagtggataccaactaccaagtattaaaattttaatactagcaaatacaagtcaagtagtatatatgaaaaataatataactacttgatccattttacccattacacatttttgtagaacaataatacagcattatgttgtcccacatttgtttttaaagaagttagggggtgattggctatatgctttcaagactttaaaagcagtctaaagttctcacattttgtttttccaattaggcttttttactaatttctcaaaaactttttttttcttttttttttttttctttttttaaacctcataaacgaggcttttcaaacaaaaaaatattaaagtgatttgtttcttttttctatactataaaaaaatctacacatttgaattctgaaagcttttttgtttttagaaaagtttccgaagcagtttatttatttattttctaatcatttgataacttaatttttttggttagaaaaaaacatggattaaaaacccttcactttttttctaaaaacatgtaaaagatcttcaacttttttattggttttaaaccatagggtagattaaaatatagttttcaatcgtaagatccataaagatattttttaatagattatatgattctttaatctccgtcaaatcttgacaaatataccaattgagctccccacatggctttctttgcattgaattacaaaaacttatgctttgtagaaagtagaaactagatttagaaaagagctaaaagctacaactgtcacattaattctgtttttataaatcatctgcttttcttgtcttcagatataatttgaacattcaatagatttaaggatgttcagttatctggtatttacaagatttaacaatttcctagtgattgttaactatacttcaccgcatcagttgccaacatagtcaaaaacttcaatactttttttggccaagttcatgtctcaatggcatatcaacccccaaagcaacccatggaaagagaggtttaaaattccaaatatgtttgttatcaatctaaacatttgaagtgggccaagtgacactactgacatgaaacttaattatttagaattctaaccttatattttctctagttttctcttctatatatctagatatatctatatatttatatatttattgaggtctgagatatattcacagccttctcaacgttggctatatatttgacttccgtttttcttctaggtcttttattgcgcagttcaatactcaaagctaattacggtgatatcggaatccatatcttcaggtacgtgactcttagatttaagggttttgatcgatttaggtttacgtcatcttaattactttcaaagactggtttcattctcgcgtaatctcaatggacgcgtaacatcatgtcactgctctaatttgttttggttcgtggttggcgataactataagatcaattagtttaatttggaatataaacaatttggatgcaaaagtctcaataataattacctctctcaagccctaaattttgttgtaactatcttaaattcttccagaaatttgactcaacagatcttgaaatggattcgagaagaatgtcccgacccagacagattaaatttgaggaaggatggtccaacattcagaaaggtattaccaagctgataaggattctagaaggagagcctgaaccaacattttattttagtgaatgttttaaactttacacgtaagtaatgtttgtggtcttatgtaacgtttgctaacagttttgtacctaccacagtaatttcttatgtgattcacaggattatctacgatatgtgtgtccagagatccgattattcacagcagctttatgaaaagtatcgtaaagtaattgaagattatactatccaaacggttagtaccaaaacttttcatttgggttagtttcttagatatcgtgcacaaaaatatcaatgtgtgaagaaaacatgtttgtttttcttaactttaacgcaaaagatgtaatatagtctcttttttatgtgcggttaaggtgttgccgtctttaagggagaagcatgatgaagatatgctaagagagcttgttaagaggtggaataaccataaaattatggtcaaatggttaagcaagttcttcgtttatattgaccgtcacttggttcgtcggagtaagattccaattccatcactagatgaagttggattgacatgctttcttgacctggttggtgatgagtattcctatagctctttatttttcaatgctgcaaatgtatttgtaactatccatgcaaattatttgcttcaggtttattgtgagatgcagtccacggccaaagaagttgtaatagcacttgtaagtatttggtatatgtaatgaaaaaaactatggtccagcattattcttttttttttttttttatgtctaacaatgtaagtattgccagattcataaagaacgtgagggcgaacagatagatagggcactagtgaagaacgtattagatatctatgtggagaatgggatgggaaccttggaaaaatatgaagaggattttgaaagcttcatgcttcaagatactgcttcttactattctcgcaaggcgtcaaggtggaccgaggaggattcttgtcctgattacatgataaaggcatgtccaccactactatgctattattcgatttcagaaaaagtttatgtatatgtattaacgtcagtaatttatattgcaggttgaggagtgtctaaagatggagagggagagagtcactcactatctccattcaattaccgaacccaaactagttgaggttggtcatttctgactgtattttgagctgtttacaaacactgatagttattgaacttggttgtttatttctgattgcagaaaatacaaaacgaattgttggttatggttacaaaaaaccgcctagaaaatgagcactcagggtttagtgcattgctaagagatgacaaggtaaaatggacttttgtggttataattcgtaaacaaaatatcatttaaaattaattatatatatattgatggagcattgctatatatatatatatactttcagaagaatgatctctctaggatataccgtctttatcttccaatccctaagaggttgggacgtgttgcagacttattcaagaaggtttatttcattttatttttaaacttactttctgtttgattccaaaacaatttcttttttttaactcacattgattttcatatgtgtgtataaaaacagcatattactgaagagggaaatgcccttatcaaacaagctgacgacaaaactactaatcaactactaattgagctacacaataagttcattgtctatgtcatcgagtgttttcaaaaccacaccctcttccataaggttagagttttgttcatgtgtgtctatcttttccaacaatattatatcgaatgaccatagtttctttgaatgcattgaaggcattggaagaggcatttgaaaccttaagaagtcaaggaggaagtgagtagctttttcagtgatgaagtaagaaagatacgcttaattgatgaaagcatatttgttttttttttcgtattgtcaaagatttgggtgaattataatgaatgattttcctatttttgctacaactttgcatatcatgatttagttaatgatttttagtacttatgaactatgatatgcaattaaattattcaacattaaaactacttaaagttgttgttttttgctatattttctaaaagatgactttatctactatttattaaaatttcaaatttatgaaaaatgtaatagtttatgtatatatagatgcattatccatataaatgaaaaagaaaaatgaacaactacttagttcgtttattctttctctatttatatatgttatagggatcatatttacataaataacaattattttataaaatatgattgttagttgattgtatagttaatttgaataaggttgaattttttatatttaatttaaagttatgcatatacgtatgttcaatggaaaaaatcttagaaaaattaaatgcctacattaataaatgttactacatgtgtatctttgagacaatttaaaataacttatttaatgatttaagtacaaaatatattttaaactcagataagtatttaatttcatttaatttaatcatgttttattccttaaatgatacatattttgattattttgcatattcattaatcattagtatcaaaagtaattgattaaattataaaataaaactttgaattgggttggattttatgttatatttaatttgaagtttatgcatataagtatttttactggaaaaaatcttagaaaaattaattgcctacattaataatttttactacatgtatatctttgagacaatttaaaataacttatttaatgatttaagtacaatatatatttaaaactaagttaagtatttaatttcatttaaattaatcatgtttgactccttaagtgatacatactttgtttattttgcatattcattaatcattagtaacaaaagtgattgattaaattataaaataaaattttgaattgggttggatcatgttatttaatttaattgtgaaattgttaatgcattttactgtttttttatgtaaggaaatctcagaatgattaatgcacccaatcaatttagggggtagaagaagtgcaatgaagaaactttataatcttatataagaaatcttctaggccttttctcctacactggcaaatcttctaagctaatcggataaggtgaaattatattcatactgttcggaatcttcaagtacgagatgtcttaggttctcctatgatttgtagcctaattagttttagttttaaaaatagatcagtattgataattacctctcaagagctaaattctaatgtagttatcttaattgcttcccttgataaaaataaacaaatatattttaatttctcgtgtctactactttattacagaatttgatttaagaaagatggtggcacccacagagattaaatttgaggtagaatggtccaacatacaacaaggttttaccaagctgataagaatgatagaaggagagtctgaaccagcatttaatcaggaaattatgatgatgatgcatacgtgcgtaggtcgtcttatgtaatgtttggagtcttattatataatgtttgtaattaccacaactatttcttgtgtgattcacagggctacttaccgtatatgcgcctacaagaaccctcaacagctttatgataagtatcgtgaattaattgagaattatgcaatccaaacggtgagtaccaatgtgtgaagaagacacattttttttttgacataaaacaaaaaaagagttaatataatttcttttttttatctgtggttaaggtgttgccatctttaagggaaaagcatgatgaatgtatgctacgagagcttgctaagaggtggaatgcccataaacttttggttagattatttagcagaaggttggtctatttagacgattcctttctttctaaaaaaggccttccatcactgagggaagttggcttgaattgcttccgcgaccaggtttgacatgcatatacctatatataggttctaatttttctctgcttcgaaagtattttctaacggtctgtaactacgtactttaggtttatcgtgaaatgcagtccatggccgcagaagctatattagcacttgtaagtaatgttatctgtattgataaaaaaaatctcttgttctgcctgatcttttttttcctctcgaaacaatatttgtattgccagattcataaagaacgtgagggtgaacaaattgatagagaacttgtgagaaacgtaatagatgtctttgttgagaatgggatgggaactctaaaaaaatatgaagaggattttgaaaggctcatgcttcaagatactgcttcttactattctagcaaggcatcaaggtggatccaagaggagtcttgtcttgattacacgctaaaggcatatctctagatatcacttttggaactgtttttcaattcgatttcaagaaagtatgtttgttaatacatgttagtaattttatgttgcagcctcaacagtgtttacaaagggagagggagagagtcactcactaccttcatccaaccactgaacccaaactatttgaggttcgttatggtatcattatttggaattaatcatatttttctacgggagattttagcgtttgaacttagtgacatggttatatctggtagcattttgaggatatgtaatagttattggctttttatttttttccacaatattatatattgagtgatcatttttttctattgacgcattgcaggtattgaaagaggcatttcaaatcttaaagaggggtggaggaagtaagaagcttaagtgataaagatatacttaagtaaagcaagtgagaagcttagcattgaagtttgaaaatttgggtcaataataattatcttgctagtgtcgctaaaaatttggcaatttaaaataaaatcatttttatacaatcactatcatttcatgcatactcgttttcaagttaaactaagattagcttttgtattttccttccaaatcgattaggctaaaaggttaataaggttttcagattaatatggggcgtcctaaaaaaacattcatcggtttagtaactgacgtataattgcttctttgattgcaaaacaaaagtttttagcaaaacgaaatatatatgtttctgaataagagggtataacaagacaaactttggtaatcaatagcgactttgacaaaatatttcaccaggaattttgttcattggagggtgatttagcttttgttgactggtttgggactgcatgctaattgacagaggaaaacaacaacccgacttcagaaagtaccaaatagctaacagctataactgagcctaaaactatgaaaaaacaagaccaatcaaagcttaaagtgatattgcatcaaattaaacacaaacaattttgtctacataattctcaaacccttcactaattagatgctttatataaaagatatcaaccaaaacgattttagtatttcaactccagccaatcaatatctcagaaataatgttatttagtatgtgacaaagcatgttctagtctttagagtcactagagagcccaaatggtgaagttttttgcagttggattgttttttgcagttgagtgtgttgaaactgtcaagaaataatggtaaatgtggaatatctatccaatgatcattacattgatgattcttgttccatagatttcttctcttttttgttcatgataatttatttacagattgtgacatatgcacaagtgttgtgcaaagaattgagagatcctcttttgttgtatgtctaaaacattcttagttttatcgatcaaagtaattaaagtacatgaacaattttatggtatctatgttgtggctcagcatcatgtgtttaccaaatgttcacattttcttaaacatgctctttttcacactcggatcaacttattcaatcttaacttaaaatagagtatttaaaacacttactgagacaatgttgtgtttaaacagaaatgatatcaaacaactgaacaagcaaatgagagacacatatttgcataaactaataaatttttatgttactactcccaaatcagtccatgatggctaattcttcatcctcatatgtattattcaagcagctgtataaacataaattttttgactcagaagcttaattaaaattttgatctttacagttttcgaaatgcttacctcaggataaataacaagagtaaataaggattgcttgaagttcaagcctccaaggtgttggactcaaatttgtgttggattgaagaatttggaagatcgtctctcaattggggtttaagcgaattttgatcagttgggtaattatccaatcttttggggactacgttggacggtttgtgggattttatctctgaaagcagtgttttcattgaaaaattgggaagatcgattgtctcttagatttttaccaattacatgagttgtgagttaattagggtatcgtatctgaccagttgtgtttatgttctgctttgtgttgtccattttttgggactatgtgtaaatattattactttctaaagcaaatatgtatctaaataaaaataattgacttaagccaaataacaaaattgacaaaaccaattccatttatcccattaaccggttataacgttagcaatcataagaaaaatagaaatcaccttaagactgcatcgtttataaaatattttgttggaaaatattgaggaaaaaatagaaaataggatcgagctaaaaaaggaaaatatcactacgagatctaattaaaagacctcacaagatttcggacgcgcatattagatatgattttttacgcgtgtttcaccaaattatgaccgttgtggtggcctgtgggattgaggaaacctaatcttctaagtctctatatattaaagagtcatcatagccttctcgttgcacttcccattacgatcgaaaggtctctgctttttttcctctctcacgatttgatcaaagtttcgtcttctctctctctctcaaaagatggctcctcgtcagaagaaacctaacaagtctgatgatgatgatgatttgcgtaggaagaaacagagctttttcaaacagagatttccaggctttaagaagaaagcctctgagctctctgttctctgcggcaactctgtcggtttcatctgttacggtcccgacagcgatcttcatgtttggcctcagtctcaagatcataacccacaagccctacatgagatcgttgccaagttcaatgccttgagtgatgagaggaggaagaatcatgcatgtgatctcaatgacttccctcatcatctcaagggtttgtctcgtgaggagttaaggaagcatctccttcaccttgactctcaattacttggagtcagggaacaaaagatagaaattcttaagaagacgctcacgggttcttccgaaaaagatggtgctagggtttcagagaactcggccatctccgatcacaagttgaagatagagcctcatttgaaggatatattgtcggaagatcatctaattagggtttcagataagaagctgggttcgtgtgatgtatttgacgagttggcttacgtggtccgcgggtcaaggaatttgaacgagaatgtttccaagtacgaatcaaaagatgcagataacacgggactggatcatcttgtaactttaggcggtgattatcttcaggaggcggcagcagaactttaccaaacttacaatctagggaatttttgtgatgatcatgtttgggatctggagtttgcctcaagactaccactacttcatacttttagcgatcctctcatgaccaccaatacttgccaaacgatgagcaccgatatgatttcaatttgataacttgatgactacgttagtgaaacatgtttctttcaccttttctcggtgattgatcattttttagtatctaaacttgtatgtttgctccaacacaaatctatttttgtaaagttttggtagtgttttcttgtttattattgattaatcaaacttttcctttctttctgttacttaaatgctgggcttgatagtagtataagaaatttgtccacaaagcacaccgcaaagttccaaaagctaaaacccttgtaccttggagtctctgcatgtgagaaaggaatatgagagttaaaaagagttttttcgtaagacaccaaatcatctacaatgacgatgagcgcaactttctatcagtgagcttgcaagctagcgttcttgacttcagaaatgtgattatgattaatagttgagttaatcttccttaccaactttaaagaaagaaaacaatcactatgtcatacattcttcaggggttaaacatgtcggatatgaaagtaaccaaaagaatcctcattgagataagcaagtaataccttccaacctgcgaaattgttcttgtctggtgattctaaacagaaagaatcttattcttgttttagctcttttgttctagactagacactagtgaaagtgaaatttcaagaaaggttacaggatcataccttttgtttggtggaaacagaggattctgaaattcctggctgtggtcacatacatacatcaatcacatatttactagtttctaatgagaaagttcagcttggattcagttcatcttctctcatctttaaggtccgaactatgtccaaactttggcaatatatttcaacaaagactctaacattcttatatgtgagtatgtgacgttgtatctcagtaacttgctcatccaactctctgcgaatattcagattcttgattcaggagctcccaaaacttcggaattccaaatgacgtacacaattgcctaaaacacaagtctcctgcttaaccatgaatagttgagtgaatcaaaatctcactgaacaacgttgtacaagaaatcaaagttcacgatcaaacttacaagcatatccatgaagataaatgagcgaaaactaattacttggcgtatatatcagttttgacgtttggagctgggaagaaaaatgaaactgcaaatcaaataatgtcaccacattaaattatttctgatcgtgtcattattcaactgatagctgttattatttctggtcaacctcttatttgttgtctcttagtaaaagttttcttctagattgaacaatgttttaaaattttgacaagaagaaaaattaattgtttaccgatttaaagacaagaaagatctaagttagtgtatatttaattaatgcagctttagttttttttgttatttggtattttgtcaacaattttttttttataatataatgttcattccacgatcttcggaattgtgcacatccgtcgttcaccaacataattcaaaggaaccagccaattaaacttagaaaaatattgatgcccatgtcacaacaacgaagaccgttgaaacgacggtgttttacacagccaacgaacaagtccagcatggcggtttttgagaaccaataagaaattaaatgtattgtttactctctagagtaaatttattaatttttaaagaattcataatattccataaattaataagtttactagcaacaaaaaggtctgaagtctgtatctgacgatcacgcggcctaattgcgcgtggcaatttcttcaacgcggattttttttttcctgccatttcttgcatcaacgcggattaaaaaaaaaaaaaaaagtgttttcggtaataacccgaaagagaaaatacgtatcggaaaaaatgcaaaattttcaaaaacatttaattttaattttaatttcaagccaaattcgggagcgactttccaaagacgaacaaagccattgaaacggaagagaaggctgctcctttggtcctctctgtttctaccgtcgattcagatctctgcctctcgcaatcgaatcaatttgtgtaacgaatcgacgcgaattatagtggtgaagaagtcgacaattcgattgttgtgtaagttgacgagaggattggatcggtgtgaattcctcctaaatggttcgatcgggtagttttagcgtcgattcttcggcgactcatcaacggactccgtctcgaacggttacgttgggtcatattcaaccacaggctccgacttatcgtaccgtttattgtaatgatcgggaatctaatcaacccgtccggttcaaggtacaccggagtcaattgatgtcgtgtattgtttctgaatcgattaggagatatgtgcattggaatttgtgctgtttggattcatcgatctgattttttctctattttttgtttagtctgatgaatgtttgattaattgtttcagggtaattcgatttctacaacaaagtataatgttttcacatttctgcccaagggtctgtttgaacaggtaaatacgcttggtttatctttgttgcttggatctagactagtgaagggttgttagtttagctccagcatgttatttaggagttcgtcttttcggaacccgagaagttaaaatgtgaaattttcctatggaattaggattagaatcgtaaatgaagtgacagctgatgtacatttccaacattcgcagtccttccacaagatttttctgttatttttaatcttagttataatgtgtttcctgacagtttaggcgcatagcgaacatatactttcttggaatttcgtgtctatcaatgacaccaataaggtacgttaaatccaaaagctgtgttataatgtgttactattcatataacactcttgttctggtttgatggagattttgctgattaatttatgaatgatagatgcagttattaactagatagattttttttgtcctgcagtcctgtgagtccaataacaaatgtagctccactgtcaatggtgcttcttgtttctctgattaaagaggctttcgaagactgggtaagctcgtctgtttttcctttgcagcaatatcccatttctccttgttttagaatataattgtctcagcgcttgaataatctgtgcaagttagtagatgcgttggagtctcaggactcatttgcgtctcaactactaattttttctgctgataatctggtgcagaaacggtttcaaaatgatatgtccataaataatagcacagtggaaatcttacaagatcaacagtgggtatctattccgtggagaaagttgcaagttggagatattgtcaaggttagtctttcgttgctctaaaagaggtgaatctattcatgattagagtcattagacaaaattcactttggttacttttatctattgctgtgtgtttcaatgcatttttggcatatatgtttagttgtttcctgtttgtagggcctgcattatagttgttctattagacttccactacctatatgtctgttattgtactgcagtcagctactgctttccaccgtgataacttcttcccaaattctagaggccagcaaagcatgatttttgtcaactattttctcattttttcctggcgttctgttaggttctgaactttagttaccattatggttcgtcaagaatttttagaacagagagatagatatagatagagacccacttctcaacccaaccccaggatccacctaaggtcatctgccttttttttttactttcttggtacttataccaccggctgagcttgctaatacaatcaggatactaacagcactcattacagtattaaataactgagtaaagcaacactacgcgattgcagcctcagctgctcttgaactttgcgtttccttaggttgagacactgctctcttcttccttttcttcaacttatcttgatatctatttttcctccacacgttgaccctgcaatagttacgacgttcatgggattaacaatgtttacagcataccttctttgcattatttcaaagacttgttacctttgaattaagatctaaaattgttaaataaggttattgattttgcagataaaaaaagatggatttttcccagcagatattcttttcatgtccagtactaattctgatggtatctgctacgttgaggtgcttcttttgacagcccctttaaaattatatagtactgtcttcttgtccagggccaaagctgttatcagtagcattatcttacctagtgtgtgttcatatgattattccttgtgtgtgcagactgcaaacctagatggagaaacaaatttgaaaataagaaaggcacttgaaaggacatgggattacttggtaccagagaaagcttatgagtttaaaggttagcctacggctttgattgtggtcatgcaagaatttttttgtagtagatgtgaacctttgcagtgacatgtagtacttaattctctatgaattgcattgcaaataaagtttattgcttcagttggtttggcatatcttgtcgaaaaattagaaatgaatctagctgaaaaaggttcacctgagtccggttactattttaagttaacctgccaactcgttgctttttcttatatcacaatctgatgaacggacaagcatcaccagaaaatggaagaagagtcttatatagcagtcgattccatcatttgtttagatgtttgtctggctcttatgaaaagagaagttattgttaaatgcctggtagaatttttctataattgtttattctgacagttcctgtagctcatttctcttaccgatgattattttcttgtctcttatccattttcttctgcgtaaggacgcgatttttccttttttctgatggttcttcattttattcaactttttttttatttcagtatgattgtgtggtaaccgttaaatacatttcttcactttctccaacatctctgtcttttaccatgcaggtgaaattcagtgtgagcaaccaaacaattctctgtacacttttactgggaaccttgtagtccaaaagcagacgttacctctctctccggaccagcttttattgcgtgtatgattgactatttctgctgttggctgttttttcttttctgtcttgtgtttttttgcaatttcatgattttctttgtcttagataatggtgatcagcttatgagatatcttgtattttttggcaacttttatatcctcggattttaacagtattttgagcagatttccatgcatgttgtgcagagccttttatatccttagatttaataatattctgagacgtttgatatctgtattatcagggatgcagtcttaggaacacagaatacatagttggagctgtagtttttactggtcatgagacgaaggtaagctgtcatgaagcttgttttatgggaaactagctttgcaaacgtgcgtttttagctttcaggattcatatattttaacccttctatgctttctacttcgttgtatagttactatacacataggatcttaagctattctatggttaattctacatatgtaggtgatgatgaatgccatgaatgctccttccaaaagaagtacgctggaaaagaagcttgacaaactcattattacaatattttgtgtccttgtcacgatgtgtctgattggagctataggctggtgtgatttctcgtcaatcttgtgaattattaactcctgcttcgatttgtttatgctccagttctcatggcctgttgtggtactgttatctatatttgttatttttacagttcaattgtgacggatcgtgaggacaaatacttgggtcttcataactcagattgggaataccgcaatggactcatggtaaatagtgttgtatagatgaagttgatttccttctacttctggatttgctgttttttaccaaattgctaccctctgctgctacagataggatttttcacctttttcacgctagtcactctgttctcatcaattataccaatctccctttatgtttctattgaggtatgtctctcctagtatcatcctcttctaactatctgcactacaaggactagcaatttgaatgatctctattttgtttccttacacccagatgatcaagtttatccagtcgacccagtttatcaaccgcgatcttaatatgtatcatgctgaaacaaatacccctgcctcggccaggacttctaatttgaacgaggagcttggacaggtagatattattccatgctgcgtattgccactactaaaccatgccacagattgttacttgtatgatatagatatccgtttctgttgctagtatcccaactgttgctaaataattattttaaagatatactttggtattgttctcacttcagttgcaattactacggtatcattcaggtggaatacatattttccgataaaaccggaacactgacaagaaatttgatggagttcttcaaatgttcaattggaggtgtaagttatggatgtggtgtcactgaaatagaaaaaggaatcgctcagcgtcatggcttaaaagttcaagaggtattatatcttttcagatggtgaagttgatctatgccttatggtgcaatggaaatatgtctaatttgcaccgctgcaaatattctcaggagcaaaggtccacgggtgcaataagagaaaaaggatttaattttgatgatccaaggctaatgcggggagcttggagaaacgaacctaatcctgatctttgcaaggtggcttacttcattccctagatatttggcttacaatcagtttaagaattgaaaattgctaagaggttatagggtttccgtgagaaattgcggtatgttgtatttgatagatggtcagatctgaacttgtaaggttataattcgaggcctttgttctgggagccttatactaaaaattacagaattgttctgacagaagcctcttataataaagttgtagaggtttcacgtagttccttggttttgggttccgtatttctgcagtgtctatttttgggcacacatgtgcactatctaatatgattctaacttaaattattgtattattgacatttttaggaactgtttagatgcctggccatctgtcacactgtccttcctgaaggtgatgagtcccctgagaagattgtttatcaagctgcatctccagatgaagctgccttagttactgctgccaagaattttggattcttcttttataggtaattctcattacattttaaattccaaagatttgaaattgctggcattaaatctgacaagataaatttacaatttgttgacttgtcccatgattccttgttctaatttatagagtgttttctataagtgcttttgtttctcaagtctctggtagtttgtttgacactactttcatgtattttcaggcgtactccaactatggtgtatgttcgcgagtctcatgtggagaagatgggaaagattcaagacgtggcctatgagatcctaaacgttctcgagttcaacaggtctatatgacagtgaattgtttgtttattttctttacgtcatgatttaagcatactaattatatcttacacaatgcacaacagtactaggaagcgccagtctgttgtatgtcgtttcccagatggaaggcttgtactctactgtaaggtaatagttctttacatacttggttctatgtgtacttctggatcagtttttgatcattgcttggaacattgtccacagggcgctgataatgttatctttgagagattggctaatggtatggacgatgttaggaaagtaacaagagaacatttggaacattttgggtcttctggattgcgtaccctttgcctagcctataaagatttaaatcctgaaacctatgatagttggaatgaaaagttcatccaagccaaatctgcattacgagaccgtgagaagaagttagatgaggtatactacaatttcttacccatatgtattctcttgtttgtaaacaggagtgaaaatgattttatgattatgtccttaagtaatgtgaatgattgtatcaatgaatacattttttttagtcgcccaggaaataacttataatttttgatgaatgtgtcgtgtcttgatctatgaaggtggcagaactcatcgagaaggatcttatcctcatcggatcaactgcgatagaagacaaacttcaggaaggggtgcctacctgcatagaaacattatcaagagctggaattaagatctgggtgttaacaggggacaaaatggaaacggctattaatattgcatatggtatggtgtgtcacaaacttgttctttgagatcttatttcttctatctcccactttaatatctgctctttgattctgttttgctacagcatgcaacttgatcaacaatgaaatgaaacaatttgtcattagttctgaaaccgatgcaatcagagaagctgaagaaagggtaagtgttttactttagtttttccttcttatgtaggattttcatgaaagacaaccattgtagttaatttttactaataaaagcttttattgtagggtgatcaagttgagattgctcgtgttatcaaagaagaagtaaagagggagctgaaaaagagtcttgaggaagctcaacactctttgcataccgtagctggaccaaaattgtctctcgttattgatggcaagtgtttaatgtatgcattagacccgagtttacgcgtgatgctgctcagcttgagcttgaactgtacttcagttgtatgctgtcgtgtatctccgttacagaaagcacaggtaatttcaaattaagttcgtctagccaataccttttaaaggggtctatatattattgttctagggcttttgttgccaaaattggtaatcacatattttcttgggtttaaattatggcactcatattcaatgagtaacttggttctatgggttctttgaaccggcttcttaattttaatatatgtgatctaatttcaggtgacaagcttggtgagaaaaggggcacaaaagattactcttagtattggtgatggggccaatgatgttagcatgattcaagctgctcatgttggtataggaataagtgggatggagggaatgcaagctgtgatggctagtgattttgccattgctcagttcagatttcttacagatttacttcttgtccatggacggtggtcatatcttagaatctgcaaggttgaatttctctttcgccacaaacacgcctttagtttttttctgaaagttctaacgatctttttcttcgcaggttgtcatgtatttcttctacaagaatcttaccttcactttgactcagttttggttcacatttcgaactggattttctgggcaaaggttttatgatgattggttccagtcattgtttaatgttgtatttacagctcttcctgtcatcgtccttgggctgtttgagaaggtactagcttttctcgatctctactttatacaagagaatattcatctaatttaagacttttctacatattgttttggattgtataatttcatctctatgttgtgctcttgctaggatgtgagtgcatccctttcgaaaagatatccagaactgtatagagagggaatacgtaactcatttttcaaatggagagttgtagcagtatgggctacttctgctgtgtatcagtctcttgtctgctatctctttgtgacaacctcatctttcggtgctgtaaattcatcaggcaaagtatttggcctctgggatgttagcacaatggtcttcacatgtctggtgattgctgtgaatgtgcgcattcttttgatgagcaattccattaccagatggcattatatcacagtcggtgggagtattcttgcatggctcgtttttgctttcgtatactgcgggattatgacaccacatgataggaatgtacgcagacagcttacatcttcggttttctgattttttgtcttagtttttttcaacttggcaaatctgatttccttcttttcttgtctctgcaggaaaatgtctactttgtcatatatgttctgatgagtacattctatttctacttcacattgttgcttgttcccattgtctctcttctaggcgatttcatcttccaagggtacgtaaaaccgggatattcttagtactactttttggcattgacgaacatgtgattatattgcgaacgattctgtatagttatgacatgagagaatctgtgtctactgatgtagggtggagagatggttcttcccgtatgattatcagatcgttcaagaaatacataggcacgagtcagatgcaagcaaggcagatcagctggaggtagagaatgagctcacacctcaagaggcgagaagctatgcgatatcacaattgcctcgggagctctcaaagcacactgggtttgcgtttgattcaccaggttatgaatctttctttgcgtctcagttagggatatacgcgccacagaaggcgtgggatgtggcaaggagagccagtatgagatcacggccaaaggtaccgaagaagtaaagatccaatatataacatattattgctaattgtctttgtacatttaggcaatgtcatcggcttggggggtttttgttagggcctttagttctaaaatatatgtagaaaatatgcttcatttaggtgttttatgtttgtgttttgctttaaatgccattttcatagctccatttatgactaatgtggagaggcaaggcgttaggaacccaatacttgttccccatgtacataaaattgattttattacacctttgagtttattatttctctttttttttattccaaatatcttttgcgtcttattcttcttatacattgtatgtcaaatgtgtataccccattttagagtactactataacaatcccattttatattattagtcgatgccttataacaacgaagaaatggtttaggagaggacgaatactctattggtactattacacaccaactgtgatagaaatagtgaattcttaattgaaacatcaagttattatcaaaagacattttctataataagaagaggcttctacaaacctgtttcagtatcaacatcaacaaaaaaatgatgggtttttcgtctttggtatcacattccatctagagactcgaaaaaacaaaataaaacagacacatctacaatgatacagcaacaaacaaactttggaagaaaaaaaatgaaatcacaaaaaataatcaggggtcttgcgcgtggtatcgggttcgacttgtctaggtgctggatcgaattgaaggaagttctgttccatcttttctccaatctcaagaattgcggccatgtttccacatctgtaacagtagttcggtgcactaaacactgtcactacgttcttttcctatcaacacaccgaaagattcagcatttttgcaaccagaaccctattcaacacatatgccaatctattgttatgcacatattatatacctgacaccaattatagccttccattacaagttgatgcgctcttgagatcagactcagtccattgttatgattaaactgagtagcaatgtcctgtccaaacgtgtaaccagcaccacgaggagatattccccatccacaacgatcgtcgggatcagaccagagtagatcgcacattggtccttcgtgtggaacctacaatcccagagcataccatatcagattattacaatccttgttctatctgaagccaaaactaataataactaggaggttggtttcagagagtttatagccagagagaaacaatgtctttagggaaaaagaggagacatttacagatactaaatgcaaaacaatgcttctatacccaaaacaatacctcttgtattcgatccaagcttcggatattgtcaagagtatccagagaaggtgaaaggcctccatgcaaacagaaaacctgtcacggaatacagttgatgaagaaaagtgcggaagtgaaacaactacggatgatacaatgacgactggcaagaacagctcgaacctgactctctatgagtgctgtaagagggagataatcgaaaaggtccgtaaaatacttccacacatttgcatttccgtatttcctcaagcattcgtcataaaaaccatagctgaacaaacataagcaaaaacaggcacaaaccattgttagtgcttgcgagtcagaagcaaatgaaatacaagtcttcttagaaagaaaatcttacacttgtgtaatctgacggctctcatgattccctcgcaggatcgtaagtctgtccctgtaacgcacctttaatgccaccaatagagagactgtttctacagaatagtagccacgatctgcacagatataaccaagacaacaataaaccaaagaaataactattagctccaaacttcaaactgaaccagcgtactttgaatcaaacatgctctgaaaatcaacataagaacacagatctctaaaaacccaacaaatcaggaaatttaacttacccacacaaaaaaaattgaaatagagtgatagagaagagagaaagacatacctacataatctcccatgaagaggtaattagtatcaggagcattaccaccaatacgaaatagctcaattaggtcataaaactggccatggatatcgccgcataccgtaaccggacacttaaccggttgaacattatattcctcaacaagaatcgctttagcttgatcgcaaaggatcttcacgtctgcttcacctaacggcttacactccattagctgttcgatctgacggtcgagatctccgtttaacggcatctctcgtcgtcgtctcctttaacctttaattctaaatcttacaaccaatagccaccgaatcgttgtaaatcgaacacgtcggcgacggaggagtaggaggagaagtcgccgatggtgttagaggtggctctggctcgtctttggttttgtttctctcatatcacacaaaatggatatttattattctttacacaattttttttgttaacgagtgattttttttagtttgtttcttaaccaagcctggtcaaaaggaaatgacattggcaaatttttaatcagacaggacacctaaacttcaaagtgtatcagttatttaactattgaaagtcttaagagttgagacttctatgtaaatcaagactattgtataatgaaaaattatttttgagttcttcttcgaattaaccaagcaatgattatagtaacaatttcatgtgtattatattgtccatagtattaagctcaatttcctttggtatcgatatcaactcatctgagattttccatttagttagacgaatattttcatggatttgaatgatcacggtacactgggattttacgtagtttttattgacacaatgatctcgccagttcatcggcaaaagctatggcaaaatcagtttgtgtaattgtttaaatcaaaaatatattaaaattggttattattatatttgtgtaaaacatgcttagattaatcatctgttcagtttaatacaattaaatttatttttagtgaaatttataattaagaacgataattaataaattttagccaacctcatattaaaaatatagaatattcatttatggttgtgaaaaaactgaaatatagtgtgaaaactgatatttttattcgaaaaaaaaataatcttataaatagagatcttcataaagaatatttgaactgatcacagatatagaaaactataaaaatctatttttctataaatagagatcttcataaagaatctttattaaagatatagaaaactataaaagtctatttttctcaatagagttcatagtgaaaatatataatggacatcagaaaaacatatgtgattattttctttgtagggatattgacaatttcattttctagctacaacattggccaaaccaggttagttgttatcgttaaattatctttgatcatttgaagagcaatgtttgaacatttttatatcataaaatatagaattggtaatagctatttatatgtatgtatattattggattgtgtatttgcagcaatccagcaagagcaagagccacattgcattgggccatgtgagatagctttcggtaatagaccatgtaacgaagagtgtacaagtcaacaatatgcatatggattttgtgattatcaaacaaaaggtgaagacaacccacaatgttgttgctacacatcgtaggaattgatacttcttttagtaattggcaatttgatcgttatagtttttttttaccgcattttaaaagatgacttttgtagtatttattgatcttaataataaaagtcttattatactagcctttttgtagtctaattatattgacctcaacattcgtatttacaacctaataacattctatcaaaattattgacagagagtttactaaattaaactatattgaattggattgatttaaattcaatttagaaatgacatataagttttcttataaaatactcgcagagattttacggaaatagaaaatgtgaaaaaactgcataattcaacactatgtatatggacaatgtgattttgttacaaaaagtgggaaaataccacaatgttgttgttacagattatagaaaccaatactcatatgagccatggtgatttgaaccttctttgatttccaaatcaaacaaaattaagattggtatttttaatctagcattttctaacaaaattatatttgtctcgacgtccatttttatgtgtcaaaaatataaataatttacaactaaattaaatttaatggtcaaaattatgcttaatgtataaaaagaacgctaaaaatgaaaaactataataacaaaaaaacttaacgttagacgaggtacacataacacatgaatgtgtaagagttaaactccactcatttctaaatatgtttgatattgtaaaataggagggttgtctacattttcaatattacacaagtatttcaaaacatgggtaaatcataacaatcaccaaggcaagaacagttatgtggataattcaggggtttcatcaaaaaggtgttagctaaacaaaattatcgcattaggaaatcatcaaatagaattgccatatatacaccaatttttatttcccaccgtttttcattaaaacaaaattagataaaaattataaactatcaattaatctggtttaatttagccagatcaaacgaaaatattatttgagattatgaaaacaatatatatttacatccctttaatattttaaaggttcttttagtatttatttttgcgtaaacatgaaggcgaccaaaatactaattttataaatttcatagaacaaaatttcatatatctttatttggataatttttttgtgttatattgttttttgtaatggacattagaaatcattttcttatgccttatatcagcactatctccaggattagtaggtgaaatcattcattgaaccggttttgaaatgatgttgatcaccagttttctttagtcttcagctttctttatgtcatattttaaatctttaaacattcacaactcctggatgcctgataccgggactatctcctggattagtaggcgcaaaatcatttgtaaatttgttgtttagaactcttggatgcccaataccgagactatcttctggattagtaggcgcaaactcatttataaatctgttttttagattattttcatcaccaattttctttagcttttttacttcgagaaaatcttctttaactactccaaatgtatgccctgcaaaagtaggatccaaatattcattgaaatgctcatgaccgaccatctttttcgactttcttgcttcagtggtggctggtgttttgtcaaatacccttgagatggtcaaaatggtcaccacggtgataatgaatagcttcatgtttcttttctctaaattagataaaagaattatagttttgtatatgagaagtattgaatgttgagtaagtaggtttgtccgaatgaaactgtatatatagagtttattgtgaaacgctcacaaatagattaaatttggacagtttagatatcaatctaatgttgttaatgcatggcgatactacaaagatattatatgaataatactaaaattagcatctgacatgtgtatagatagtatcaccatgcagatttatgctctatattcaattttctataataataaaaaagaatcataaaattactaattgagaaagataataattatagtcaatctcatattaacggtgtatacaattattcatttattgtaataacaaaaatcaaagatatgccgagaattttttgcttatggttttaatttcgaagaaaatcataatcgttaagtcatttatgaaaaaaaaaaaaatcaaagatatggtgatttttttctagtcaaatataataaatcttagtcaactatttaacaaatttagaatattcattaatagtactactaaaagtgagatatctgttttagaaactgatattttacttgacaaaaaaatcataaaataggttgacatgatttctgtaatcatttgtattttaatttaatggctttgtatacttatggaaactcgttttgaaattaatataatttaattagacgttaaaaaactataattttttataatattttttcaatcataattacttaagagaacattaaaactggttttgattctatatcgatctattaccaattaatcgtaaaagatcaaactaaatttcgattctaattaattaaaaattattacctgatggtggtaacgagtaaaactggttttcactagtttggtcggtttttaattcaaaaccggttcttagctcagtccagactccgactcggtacttaaaagcccgggaacttcggtttattccggttggttcggttcttcagttaactagattttttaaaatgttgctgagaataaccgaaatataaatcggtttagaattgtcttcaatctaacgtcgtcgtatggagataggttctttctcctaacggccatcttccatctctaacctcacttccttcatcttcaatggaagcgagaatcatcctcctccgaattcaaatcccttggagcgctaatcgccaattctctcatcctcctttagatttccctcgttttatcagagcttcttcttcctcaacctcacaggttctcattcctcctctttcttttccgtcttttcttctctctttctcttttttttttttttgaatttttccgtgtttttgtgtcaccagaagccgaaaacttacgaaggtccgaaaccgaggaagaatttagtagctgatttcatttccaaaaacgatgacttggttcgaagcttaccgatctacgtcgggggcgcttctcttttggccgttctctttaatcggactgtttccggtatcgctcctgttgccgatgctagcaggtaagttgatcaaaccggactctgaaatctaaaattatacaatttgtgtttcaattcgaagttcttagtaatcaacagtggcttaaatcgagtttcaattcggtattttcagaaatttgttgtgatcattgctttgttgtttcgatgtgattcaactttggtttttgaatcgttgctcattttgtaattggtatagctcacagtctagagcagatctattagcgcttggcttggctgtcaccaatctattgaccggtttagtctggttatcgattcgacctaagtcaataacacctgtaagatttctaatccaagtttatgaattgaaactttgaaggatttggcaatgcaaatgtgattcttggttttgtttgatatcaggtaaatccgaaaggtgtggaatgcaaagttgtagaatctgatcttcctgcatcgatggtttccgagttgttatggtaatgctcttcttttcgtatctcttattcgaatgtttcttatggaatgataagttgaaatagtatctgacttttgtttatgttctcagggcttgggaatctcttaaggtagcaacatgttgtaagtctctagttattgtctacaatggaatttgccttattcaaattgggatggtagctgaatctccagaagataagaaaacagtcatagtaaagaccgataagttgatgcaaggatcggtttacagaggggttatgaaatccaaagcacgtaagtagtacggatttttgtttatgtttttttgtgtgaaattatgaatttgtctaaggaaagaacaatgattgtttgtcagagagttacttggctaatctttctctttatcctgggagatcagagctgccatttctacctgcaaatacacaggtttgttgagagtttgagtgttagtcttttgagtgagggaatgatgaaaccgtgtgacgaatacttgttttttctctactaggcggtgattttgcagccgcttggagataaaggaatcgcagtcattggtggaaatacgattagaggattcacgtcttcagaccaggttaggagatctttaacttctctatgttggttgtgacttagaaaagttaataagacaagtcaaagtgtaagtttgctcatcatatctaggcttggatttcttcaattggggagaagctagatgcgacactggggagatattttgttgattctgatgagatttccagagtaacagtttgaaagccaccagaccagaaaaaacagaaaatggatataatcatattgcgaaaacacattacatgcattgagaactaaaggtaactgttcattgtgtgatcatgtggttatacaaagttcaaatgaattcattgtgtgatcatgtagttacataaagtcgaaataaattcaatgtgtcatcatgtggttacattaagttgaaatgaattgtaaaaatagcttcagaaaacaattttacatcagcttagaatttatgaattccaagataaaccaatgaatcttcttcacatgctaaattttgaagtgttgtggtaggtacaatgagctttcagatttttcagttctgtcgacaggcgtttcgtttgtggtttccattttgtgttatgctgcgagagactagtaaatcagtggagattacgctgaaggatgtttctagaccacgtactcgtctctctagagattgcattccgttatgcgagctctccatgaacttctgcaatattaagtccaagaaaacattcaaaagtcagcacattacagtttgttggatgttttaaaagttaataaagataaatgagatcagaagaaaaggttacctgaaagagatctaacagactggactgctgtttttcgatctgtgtaatctggtgtcttatcagagacaactcttctgcattactctttgcctgagaagaactgctactaccactgtcagttttaggactctcctcatcactactctgaacaacttgtgacttgttcgacccattctctttgaccttatgcatctttgccgggaacagaacccgtttagctcccaatgtcgaacgattccgcttctctttcgacacaacagcttcctgctcaacatccttaggagtgtcaccacgatctaatggctcaacatcattcgactttgagcttaatggtgtgtttaaattcctatctttgcctttcaatgtgttgcttctctttcctgaagtcgcagacaaaccagaagaagctgatttggaggaggaagaagactctgagacctctgttgaatcaccttcaagttgcttccataaacccaatgtacgattcattgtctctctaacaagtttgacctgcacaagttatatatgaagttattaaccaagaacactaaagtcaaaagtgattgcacttcttataaatttttaccataaattgttttgaaattttaccttatcgaatcgtctgctctcaagaatacctagacatgtcttcttatacagtggagctaattcttcttctaccatagccactctagccattgcctccgcagcagctttcctcgcacgccaatcgtcgctgcttagaaactccgagacgtttggtaaaagccagtctagcaccgccttttcgctgtttcgaccgccaacagcgccgattacggttcctatggctccaagaagttccgctttcgccttgaaaccttccgatttaagcaacttcccaatcttcggcagggccttctgcagttgctcaacatccggctcatctgctgcgtctaccgccgcagcaaggcacatagcagcgctgatctgcgcattgggatcgcaatcgtggataaccgtttcgatcattggtccgaaaaggatggagaaaggctgtccggtgatgttggtagtcatatcaacggaagcggcaacacaagcggcacggacggaggaatcaggatcacggaggcggcggagaacggtggagaccatcttcgagaggtgaggagcgagagaatcgccatgagaacgagaaagaacagagagaagcgaaacgcaatgtttcctcaccggagattttgcggaagagtctgtactctgaagacagttaataaataaagagaaagtctccggtgagagattaagagcgattgaatcaagctctgcggcagcgagagcaagagtatcgcgatcagagagacgattgagacaagcgatgactcgttgcttgagatcagtaaccgtcatagccggctgtgaatgagacggagaagaacggatttgaacggaaggcattgtgaaaatgtccggagactttttcagagatccgccatggaaggagagaagaaaaagctttgtggagaaactaagatttggcggcagaaaaaaggctatgaagatgactctactacggttggtacttggcctttttaaacaagactcgtctttggcttgccttttaaacttgtcatatttcactacctgccacaaaatttacatttactattagtttatatccaaaatttctagttttcgtaagactatgtcctttttttgtttctaaacatcgaatatgtcaaatttagtattatcttacaatttttttttgttggtcaaaatattatcttacttgtttctcgttttatgaacgtctttgtacatcaaaacagattcaatataccaacaaggattctaacgtacgcaaggaatagttaagtaaatcctctatgtagtaatgggaaattgttaggactttgaagtaagtatcagagactcgtgtataataaggtattcaaagtcaggaagataataaaatatttgtgtaacttggtggccacttagaagaagaaccaagaatatacaagcaaaaaggaaaaaaaactagattccgtaagattttcttttatttcaatcctgattataattaaaagaaggaaactatatccacaaccacaatgttacacatgagctaatgagcaagtcaagcaaacacggtttcttaacgcgtaaccaaacgtgaaatgaactattctttctatttttctcaatattaggatgacatatatactgttatttaacatctatatatctaataacaaactaaatcttcgaatcatacttttctcaacaaaagattgcattgataagttcttaatttaaaatatttatgagtacatccaagacaaagaatagttctctattttcagagaggactgcatgtaatggtagtaatcatgttttctcttaggaaaaaacccgcacaacgtttatgggaaacatgtttgtgtttgaataacctttatggaaaaacaaaaatatttagcaactgattaaaactctttacacggctcatatttaaatattgggcctttagagcccattatggcccataaacacacaacttggaacgcttctagacttttctggatttgcctcatttctagaagctctggagatttcttcttcatcaataaatagaatcagcaaactcaccagctttcatcataaattcgaaattcaattcgtcggaaaattgttcagatttcgaaatcaaccgagaaaatgtcgctgattccaagcttcttcggcaacaacaggcgaatcaacaacaacatattcgatccattctcactcgacgtatgggatccattcaaggaacttcaattcccgtcatcgtcttcgtcggcgatagcaaacgcacgtgtggattggaaagagacggcggaggcgcacgtgttcaaggcggatttaccggggatgaagaaagaagaggttaaagtagagattgaggatgatagtgtgcttaagatcagcggagagagacacgttgagaaagaggagaagcaggacacgtggcatcgtgtagagagatcgagtgggggattctcgaggaagtttaggttaccggagaatgtgaagatggatcaagttaaagcttcaatggagaatggtgttttgactgtgactgtgcctaaagtggagactaataagaagaaggctcaagttaagtctattgatatctctggctaagccaatttagcttgatttgagttctctctgggtcttgactttgtgtgtgtgtgtctctgatgattatggttcttcgtttgattgtagttttaaactaataatcaatggaagctagtaacttgtgtgacaagtaaatgtatggtggagaaatgtgtgtatttggattataatagaaatacctattttcatctagaagctcaggatctagttattgataattagagctcgaaactgagatggatcttattgtttggatagttgttttaactattcaggatcttattgtttggatagttgtttaactatttataactagagatcgaaattgagatggatcatgaatttcattgaaaattaaggctaaactgtttggctagttgtttaactcttaagcatgtatctggagatatctttattcattgtttgattttgacattgtggttcatcttgtttgatggagactctttgtaggaaatcgctttggccaacaccaatgtgaactagtctggccaatttagttaattgattgatcatcatattgtttttggcatttttcagaacgtgtaataacagtgaaggaattttgaggtacctgctcaactgaatcagattcaggagggttttaggagaggtaatatggaagtagcaatgcttaagaaagataaagctagagctcttgatgatctgctgaaaatcgactaaggaagccaatgacaaactcagacaggaaaaaactgtaagaagaagaagaaaataagagaaaagcaacaaagctatggaaagcttaactttggatttgcaagttaagtatttttaaagcaagggaagcattggagaagatcttgttgatatgtcaaccatagcttgaacattgtggagcccaaatgaaaaggtataagttggctgcaaaagatacaaatgaaaactgtggaaaaattcttgaagactgagataagtacacactcaaaatgagtttttcaattctaagactatgtgggaacagcgagaacttcagttgtgtggaaaattgggaacttggcaaagtgaatttgtctgaccttcaggaaaatgagaagaagaagaagcatgtatgaaaaatacacttaaggaacttgaggagaagagtgaggatttgtaggaaagagttggagaagcggagactggaagcatgaaagtcgaggcaaagaaggttgctttagaaaacagaaagctcagagcaatgaaggttttttctcttgaaaaactcgataacttgtcaaaggtatatgaaagcttggtggatacaagtgaagcgtttttaaagcaaggcaaggattggagaaggtcttgttgatatgtcaaccatagcttgaacattgtggagcccaaattaaaagttataagttggctgcaaaatatacaagtgaaaagtaaggaaaaattcttgaagactgagataagtaaacacccaaaatgagtttgtccattctaagactgtgtagagacagcgagaacttcatttgcgcggaaaagtcgggaacttggcaaggtaaatgagaataaactgaaggaacttgaggagaagaatgaggatctgtaggaaagagttagagaagcagaaactggaagcatgaaatttaaaggaagcttgttggtcaacgaagtcaagccaaagaacattgctttagaaaactcagagcaatgtaggtttgttctcttgaaaaaatcgatgagtcgtcctcaaaggtaaatgaaaacttggagtataaactgcagactgaagaagaccgagagcttaattgacaaagaaaccaacctatagagcattactaaagaagctgagaagagctcaggaaaatgaaatttgctggctgaaggaatgaattagacattggttaatacacaaaatgcagagcactaatcaaagattagttgagaaaatagccaaacgcagagtttaagaggaagtcaatggagtcttcttatcataacaacattgaggagttgtcactaaaacttcttattccgggtatttaaatggcttcttcctccgcaacttctcactttccagaacacaaagacttataaacaaaccatccttcacgtatgtgttgaattgaaatgtgaatgtgacttcatcaacacaatgacttcaaaacccaacgacggtcttcctttcttttctcaccaataaaatgtagaaaagaaacaaagtacacaagaaagacttttcatttaacgatatctccactagtagtagctataactaaatggggtcatcgttattgactttgaataagaaatgttcaaacacttcaattattacataatatctttgcaataaaataacaaacgttaaagagccgtcgcattattagcacaaaaaatatcttttgtaaataaaaaaacaacgtaaaagagccgtcacatttgaataataaaacccatcttgcacataaaaaacacgactttttattatttttgattatttcaacaaagtatgaatagtcaacataaagaaaagtccgccttgatgttccttcctcactccctatttatccattttctaatcccaccctcttctcttcattcatcatcttcctcctctctctcttctctgtatcacccaactaaatcctcacgggattagatccaaagtctcaaactttgatccaaaaacacaaactttgttcaaaagacataaactttgagccaaagtcacaagctttcttggtgaacgatggattacaatccaaatcttcctcctttaggaggaggtggtgttagtatgagaagaagcataagtcgaagtgtaagcagagcaagtaggaacattgaagatatcttctcatctggttcaagaagaacacaatcagtcaacgacgatgaagaagctcttaaatgggctgccattgagaagctaccaacttacagtcgtctccgaaccactctcatgaacgctgtagtcgaagacgatgtttacggtaaccagctcatgagcaaggaggttgatgtaaccaagcttgatggtgaagatcgtcagaagtttattgacatggttttcaaagtagctgagcaagataatgaaaggatcttgactaagctaagaaacaggatcgatagagttggtatcaaacttccaactgttgaagtcaggtacgagcatttgacgattaaagctgattgttacactggtaatagatctcttcctacacttttgaatgttgtgaggaacatgggagagtctgctttaggtatgattggtattcaatttgctaagaaagctcagcttacgattcttaaagatatctctggggttattaaacctggaaggatgacacttttgttgggtcctccttcttctggtaagaccactcttttgttggctttagctgggaaacttgataaatctctacaagtcagtggtgatattacttacaatggttaccaactcgatgagtttgttccgagaaagacctctgcttacattagtcagaacgatcttcatgttggtatcatgactgttaaggagactcttgacttctctgctaggtgtcaaggtgttggtactcgttatggtaagtaaaagattcaatctttaatcatatctttttttcaagattcagttttgttgaatggttttgattcttgttgttgtagatctgttgaatgagcttgcgaggagagaaaaggacgctggtatattcccggaagccgatgttgatctcttcatgaaagcttctgctgctcaaggtgttaagaacagtctcgtcactgattatactctcaaagtgagtccaactctcgccttaacttagctcatcttgttctttttgtttcaagaagagtgtttgttactaggcaagcaactcataaaatcgaatcgaactaaatcgttttttataaaccgaaactgaaccggaatttattcattaaccgtttggtttcattattttagaatattgatataagttttcatattctaaaaatgttctagacaatcttttctcatgttcataaagttttgagtctttttttgtataatactaactttggccgtgtaacagattttggggcttgacatttgcaaagacacaatagttggagatgacatgatgagaggtatatctggaggtcagaagaaacgtgtcacaactggtgagatgattgttggacctactaagacactcttcatggacgaaatatccactggtcttgacagttccactactttccaaatcgtcaagtgtctgcaacaaatcgttcacctcaatgaagccacggtgctcatgtctctcctccagcctgctcctgagacttttgatttattcgatgatatcatcttggtgtcggaaggtcagatcgtgtaccaaggaccgagagacaacattcttgagttctttgagagctttgggttcaagtgtcctgagagaaaaggaacagctgatttcctgcaagaggttacttccaagaaagatcaagaacagtactgggtgaacccgaacagaccttatcactacattccggtttcagagtttgccagtagatacaagagtttccatgttgggacgaagatgtctaacgaacttgcagtaccgttcgataagtctcgcggccacaaagcagctcttgtgttcgataagtactctgtctcaaagagggagcttctcaagagctgttgggacaaagagtggctgcttatgcagcgaaacgcgttcttctatgttttcaagactgtccagatcgtcatcattgctgcaatcacgtctacactcttcctgagaaccgaaatgaacacaagaaacgagggtgatgctaatctctacataggagcattgctatttggaatgatcatcaacatgtttaatgggtttgcggagatggctatgatggtttcaagactccctgtgttctacaaacagagggatctcttgttttatccatcctggaccttctcacttcccactttcttgcttgggattccaagctcaatattagaatcgacggcttggatggtggtgacttattactccattggttttgcacctgacgccagccgcttcttcaagcagtttcttctggtgtttctgattcaacaaatggctgcatccctctttaggttgattgcttctgtgtgcagaaccatgatgattgctaatactggtggtgctctcactctacttcttgtgttcttgctcggaggcttccttcttccgaaaggcaagattcctgactggtggggttgggcttactgggtatctcctctcacctatgctttcaacggtctagtagtcaatgaaatgtttgctcccagatggatgaacaaaatggtaagtggcttacttctttattctgcattttacaaacaaatatcatagtaaagccgcctctgagtcatatttttttcaaattacaggcttcttctaacagcacaataaagcttggaactatggtgcttaatacttgggatgtctaccatcaaaagaactggtactggatttcagttggagccttgctttgtttcacagccctcttcaacattctattcaccttggcacttacctatctcaaccgtaagttctcgtgttgtatcacccgttttaccaaatctaaaaacaatagactactaataatgtacctttgaaactacagctcttgggaagaaggcaggtttacttccagaagaagaaaatgaagacgctgatcaggggaaagatccaatgcgtagatctttgtctactgcagatgggaacagaagtaagtaaacacatttcttaatctgcttagatgttttgcttttcttgtactcttgtctcattctgctccctgctatcaggaggagaggtcgcaatggggagaatgagtagggactctgcggctgaagcatcaggtggtgcaggcaataagaaaggaatggttcttcctttcactcctttagctatgtcctttgacgacgtcaaatactttgttgacatgcctggggtaagtaactatcttcacttaaaatctttacactaaattaaatatgaattacttaaactaaatagatatcttttgatggtataggaaatgagagaccaaggagttacagaaacaagactccaactgcttaaaggtgtgactggtgcatttaggccaggagttttgactgcgcttatgggagtgagtggtgccggtaagactacgcttatggacgttttggccggaaggaaaacaggtggatacattgaaggagatgtgagaatatcaggattcccaaaggttcaagaaacatttgctagaatctcaggatattgtgagcagaccgatattcactccccgcaagtaacagtcagagaatctctgattttctctgctttccttcgtcttcctaaagaagtcggcaaagatgaaaaaatgatgtttgtggatcaagtgatggaattggtagagctggacagtcttagggactccattgttggtttaccgggtgtcacggggctttccacggagcagagaaagagactgacaatcgcggtggagcttgtagccaacccttccatcatctttatggatgagccaacttcagggctagacgctagagcagcggctattgtgatgagggcggtaaggaacacagtggacactggaagaaccgtggtctgcaccattcatcagcctagcattgatatctttgaagcatttgatgaattgatgctgatgaagagaggaggacaagtgatttacgcgggtccattgggtcaaaactctcacaaggtggttgagtactttgaatctttccccggagtgtccaagattccagaaaagtataacccggccacttggatgctcgaagctagctcactcgccgctgagctaaagcttagtgttgactttgctgagttatacaatcaatcagcattgcaccagtaagtttaagttccttcttttccatggctcattgcatctgattgattgtttaagtaatagtactaatgaatacataacaaaatgcaggcgaaacaaagcgttggtaaaagaactaagtgtaccaccagcaggagcatcagatctttactttgctacacaattctcacaaaacacatggggacagttcaaatcatgcttatggaaacaatggtggacgtattggagatctccagactacaatcttgtccgtttcatcttcacattggcaacatctctcttgattggtacagtcttctggcaaatcggaggtaacaggtcgaacgcaggggatctaacaatggtgataggagcattgtatgccgcgattatcttcgtgggaatcaacaactgttcaacagtacaaccgatggttgcagtggaaagaacagtgttctacagagaaagagcagcaggaatgtactcagccatgccatatgccatctctcaagtcacttgtgagcttccctatgtccttattcaaaccgtttactactcactcatcgtctacgccatggttggtttcgaatggaaagccgaaaagttcttctggttcgtcttcgttagctacttctcattcctctactggacttactacggcatgatgactgtttccctcacaccaaaccaacaagtcgcttcgattttcgcctcagcgttttacggtattttcaacctcttctctggtttcttcattccaagacccaaaatcccaaaatggtggatttggtactactggatctgccctgttgcatggaccgtgtatggattgatagtgtcgcagtacggtgatgtggagacacgtatccaagtccttggtggtgctcctgacttaaccgtcaagcaatacattgaggaccattatggtttccaatctgactttatgggaccagtggcggctgtactcatcgctttcaccgtcttcttcgccttcatcttcgccttctgcatcagaactctcaacttccagaccagataaaaccatctctcaaacaacaaagtctctttctttttttgtatcctctgtgttgtttatatgcactataagctttgtatgttctaaatatgtattgtagtgtcataacgaaatttttttgaatatttttatttattgtcttatagatgatgacgaatcggaatcatgtaatataattccacttttttttgtgtttatatccacaaatccctcaaagtccatttttgtttgtttcttgagactttttattttacgatacttccaataagaggaagaagacagaaaaaaagtgtgatcatatccattatcaaagaagacaaaatcaatggaggataagttaatgttcttcatgattaaatcttgataattgtataacatggttctgtaaaaattatcacaacacaacaccaatatcataaagtttaatgagaaatctcaataaatcagtttttctaaatatagaaaagtctatcttacaacgacaaaacgattttgaattttggattaaatcacctaaaatttccttaaatcctaccaaaagtcctcccaatcaaatttccatttaatcatacccaaatgtttaggccaatacaccaccctatatcttgatcattgcataatatggtttggattcctaaattgatccgttcaaaatatttagacccttgtcatcttatatagcatatgatataaccctttcttcttactgggcctcgatgaattatttatgaaacctggcccattaggaatttgaagaaaaaaatattttaggggcgttccgagaattgaactcgggacctctcgcaccctaagcgagaatcataccactagaccaaacgcccgttgttgaacatatgttggataacaatatatatatattattatataatttcaatgatttcttattttggccaaattattctagttaatgcaaatttataataaaaatatcatcaaaaatatttattagaatattaaatcgaatcaaatgtaaaacaatgttaaccatctgatttgaacctacgtttgtaattctcactctatatcatcaaaataactttatttagataacacttcaactcgttaattatccattatgtagatcaaataacttaactattatatgaaatcatacatgaccaagttctttttacactaggtctatatagaaaacaatgtgagatttagtattatgcaaaaaataaattgagtctctttatacatcatcaatagaataacatctatatgataaaaaaaattgtatgaacatttaccaatatattaaatcatcattgatacgttaaaaataatattaaattttgacttgaacattcactttgacgtcttactattttaaaatctcattaatactagtatttatttttgttatagaatatcatcaaatgatcttaatatatagatagatgatcaactcattatccattatgtaaacgaaataacttaatcttcatatagaaacatacgagtaaattttatttttaatttaacatacatatatgagaaagacgtgagattgtatatactgcaaaaaataaattgaatccctttgtacatcatcaataggataacaagtatatgataataattttgtcgaaatgcttacccacatattaaatcgtcattgatatgaataatgttaattattggattttaatatacacttggaattcttattattagtagttaaaaatcccactagcacggatcttatttgttatacgcaaaatatagtaaaaaaagaagctacatatttagattcatgtaaaaataataaccacataagacaaatttatgtagtagaaaaggttgaaacaattttgtacaacttttaagaattgtcaatataaactaaagcttcatattagaaaaaattgtttttattttccaaaacaaaaccaaattttcattagaatatatgctgtaattagaaagtgtcattgtattcttgctttttctaattcagtcttcttatttttgcaggagttcactaacaatagtgatcacaaatcaaccaacatcaaaattacacttatcaaatagaacatgaatctaaaaaaagataagaatactaacaaaatcgaaataaatgagaactaaagctcctcacatccttcttctctgcacatgtcaagaatatgacgtatattggcggtggcgttgatacaccaatttgaaaccaaccctaaacttaaaaaaagtttaaacgagatgaacacctctctatttaggagctcgttaatatcttgcttagacgtcacatgagattgatggtacatgtcatggagtaaaataaaatcttctcttctctgtgtctctgatgaggtcatggagtatgggtagctttatgataaaataggaacttgtttcagagtatttagaagtaagttatttctattttctatcatgaaaacatttcccaattttgaatatcttttatatactctcatggctgtgtttatcaagatcatcaaaggcgttttctttttccccaccaaaggctccttcatcaccaccaaaggtaccatcaagatcaaatcaaattcaaatggtatcaatggctccttctttcacctcactactaatgactttttcttcttcaccaccaaaagcctctccttgcctctccttgccaccaaaagcctctcctcggctctcctcgccaccaaaagcctctccttggctctcctcaccaccaaagccgaatcgtttgctctacttaccactatcaccaataaagtcagttatgtgtttcaaaacaaacgaggaaggggaaataatagacttctttgatatatttattgaccatttggtctcaaagaatcatcacatccttacctgaagagagagcgtgaagtatggttattgggttgagttggctttagaagcactgtttgatattgaagttgagtttgagtctagtatggatgaagataagatgaaaagtaaaagttgatttttcaaaatgaaaagtgctccgtttggtaatatatatatcttggagaaagagatagtctatatggagcgtgaagaacttttagaaaacatttcttatttcaatcttgtggagcaaaacaagaagaatggtcttcctcctcctcaagaaagaacatggaagtcactagagcataaaggagtcattcttccattgccttaccaaaaacacaacgttccccttatctacgataaaaaactcttaagaatttccaatataaactaaaacttcatactaaaataagatttgttttttctttcaaacgtaataaagaacacaaatatgtcaaaaaaaaacaatcgtgatatgttgataagaaaatatcaaaactatggtaaattttaagattatttttatagtttatttttttttgataatttcataaattctcaacttcattttttcttttattttcttcgttttaaaataaattctcagattttatttagggctcaaaagatccaagtatgaggagtattatttacataagttatattaagcggtttagtacgaatttttcgtgccaaattgttcgccttaacatttgtataattcaaaataccgaattaaaccaaatgtttttctgattcgttaagatatttgtaccaaaaaaaagaaataaccattttatttaataatcactaaaaaaacataagcttaaacttattattataaaaaatctttaattaaaaacctaatctactataaataggaaaattcaatttttcttgaccaaaagaaagtataaaaatacataaaatggcaagaaatctcatatgttttaatcccgaaagtataggtgataggatgataccctaattttgactgtaagaaattaggggaaatccattttgttaccaaaatctcttatcatgtttcaattactttaaatgcatgaatacatgccaaagattttgttattaacaacacaaacacttgattatatatctccttggtataatatacagaacagacacaatcttaggctcctccttctctcgctctcttccctctgttgctcggaaagctttggcctttttggttttcttatggctaattctcttctcaaaactattcgtatctgagagagattgagataataaatatagagagagatccaaaccagaagcaatctttttttgtttgtctctctgtgaagattcgtatcatttttctccggcaaactaacggcggcgatccactcttctctatagcttctattatgttggttttatcttcttctttggaagaaatgaacaagtttggttttttcgctttcatgaatgtgatccggtctatataaggtttgtatatataatcaaaatctagtttttgatttttgtttcgattttttggcgatagatctggtttgtgtttgttgtttaagagagagggaagtttttgaatttgtgattttaaacttggcttgttttcagggtacttagagtttggtgaagcttgaatctaagagatgaagagggttagagaagaggtttacgttgaaccacaaatgcgaggacctactgtttcctctcgaggagaaacgtaagctgtctctctctgttgtcaattcaaatcgtattcgttttgaattgtgtgttttttataaggaagtcaaaagtgtgtaggttgatagagattcttattgcttgtttttgcttgtggggatttgaaattttcatgctttggtttgttttctaggttgagtttttatttttgaggtctatgattgttcttaagttagttatccttataggctaaaacataattactgtataagtgtaatgaatttgattttatgacctaaatgcgtattaatatatgttggagtaatgcagaaatggtaaagattgatggaggatatatgtatcgaaattgtgttatcaaatttgcagactgatagatattcttattgtctttctcttctgtggggatttaaatttccatgctctggtttgttttctaggttgagttgagttttctctttgaggtctataattgttcgtggtttagttatcctcctaggcttaagcaaaattattgtagcttcgtaggggaaaaggaatttaatatttctacgtaggtgcgaaaagcaacttaatatatgttcgtgtaatgcagaaatggtaggccttcaacgattagtggcggaggaacaacgggagggctaacaacagttgatgctttgacatatcttaaagctgtgaaggatatgtttcaagacaacaaagagaaatatgagactttccttggagtcatgaaggacttcaaagctcagaggtaaatgtcttcttctctcctccgtttgctgtgtgtcttcttacagctggaaatgttctaaatttttttgcgtctcatgctggttgtagagttgacactaatggcgtcatagcaagagtaaaagatttgttcaagggctatgacgacttacttttgggttttaataccttcttacctaaggggtacaaaattacccttcagcctgaggatgagaaacctaagaagccagtggatttccaagtagctatcgaatttgtcaacaggattaaggtatgtatctgatgtatttatccagataccaaatttagtcatgatctaaacagttattcctccaggcgcgatttggaggtgatgaccgtgcatataaaaaatttctagacatcttgaacatgtatagaaaggaaaccaagtccatcaacgaggtctatcaagaggtatatttacagtaaatgggtatagtgttgatttgcctacgattctgcctcactcttttttcatatatatagccagattttcttgtgatttgttttctgatgatcatcaattctacaggttactctgttgttccaggaccatgaagatctgctcggggagtttgttcatttcttaccagattttcgaggatcagtttctgttaatgaccctcttttccagaggaacacaataccgcgtgatagaaattctacatttcctggcatgcatccaaagcattttgagaaggtttgccttaattcattctttctaaaagattcacatatctttacaacgtagtttatgatgtttctaattgatgttcgtggtagaaagcctgcattgtgaccatgcatgctttgtatggaatgtaataacatcctttccctaattgttctaagagtgataaattaaaagcaagatatatataggaattaagatagtttacagaatagatgaaagaatatatgtttaaggaacttgatgattctgagtttgggtgagatgttgatatggactctttcctaccacagaaaataaaacggagtaggcatgatgagtatactgaactctctgatcaacgagaggatggtgatgagaaccttgtggcctactctgctggtaattctctgggaagtgagtatttgaatcacctgtagcattatttatttgcattgtttaattattattgcttggctcagcgcctagtgagagcatgataatacaaatagatgtcttctatttttcagtgattttgatatgaaagggaaattagtatatatatctacgtgacatattgccatcttctatactgtggttattgtcaatcttgtctctgcttatcgactggtcagtagttacgtggtgctaaggtccaactatgttaatgtttgcagaatcccttgctaatcaaggtcaatggccaggatatcctaaggtagaggacaccgaggggattcaaatttatgaaagtaacgggggccatgaaagagatccagacatcggaagtcaaaaaaatctactgtctacaaaccatatggccaaggcaataaatgaactggatcttactgactgtgcacaatgtacaccaagttatcgtcgcttgccagatgatgtgagcccttcttaaaccttaatgttattatctaccatacttcaatatagcgttgattttgtgctctataatcatacggttggctttctcttgtgtagtatcctattcagattccaagctacagaaattcacttggtgaaaaggtgcttaacgatcattgggtatctgtcacatcggggagtgaggattactcattcaaacacatgcgcaaaaatcagtatgaagaaagcttgtttcgatgtgaggatgataggtaagacgtatatagtatatattaggttcctgtatttctttctgtatttaaactggagtctttcaataacattgggagttcatgattgttttctattcagttcagtcttcccttctaatttcactaagttgtctgaaacttttgtggataatattgtggggtttctctgctgacaattgaattcccaaagaagttctacttccatctgatctatcaactaactgatatggtttcaggtttgagttggacatgttactagagtctgtaagtgcagccatcaagcgtgtggaaagtcttctggaaaagattaacaacaatacaatctctatagagacaccaatttgtattagagaacacttatcaggcaagtagttatcttatcaaatctggctgtgataaatgttactatgtatgtttattattcttttactttgcctaatgaccttatatgtgactaattgatagagctgaacctaagatgcattgagcggttgtacggggattatgggcttgatgtcatggattttctgaagaagaattctcatatcgccttacctgtgattctaacacgcttgaagcagaaacaagaagaatgggctaggtgtcgcgctgatttcaggaaagtatgggctgaagtatatgctaagaatcatcacaaatcactcgatcatcgtagtttctatttcaagcagcaggactccaagaatttaagcacaaaaggtaagttttctttcaggactacaagttcattttgttttgactttgaacctaatttaggttaaaaacccattcatttcgtttggctacagttgaagctccatagaagattttgtggatatttcatattagcaatttctttctctacagggagagttcttaatataaaagcgtcactgattgttagaagaaaaaaatgatgaaacaaagagaatatcttgtatcatttaagtgcaagtttgtgtcgactaaagttggttgttatgtcccaaatgcaggtttagtggcggagattaaagatatcagtgagagaaagcataaagaagacctgcttcgtgccattgctgttggaactaagccctctttcaccccagatgtggagttcatttatactgatacaaaagttcatactgacctatataagctaatcaagtattattgtgaggaaatatgtgctactgaacagtcggataaagtaatgaagctatgggtaacctttttggagcccatgtttggcgttccttctaggtctgaaactattgagacaatgaaagatgttgcaaagatcgaagacaaccaagagcaccatgatgcaagtgaggcagtgaaggaaaatacatgtgacggttctatggcctcaaaccttaaaccgttaacacctccaaaaatgcctaacaaagaaaacccaatgatacaaggaagctcttttgcgcaagatttgccagtcaacacaggagaaagcattcagcaagataaactgcatgatgttgcagctataactaatgaggtaaccgtattgtttcttcctgagtacctttgttcttgacctgaggccgtattcacttttcactgagtaaatatagtcaaaggttcataaatctggactagtggtggtagagcgtattttactgttgggcaataaatgaaagttgcttaagttttcataatattcctgtatgtgaaaaaagatatttccttgatatttgtttttgtggttctacaggatagccagccttccaaactggtgtcaaccagaaacgatttgataatggagggtgtagagaatcgtagtagggtcagtgatgtatcaatgggagggcataaggtcgagcgagaagagggtgaattatcccccactgaaagttgcgagcaagaaaatttcgaggtttataaagagaatgggctcgagcctgtgcagaaactaccagataatgaaataagtaatacagaccgagaacccaaagagggtgcatgtggtactgaagctgtaacaaggagcaatgccctccctgaagatgatgataataaaataactcaaaagttatcagaaggggatgaaaatgcctcgaaatttattgtctcagcaagcaagtttggtggccaagtttcttccgatgaagagcataaaggagctgagagtgaaaatgaggctggagggatggttaattccaacgagggtgaagatggatcctttttcacattttcagaacggtatctgcaacctgtaaagccccttgcaaagcatgtgcctgggacactgcaagcaagtgaatgcgacacccggaatgattctcgagttttctatgggaatgattcactctatgtgctttttaggcttcatcaagtaagtgctacgaaacaaccttctcatgttcctcaaatgtcaattgtctcagtccaaaccgctaattctgctgattttccagatgttgtacgagagaatacaatcagcaaagatacattcagagaggaaatggaaagctccagatagcacatctactgattcttataccaggtggtttattttctaagcatcattggtactttttaattgaaaaaatattatttcctaactgatatttgaaagcttaggttcatggaagccctttacaatttacttgatggctctagcgacaatacaaagtttgaagatgaatgtcgagctattatcggagcacaatcatatgttctcttcacattggacaagctagttcaaaagtttgttaagcatgtaagcttccattttaccttgttatcgtcttgactctgcttctgttctctctcctttatttttgtttgctccgcactaatcatttaagtggcttggacatgcttcagcttcacgcagtcgcagctgatgagacagacaccaagcttctgcagctatatgcatacgagaactacagaaaaccaggaagattctttgatatagtgtaccatgagaatgctcgagcccttctccatgatcagaacatatacaggattgaatatgtatgcttctcttgatatgtgtggatacctgtttatatgttcccatatactaatctgtatttgcaaatttctgtgcagtcatctgcccaaacccgtctcggaattcaacttatgaacagctggaatgatcagcctgaagttacagctgtaacagtggaaccaggttttgctaattatctgcagaatgactttctttcgtttgtcagtgatgaagagaaacccggactatttctgaaaaggtgaatgaagcaatgattagagcataaccttttttcgtcttcagttgtggtagtacagttagtaatcaccttagcatactcttttcaggaacaaggcaaaattaagtggtccgggtgaagaatctctagggatgtcacgtgccttggaaggattgaacattatcaatgaggttgaatgtaagatagcttgcagttctttcaaggtaaaatactttcttgtgaatctcttgcactgataatcttttctcttttcacatgtatatatgattgatgagagtttacaatcttcattaggtcaagtatgaaccacacacagcagatcttttatatagaagaaagcagaagaaagcaacactgaatccaactggacctgaaaatgttaaaacctctgatagtagtgaactctcgagaaagaaacgaatatcgcgctttcacatgagtcttaaccgcagacttgtcgccttgccttaactcaagaacgccgtaagtaaccctcttgtcttttatttgcctgtggtgatcaatactgcaaatcatcaataatctctaactcacgataaattgtgcaggtgtgaagttctttgctgagaatgagatatgcaagaatgagtagtagtagagagagactagagaataactgtctttgacaaagattcttgcatcattttaggctcaaagagattcacatggcaacaaccatagtttttatcttctacagtctacactgcagctggagccgccagttttgctgtatagtgttagaatatcttttttttttttaaggatgatgctaaaattggatatttttaattcattcattgaacaattattgaattttccttctaatgttaaattctctttcaaattaataatctctttaatcacatgttttatttatttattttggtttatccatttggttatttatctttaatcacatttgagtttgattatataatatgattttaagagaatatgaatatatattgactcttttatcacaggtgtcacgtgactcacgtgaggctgtgtacggaaaaccttcttatcctctcagagtctcttatattaggatcgctatctactgcttcactgaaattgtcctctcagttcctacgcgaagttttcaacagattcgccggagaatcttcgaatcaacggcggagaaatggctctatcacgcctctcatcacgatccaacatcatcactcgtcccttctccgccgccttcagccgattaatctcaacggacacaactccgatcacaatcgagacttcgcttcctttcacagctcacttatgtgatccaccgtcacgctccgtcgaatcatcgagtcaagagcttctcgatttcttcagaaccatggcgttgatgcgacgtatggaaatcgcagccgattcgctttacaaagcgaagctaatccgagggttttgtcatctctacgacggccaagaagctgtagctataggcatggaagctgcgattacaaagaaagacgcgattattactgcttatcgtgatcactgtattttcttaggtcgtggtggttcgcttcatgaggttttctcagagcttatgggaagacaagctggttgttctaaagggaaaggtggatctatgcacttctataagaaggaatcgtcgttttacggtggtcatgggattgttggtgctcaggttccattaggttgtggtattgcttttgctcagaagtataacaaggaagaggctgtcacatttgctttgtatggtgatggtgctgcgaatcagggacagttgtttgaagctttgaatatttctgctctttgggatttgcctgcaattttggtctgcgagaacaatcactgtaagcatttttgcttctttctttctttctttctttctttgtaggtttgttttgtcgtagtatctgattgaatttgatctgtgcagatggaatgggaactgctgaatggagagccgctaagagtccatcttactacaagcgtggtgattatgttcctggactcaaggtcagcttttgaatcttatttgtaacaaggattgatgtgtgaggcttgttaagatgagaaagggaagttttgattgggtagatggattagtgtcatttcctgaatgatataagtttcttagtttccatatagaaacaggtagaatgcaagtcttaagtaacttactactactcagctttcatttataacctctcagtttagagatgaatgtgactgtcttatggataatgattgtcatgaatcttctattgttaacagagatatggtgtgcatcattaccttgttcttattaggtttcttgtaacctgcatcaagttagcaactttcttttgagtttgaccggttgctggtttgtatggataaacaggtagatggtatggatgcatttgctgtcaaacaagcttgcaaatttgctaagcagcatgcgttggagaaggggccaatagtaagtttgtattttagtattatcagacgttttgtttttttcccctttggtccttactcatctggcgcattttgtaaatttgctatgagcaatatctagctgtcctgtaggacgtgaagtattaatctttccttttgcattttttagttgatatttacttcccttcagttcctctttttggacactgcattccagtagctgaatattgatggggtggctggttctttctgtgcagttgcaatagaaattacgctgtatcagtgtatatcaaagaagtgtgtttttgatatcgctgttgttcatataagtagtagctttggtttccaatttattttcctgtgtttattctttcctatcatatggattacagaagcattaatacatcgtttcttctatacagattcttgagatggacacatacaggtaccacggtcactccatgtctgatcctgggagcacataccgtacccgagatgagatatctggtgtgaggcaggttcgttagtctctttacctgaaaaatcatttcttggtcgaggactcagctattgatgaaatctcaaaagtcaaaacatttatgtgctactctatatgactcaggaacgggatccaattgagagaataaagaagctggtactatctcatgacctagcaaccgagaaagagcttaaggatatggagaaggaaattagaaaagaagtagatgacgccattgccaaagctaaggtaaaacaacagttacattactactttcaaagcgtaaactcgagacccttatgcgaaaatctctgtaccgtttcaggattgcccaatgccagagccttctgagctctttaccaatgtgtatgtgaagggatttggcaccgaggtacttcactaattagatattcatattgcaccacgccccttgaaactatagttaatctttcttattgacccatttgttttctgttggcagtcatttggacctgacagaaaagaagtcaaagcttcccttccatgatcatggagctcttgttcgttaaactgccacgtgtcatgagaaagttggctgatagagaaatctatgaatatgaataaagatctgattgtatactctctctctccccccccttctgaactttaatctctctgtatctttgtttacaaacataaggagaaacaatgttattcttgtgaagctttagtagtctcgtgtttaatattcaagcaatcgagttgagatctcattttgtgctgcactccaaataatataacaaattgaattacaaacaaaggccagtggaatggtttcttctgtttgtattcttcgtctttcccaaaaaaaaaaaagaattcaactttggcgtaaccaatccatgaacccgaaaaaaaaaaatcaacaaaacaggtaaaattgaaagaaccatcttcaaagaacctaatgaatatttttaccaacaagctcccctatcattctgtatatacataataacaaatgtaaatgatatttttttgcttttctggttatcaagattctgagtctgagtcacttgaactgctgtaccttgaactctctgacatgaaatttggaggcagaattggaaatctaactgcgttcctttgcggtgcagcagcaacgctcggagtttctgctggtgaacttgatgctcctgctactgttgttgcaggtcgttgttgctgttgtttccgttgattccttgcgatctcactacatgcattatcaaccatccctaagaaatcacggattataacaaacagttgaaacaggttcctctctttcaatgctccagcttggtaatagtttgtagttttcttcactaactccattatcctaagctgttcttccgtaataactttcagttcttcctccgcagattcaaagaaagatctcagctttgttaaacacccatcttccttccctttgctttggtctaaaagacgttttgtttctttcactcgggtgcctaaagccaaggtcgtagctacaaacgaatcataatcaattccagccgctttcttcacattagtgaactctgaacttaagccacctataatgggtaaacccatcttaataaattcaatctcttgttcttctctagacatatctgcattctcgccactaccattatcactagacatcatgttcttattcattgcagctcgctttccttcagaccttacaacttcttcaacaacaaaatgaagtaaggtagttttcgcatcaacactcttcacatcagacaattttcttaaagctgtcagattaaaagcctgagcatttcccctcgcggttccagcgttcattctattacctgctttcaagattgcttctagcagcttcatgaacagcccacgagcacggagctcgttgcacgcggattcaagtgttagtaaagatcccttttgttgagcaacctcagagccgtagttaatcttgaaaagcataacgttgaaccggttaaacgcggaaggaactgcttttaagatgtgaaacagtagagaatctgcataagccaatgtcatcggttcaccatcgaaatctatgatttctgtctgttcttctggcgttggagctattcctgcaagcttctcaagggtatcagactcagcatcatggccttctgttaacaagtcaatgatctcttctttagtcatccccaaagatttaagcacaattgctttgttctgagatttccgaggatcaaggatataagtctgattatgcggtacactgtttgagactgtctgattctgcggtacactgtttgattcacttggttttcgagcaacgtatccaaacaaagcctccatgagatcaccatcaaagctacccaagaaacaaatattataaccgcataagaactcaaaatcatacagtacttaagaatatcacattccacattatatagactttaatacttacttgaaggagccaccatcaatcttgtgccacaccatagaacggcttgcatcagggttcatcttatcccaatgtaaaggcttgagcttcggctgcgtcggatcctcagttttgcctacggccaatgaagtctcacctgactttgttggtccttttggattaccagggggtttaggtgggcccttcttcgacattggaggaggtggtggcggtccagctcctttcttacctggtggaggaggtggtggtggtgcagcaggtccttttttaggtggtggtgggggaggtggagccgcagcagatggtggaggtggtggtggtggtgaagtttggtttgctggaccaggcggtgctggtggagcatttgccgtggtgaattgacccggagtaagcggtgtcgatgctgacaatgccgcattaccgggcatgtattgacccggaggaagcgatacaggctgtgtggatgtcgaaaatggcgcattcaccgcagtgtattgacccggaggaagtggaacagacggtgcggatgtagacaattgcgcattcaccgccgggtattgacctggaggaagcggtgtcgatgaagaaaatggcgcatttcccgccatgtattgacccggaggaggcggtgttgatgaaggaaatgacgcatttcccgccatgtattgacccggaggaggctgtgttgatgaaggaaatgacgcatttcccgccgtgaattgacccggaggaagcggaagtggcggagaacggccaccaccactatggatctgcgacggagaagagggaaatgaaccgccgccaggagcttgaaatttggattgagattgttttccaccaccaccaccaccataatcactaccggcacttgtagcataggaagttcgcgacggcgaagcagcagatgcagaagaagaagaaggtcgtgacggagaagcagaagaagaagtatagtatcttcctcctcctcctcctcctcctcctccaccaccaccattattactctgatctctaatttcaccacctgacgatgacgcagattgagattttttcacatgaaacgaaaacgcctcttcgatagattcatctcctacttcatcatcaccatcatcgttatcgtcttgatctgctccagttcttctaaatccgtcaccggatttgtctcctcttcttctaggtttagggttttttctaattttcccgctattttccaactctagaagcttcttccagtaaatcacatctaatccttcatcatctacaataacagctttgagattcccgtcgattcttacaaaatcctccgggaagagaaatccccaaggagacggtggtggaggtaaatcggagccggagccgccgtatctctcatcttcttctctcttcccacctcgatctgagtgacgaccacggagtttttctttgatcttcctccgtgaactactaccgttcttacggaaaagaaacgacatcgcggcggttactttaccggagaatttatcggcgttgacggagataagagtcacgcggcgaaatcagaacgttctgatgtatttttgacaacgaagaagaaatgtgttgggaatgatttttgatgaacatgacaaccattaatgatttaacacattaatgatttggtttttatgttttcctctcttattttttggtaaagcaacaaaaataaaaattaagcttttcttacatgagatatggtccaatgtcaaaagcgtggctaatgttacgaaaacaacctccatttactcggcattgacacgtgaaacgacaagggcgttttcgtcattttgattattccgacgcgttgaccaggtcgtggattttgggggttagtgtccgaatttggaacggaagatgtcttaatgtttgacttctttgatctaaatcttcggctacgcgttgacttttatgtctttttcgtgagtatgaacgcaaaatcaagtcataatttatgttaagagtaagttatatattcatacatcttttaaacctaccaatttactagttctttatacagtgttctaagttctaaccaacatgtgacctttttgcagttttgtgctttagaataaatgagaattgtaatagtttgggtaatgtggatgttctagaagaaaccgaaatctggaagagaaaatcggaagtgtaaatgtaattttggaatgtttgacttttgtgaatcgttgttgcttatcggtagttgagaagtagaggttattaaaaaccattttggtcccatcttcatctgttataaagtcgaagaagacttctcgaaacttttttgtggtaaagatttcgaaatctttagtatttgacattgaagcgatgatccttaattttaaagggtgtatttaatggacgacatcaaaattttgataattatgtttaagaagatagccagtttaaacgttgtacttgttagtaaactaataaatgtactagtctagtatcaaatagctatgtagatcaagacgctcacgtgtaagaaatggtaaaaaaaaaaatggattagttgtgctacagtagtttcatatcaatacatgtgataatgtcactactatactatgtgacaaatattgtaagatagtatgtttaaaatgatgtgtgtatactcatgtacctttctataaataataccattctatttatatccatgaacaactatagtttatgttatgtataaaaactacatttttatgtatgatttgataaacgacattgtataatgtaaaaacaaatttggtcgtcgaccatactaactagggtaactaggggcagtcttcatcatcagcctcctcagtctccataaatttttttaaagatgtaagtacaaatttgtataacttccattataatctataatgtgctagctactgctactttaacaaataaaacatgaaatgaatatatgattcttttgggtgtgattttatgctacagaaaaagcatttcttaataagaaacaatacgtggacatcacaccatcaaacaacgttgataacttgtacttcacaaattacaatatcggtttcttatactcaaaaacattaatctaagattcagacgagatatgataatctatctaatgatctaatgctcctagacaaaagtaaatgtatgctaaatactatccaccaccacgcacttcgagatttggaaattataatatgttttgaattagtgggcctaaacaaaagtaaatgtataactagaccaacaaaatttgacaccttacaaatagtgtgccttgatgggccgagcaaacaaaaaggtgtatgttatgtttatacaaaggctcattgctttcattgtttaaaatgttagttatctttgattttcatatgcaagatttaaagatgttttatttgggttgtaaactggaaaataattttccatggaaaccactttggcccattgattgattaagaattcattaatgcttttacaccaagaagtttggggttcaagtcccacatacagaaatcagtaatcaaaagaaaatgtttcttcctcgtcttgagttttcttacatggtatacattgtctagtactactaatttattttcatattatagaagacaaattgttacaactattgattaattttctatatgattatattttctctgaataaaattaaaacttttccaaacaaattcatgatttaataatcacaaataacataacacggatttaaaggaaaaccctttaattattacaaaaatcagaaaacataataaaacataacttcaaaatttaaattttaaaatgataaaaacagaaatacaaattattaaattcttcaatcggacaaaaatccccataggactaaggattatttgtgatgttaggcgcacaagcatcagcggtggtagtgatggtagtgagacgattagtttcaaactggtggtggctgccatccatggaaggaatgtccccatcctctttaacattaagatcttgaagaacacgaggaggtaaagaagaagaaggctcaccattcttcttaaggtactcaatcctgcttttaaggctatcgagatagtcatcaataacagaactcaaatcttgaagatccttttcaccgagttgacacacatcaatagttccttcgatacaaccccacataatttgtcgagccctcaaaactcgattttcatcacgcagcttttgcaattgcgcttgtgctttttcaatcctctcacgcaaaaaagcctcttgatccatctttttcttggtctagtctttgttatgggtctttgttttattggcatgaagattgtttatatagtaaaggaaatgtgctatgacccattagggttttaatttccttgttggactcatttcttttagataacattgaatttcggatagcgtatctattccactcctacgtgtacgcatgtgattgagtataaaacgataaccttttgatttaaagataaattgtaatctaatctatatattataccattagaggatgcaaagaccgaaaatcgaggtaataaaagcacatgaaaacttgaggcaaataagacaaaatatgagttatatttttatttaggagattaccttaataggaagaaaatcacactaaagttaatttataatatttatagagtgtatatatttattgttattattttttatattaatataattaatacaaaacagtaaaatagatagccttaaatgaataacaagaaaaagttaggtgataaaaaagaaagaaggatttaaaaaaaaaagttggacagaagacaaaatttagataatgtaacgatataatatatgttatcaaaatcatcactacggaatcatccagactctccattttggttcaacgattgtttttggcttaggcatttgagaaattggcttagacgcatgattaattgaattaaaatagagtcaaaatcggattattttcagttaaattctggataactcaaaccggatgtataattatcggttaacaggttggttcaattggaagcgtagttttaagaacaaatccgaaagtacgtgtagttttatcaaaattaaagttttttataatggttttttaagtggctaaaagtttaaggtggaaagttgagattccaactagtatagggcggaaaattcagacaacccataatcaaaagaaaaacatttttcctcattttgagttttcttgaatctaagtttcctttggcataaatggtctagcactattgaattatttttcatattttagaagactaaaactgttataactattaattatttctgatatgataatattttctctgaaaaaaactaaattttttccacccaaattcattacttagtaaatagatataacataacaacaaatttaaagtgaaaccctttaattattagaaaaataagaaaacataacttcgaaatttgaactttaaaaatgataaaaaaacagaaatacaaattattaaattattcaatcggataaaaatccctataggactaaggattattggtgatgttaggcgcacaagcatcagcggtggtagtgatggtagcgagacgattagtttcagactggtgatggctgccatccatggaaggaatgtccccatcctcttcaacattaagatcttgaagaacacgaggaggtaaagaagaagaaggctcaccattcttcttaaggtactcaatcctgcttttaaggctatcgagatagtcatcaataacagaactcaaatcttgaagatccttttcaccgagttgacacacatcaatagttccttcgatacaaccccacataatttgtcgagccctcaaaactcgattttcatcacgcagcttttgcaattgcgcttgtgctttttcaatcctctcacgcaaaaaagcctcttgatccatctttttcttggtctagtctttgttatgggtctttgttttattggcatgaagattgtttatatagtaaaggaaatgtgctatgacccattagggttttaatttccttgttggactcatttcttttagataacattgaatttcggatagcgtatctattccactcctacgtgtacgcatgtgattgagtataaaacgataaccttttgatttaaagataaattgtaatctaatctatatattataccattagaggatgcaaagaccgaaaatcgaggtaataaaagcacatgaaaacttgaggcaaataagacaaaatatgagttatatttttatttaggagattaccttaataggaagaaaatcacactaaagttaatttataatatttatagagtgtatatatttattgttattattttttatattaatataattaatacaaaacagtaaaatagataaccttaaatgaataacaagaaaaagttaggtgataaaaaagaaagaaggatttaaaaaaaaaagttggacagaagacaaaatttagataatgtaacgatataatatatgttatcaaaatcatcactacggaatcatccagactctccattttggttcaacgattgtttttggcttagatatttgataaattggcatagtagctggatgattttagtttttttttttgcttaacagcaaatcagttatattatattatagaaatgttacctgatacatgaaaccattcaaatacaacaattgaaccaaataaaggaagtaaaacataattttgatgaattggtggatgtaaccctgcttttcaaatggaagccttacatgcaacatataaaatctattaagtcctctcgtcatatactcgtaaaaggctaacattttatagatgaaactctcaaatatttttaacataactctaattaaacaaacatactgaaatgttccttgaaatggttttggatcatgttttttataacatccttgccatcgtggcgggttagtgaccatggttttctttctcacataacatgaatagtctaatcggaggacagcgagggcatcatcatcggaccaattccttcaatcgaaaaaatttgtttattgattccttaatcaaatacccaaatgacttccccaaacaatttgttaggagaaacttcatcggttctcaaccggagataacgtcggtgaactagaccaccggaaacaaactttataactgattcatcttgagtgaagccaatgcatcgaaagaaaaattatgaatgaaatgtcttcatgattggaggaaattgctggaaacataattgtttccacttaccaacaaatgaattctcaattgagacttcaaaatcaactcacttggatagatgtgtattattccttactgattttagatctgccatcaacactccatagaccaaaaattgcatcgagaacatcgaaggtctaccttgatatcttgccatcatcatcaagtggaagagaacatataggataaacaaagttctcaataatactacatccatctatatgtattgtaaaaaatacaaacagaaattaagaaaggacaaacgataaaataatagcaaggagtatggccgacgccggagtcaaagccagccggagaagataacggtttagaacctttaggtttaggttatgtcacttttgaagaaaaacggtttacaaaaaatatgatgttttaattacttgttaattttagttatatatttataaatatatcgatgactaattaattacctagaacatttagtcataatgtttaattagcgtttagcgatttttgaacattagtaacaaaaacataaaatactgtgacatatgttattgataaatttatataatatgatttaaaccaaaaatatacttaaaatgtttatattcataatgttataatatattttatgggggatgatataagtctaaacagattttaataaatattattagagtaaattaatgtaagtgtagtttcgaaaaggggcaattctattaataattttatacatcatttcttaattaaacattaagatttgcactatattacggaaactacgagtgatcttgtctttttttttttttttttcgtctctacgagtgatcttgtcatgaatataaaatgtacatttaagtgctttgaagaaaagttttcattaagtaaaacaaaaacttaacatgttcgttacttaagcctataaaagttttacaaataaactagattttaacctagaatgattccttcaatttcttgtactcatcaggctctagtgcattcttgactaccttcaaaacagttttctcaaaagaaaacttcgatagtcttgtaatatatctatctctgcgcctagtgtgtccagtcttgaagggaggtatagtttctttgtaacatgactaaacatgcctttttttttttttttttgtacgctcaaacaaatcatgtacgctgtcatgttatatgtattaagtagtaaataaacttttacaaaaaaataaaataacaataatctaaaaatactcaaactaaacaaaacaaaagttgaatgtaaatactctctttgtttctaagtaatggatttttgagaattttcatacatattaaaagttgattataaatatatcattttgtgatttacattttaatataattctaaaccaaatatattcaattatttttcttgaaatttacaatacatcaataataactagttgcataaaaaacctaaaaacttcatatatgtttaatcagtttttttttatgtagagaaactactatttaaaaacagagggaatagaggcaagtggaatgtaccgcattttctgcttttttagtcaaaactcaaaaccaaaatataaaaattcgaatgcttataaaagttgggaaattttgttttggaaacataagttacgacattctaaagaataaagagaaactttgcctaaatctcatttaaagtacttttacaagttactaagaaaaatgtcattcactgttttttgttttgcatgttctgtatagaaccccaattaaaaaattgtagaagaataattggccgtaccttaaggggacaaaaacagaaatcaaaatgagaagaagataaaagtagaataatcacatgtttagtacgccaaacgtggggagtatctttgagctgattctgttgtctacaatgattatttgattttgattcattgcatttgcctatcaattttctttaatatccagtgcctccttctaagttccaatgggtaatgtaagggtcttgctaatataataatgccgtacgttattatattattcgatttgatccttcattctgaagaaagttcaaaatattatatgcatcctctttttaaatagatattgtggtcgtggtgtgaatcaaagatatgagtttgtgagtgattaggagctaaaatgtatacttaatgtttttagtagacctcctaagattagatatgaatccataatccccatgattacatgtatttggacaacattttatttcttctaatttgtagccatgcatgaccacataaccttgagttagatatgattcatatgaatcataattaatccccataataccatggttattcaaccgttttcatttctaattcgtagccatgcatgcgtgaccacatggtcatggtttagcgacatgtgattgtgaaatatgtggtcgtagtcaccaacttagccactacctattcaatgattaaaattaaaaagaccaccaacatgttcaacataagttgttagttattataggtgtaaatattacaagccgagtttcaatagtatgtgtagtttgcaaatgattttattactattttgtgtagtcttctctaatagacagttatcacacaaaaattagtggtagctagagtaagtagttgaaaatattcatagaagccatgcggaatatttgagagtacattttcaaaaatatatcataataatacaagatttggttcttaatatcaaagactatagattaaagaaaagtatcctcaagtcggtacattattggatatcatactatcaaataaatgctaatcgctggcaaaatctcaaaagtgattagcagacgatatgaatacacagaggtaaactgtcacacattatttgattattatgatattattagaaatagaaacattatttaattttaaaattatcaaatatacgtaattaaataaatacaatacttgtttttataaaagttccttcgtgagcaaagagaccccacgtgcaacgatataaaaagagagagagagatctataagtataaactgacggcgttcaagtcaacgttgcagtcaataaaaccgtcaaaagtaaaaagttaacggagatcgttatcacacggatctctctaagctaatccgggactcctcatcggcgaatccacaagcgaagttgcagactccggcgacattgtcaacgaatcttcatcgtcaaccatagacagaggcgattccaccgtagagtccgaagattccatcgaggatgtggctgagagcggaggcggcggcggtggagtggtcagcttccgtttgtttccttcggcggcgactttaacgtctctcgtcaagtaactcctcagacgtttcacgtcggcgagtttcaccggttttagtaaaaaatcctccgcaccttcttcaagacatctacaacagatttattgattaaatttccgatcaccaaaatcggaatcaaaaaaaaaagattccggcgagagatttgacctgtcgatacgagtcattacattctccgacgacataattacaacaggaacttccttaaaacttgtcgattcctgttttttaagaaaatcaagaattgaaaaaaaaaaaaagtaacagaatttgtttttatggcgggaaaatttcagaaaccttaatctttttcagaagctcgtatccagtcattccaggcatacagtaatcagtgatgatcaaatccaccttcaatctctggtaaaaataaagatcaagatcagaatctagaatctcaaaatgttttaaaacagagttatgagagattacatcgaattcgacggcggctttgtcgtcgtctaatcctaagaattcgagagcacgccatccgctatcaaccgccgtgactgcattgaatcatcgccggagaataaggcttttaaaatgttaaaggggaaagaggaagaattactagttaagaaacctttgcaggatgtgattcgaagcaatctttcgatgactattcgatcaactaggctgtcatcaacggcgagaacgtggacttgatcagaatctagcggcggagattcaagttctccgattcctataccgatcatctccgaccttcgtagacaagaaacgccaccgtctttggccatagtgagaaaagagtaggaaatgaaaagatagaagagagatattgctactagttcctctctactttgttttatattttcgttgttatactcttctatatcaaatctttttataggtggatcattttctacttcatttcttttacaaaatattttcttattccaagtgacgattaatgacacaaaacggtacgtacctttttttcttttttgggatgggggcagcaagaaatagcgaactaatctgaataggtaaagaaagataaattcgaagttcatgataagatatagatagaaagtaccggttttgcttcttcttacttttaggattggtactaaatagatatacttggattaccaaccaaacccataacaagggttgtttggtatgtatgttactgatttaatgttcaaattcgtctttttgtttctcacatgtactatgcttttgttgttgttgttgttgttgttaaaaacacatttactatgttcagaaaatgatttttattttcttctctctattttgatggacccttgagcttaatttgaagaaaaatctaatgcatagctatgtcttgtctccacttataaatacaaactcttagaccatcataaaatatgatgaccaaaaccataacaagtaaataaaaaggtttatagacaaagtgaaagaaacataaaatccaaaatcaagctttcgttttctatcagaaatcccgttcagaaagactttatcgcaatgatgaacagaggtttttcacaagatattgtacatatcattatgtgattaatttagatgtttaaagattttggggtccatgtaacatgctttgaaagaagcttaaatattaaaaaaaaaaaaaaaaagataaaagaaaaggagaaacatttcaaactcaaaattgctcttaaaagacttgcatattcacaaaagaaaaaaataagaagaaacatttctcaaggttataaattagaaatgcaactttacaaactaaataatcaagacatttattttacaactacaacatttatgaaggttatacattggaaatgcaacttaacaaaacaaattaatgcaactttacaaactaaataatcaagacattatattacaactgccccataattcacacatagtgatcagatctcaccgtcccacatctcggtgacagattttataggacctttctccgagatgtaaacctctccgtcaacgatcctgctctgagaaatctccgtcgagattctctgtttctcctcctctgtcaaagaccaatcaaatatcttcagattctcttccaatctgtctttcctaaagctcttcaccaccatgctcactccttcctcgtaagcccatctcatactcacctagtcaattgtctattacaactctaaaaatgagctttaaatactttcattccccaaaacttctccacatcactctattacccgtttaaagagtgagttttttttttttttttttttgggtcaacgagagtgagtgcacaatataaaaatgtatcaaacaaataaataagtcaatagtccaaaattaaatatcgcataaagatagttttagccattatcacaataaaaataaaactaattttcaaatgaatataacaatgacttttgtttaccgatttgttaaaatattttctgtaattaacaaaattttcctttaaattacgactgttttttttaatatttatacgttaaaagaaatttaaaaatgttttcgtaaataattttaaaactgtctttggagagtacctgagctactgtttttccctttgcctcagcaatttctttgagaacatcagactccatgattttgtgagttccccaaaacgctcctctcgatcccaacaccgaataagctgtcacaacaatgcctttcgacttacataactccctcagttttctctgttgccatactggactcatctccacctttttcacattatccacaaacaaatgtttcaaattatttcaccaatccaatattttcttataaaaaaaaggttgaacttatttgataaattaaataagagagaattttaaatatacttgattgacactaggtgggatttttgctattgaaaggatgtgttggagtttcttgcatgagaagttgcttactcctatacactttgcaactccgagtctctgacactcttccatctcagaccaaactgtttcataatccattggcaaaaagtcatcttcttctatagggaacttgtatttaccaggtttcgagctaaccggccagtggattaggtagagatcgagatagtccaatttaagagttctacaaaacatgatatgaaaatgatgattaagatcatgcaaccccgaaatacgctttttgtacttggcttgcagtccatagaaggctatcaacaggagatcgcatggttaaatggtcgggagacgttacaacggactgcattctctgtcaaggtaacctcgaaacccgggaacaccttttctttgattgtggatacacttcagcagtttgggcagcgcttgtaaagggaattctcaaatcgagatatacttccaactggacctcgataatggaccacctcgctcatgctcagccacaccgcgtggaccacttcctcgttcgctatgccttccaagcgactctatacactgtgtggagggaaagaaatggtagacgacacggtgagaccctcaacacggcctctcaactagttggatggatagacaagcaaatccgaaatcagctgtcctcaatcaagctcaagggcgatcgacgatatgatgacgctcttcaattgtggttcagtaccagagtttaatcttatagttttgtctcctttttctcaaactctattttcagtttaaactctttcaactcacgttgcatttgatgtaaaaaagttaggtttcttttgaatataatttaacattatttcaaaaaaaaaaaaatgatgattaagattaagcattgttctaagatacggcctaagcgttcatatatacgatgtaaagatgttatacattaatgactaatgtcccaaaatctttatgaaaaaaaaattaaaaaaattaaatgatattttttcgtatatacttaagttttttattgtgtttttttaacaccattgtgttattagttataataatgttttcgttcttaaaatattatttcgccaattttgataccaacgagtgcgtatatatatcaacgaatccaaactcgaatatcatgaaattttggagtatccatgcacacccctaagtatatatttgagtttaaccatctagagttcaaaagtctatttaaatctttcatgtaaccacaaatctcatttgctatccttttctatataataaggaactcaaatcttactccaaactccgttggatcgccggtacaacaaggccaccatgagcatcggcacaccatagcttagaagtgacgaagagttctgatcgagattggattaacccgagagaaaccgcctccgccaaagcttcaccaagcggttcctccgtctggtacctaggagaggtgtcgaagtgacgataaccgagcttgatggcttccaacaccgtccgtttcaacactattggttcgggtggaggagacgcagcagttccaagagctagaaccggcatcaagtgatgaacggatccgatagggaacgtaagagctgacattggtgaaaagaagcgccaaaaagtcaaagaaagtttgctacgagaaaatcgtttctcattggctcaatttatactcactacttcgtggccactagccaccatggccatcaaaaacaagtaaagaaaaaaaaacatgtcacgagtggccatcaaaaaaacaaaacaaaaataaaaggaggatgccacgtgtaacccataacctgctacaagaggtgaaccgcacctccaatcatttgtctaatttcggtgtcgtgtccaagttccccggtggctttgaatttatccatcggtattggactaggttttggatggattcaaccctttgtcattttcattgagttactttctaatagtgtgtacttgttaaaaatctcaattattagtgttttatggctttgttcggaacttcgttgatatggacaatagagcaacatgttccttggaacacaagatagtagaaagcgaggtgttgaaatttctcccctctcccgctgttaaatatttttggtggtttgtgtattgtgattgtaatttaaaaatgattaataaggagcaaatgcccttagctttctcccatttcaaatttagggtttagacccataacctaaaatgtattattagaatcctggtcgtgaatccaatcttattagccaagttctactccacttccgtactacgctgtgtctaaatgacaaatcgtttatgttggagatagtccttattcattattcattatttcattattagagagaatgacaagaaaatcattgtgacgaatgataattgtgccgttttcaataggctattttcacacaaagtgatcagatctccccgtcccacatctcggcgacagatttgatgggacctttcttagaggtataaacctctccgtggacgtttctgaactgaggaatctcagttgaaattctctgtgtctcatcctctgtcaaagaccaatcaaatatctttagattctcttctaatctctctttggtaaagctcttcactaccatgctcactccttgttcataagcccatctcatactcacctgtaattacaactccaaatatgagctttgaactccatggatatagctgatgaatacatctcaaatttttctgttgagattcatgttaccaagatagtgactgactattgatggtgataaattgataataactgataaacgtccccactttttttttttgttgttgtaaaagttcatataaatgtcaccaattgttttttgtatttttcttgtttgatagtatcgtttaagaaaacttttgaaagtacctgggccactgttttttcctttgcttctgctatttctttgagaacatcagattccataattttgggagttccccaaaaagctcctctagatcccaacaccgagtacgctgtgacaacaatgtcgttcgatctacaaagctcccttagctttctttgttgccatattggactcatctcaaccttgttttcatccataaaaaaaaaagaagggtgaattggaattgtttgctgaaaaagaaatcaaagagtaaaaaagtagtgtttacttgattgacgctaggcgggattgtcgcgatagagagtatgtgttgaagcttcttacatgaaaaattgcttactcctatgcattttgcgagcccaagtctctgacactcctccatttcagaccacactacttcgaaatccattggcataaaatcatcttcatcaataggaaacttgtatttaccaggtttcgagctaaccggccaatgaattatataaagatcaagatagtccagtttaaggtttctgcaaaaccatatttgttacacaggtggtttacattaagttatgtcactcccaaaataatattcaatcatgaaacataattgacacggtgactgatagagaacctgatccatagagatatgtgaaatagttttctgtatttctcaatcggaaaagtgtttacaagtatgtttgtatacatctacactaaaccaactaaaccatatacaatcacaatttaacttaaccggaatcactaaaccggactatcatatatacagttcgaatagtgacacctactctcagtgattgaaaccgtgcattctaatttcatgtgaaaatcattaaggaatctaaatcttacttcaaactccgtttgatcgccggtacgacgagaccaccatgagcatcagcacaccaaagtttggtagtgacaaagaattcagatcgagatcgaactaagccgagtgaaaccgcctccgctaaagcttcgccgatcggctcctccgtttggtaccttggagaggtgtcgaaatggcgataaccaagcttaatagcctcaatcaccgtctctttcagcatcgttggttccggtagcggagaagcggcggttccaaaaccaagaaccggcatcgagtgatgaccggatggtccggatctgatggcgagcgtagggactgtggttaaagacattggttaaagagaagtcaacgaaagtgtgctctcagaaaatggtttctctcggtggcccaaagctttactcagtagccactgactaatgctagtgcctgataatattatattaatatactctctttgattagaaaagtacgtaagtcttcatattataagtttataacgctatataatttgactataaattgttaatagaaagtagtcatgatattatatacgaaaaatatttgaattagtattctttaatattgtttatttggaaaacttttaaagaataatatgttatgtaatttgtgctaaaatttcaaaattttaatatgtaaatcaataatgaattaatataagttgttttcagctttttctcaaaagcatgtcacgtatgagcattaacacccgtgtggaaaaatggagccaagtgagctaagcattttagcttcataaaacaaacacaccgacgtcgttaactcttcatcttcatttttttctgtaacttctcccatattttttcttcccaaaaatatactataaaaatgagaacacttcttctaacgattttgatcttcttcttcacagtgaatccaatctcagcaaaattctacactaacgtctcttcaatcccaccgttacaattcctaaacgcaacgcaaaacgcatgggaaacattctccaaactcgccggttgtcacatcggagaaaatatcaacggcctctcaaaactcaaacaatactttcgccgtttcggttatatcaccaccaccggtaattgcactgacgatttcgatgacgtgcttcaatcagcgatcaacacttaccagaaaaatttcaatctcaaagtcaccggaaaactcgattcctcgactctccggcaaatcgttaaaccgagatgcgggaatccggatttgatcgacggggtttcggagatgaacggtggtaagatactccgtacgactgagaaatactcgtttttccccgggaagccacggtggccgaaacggaaacgagatctgacttatgcgtttgcgccgcagaataatttaacagacgaggttaaacgcgtgttctcacgcgccttcacgcgttgggcggaggtgactccgttgaatttcacgcgctctgagtctatcctccgtgcggatatagtgatcggatttttctccggtgaacatggtgatggagagccgtttgatggagctatgggaacattagcgcatgcttcttcgcctcctacggggatgttacatttagacggtgatgaggattggttgatctctaacggtgaaattagtcgtcggatattaccggtgacgacggtggtggatcttgaatcggtggctgttcatgagattggtcatcttttagggctaggtcattcgtcggtggaagatgcgattatgtttccggcgatttctggtggagatcggaaagtggagttagctaaggatgatatcgaagggattcagcatttgtacggtggtaatccgaatggagacggtggtggttcgaaacctagccgtgagagtcaatctaccggtggtgatagcgttcgtcggtggagagggtggatgattagcttatcatcgattgccacgtgtatattcttgatttctgtttagtgtaggttttatttatacttttattccatcttattttggggtcaattaatcgatttgtttttgtttttcttctaaaagtaacgattctatgttatcgatggaaaagtaacgatttggggtcatggtctcatggaaatgagagaaattgtaaaattcttcatatattggattttggtgtttattaatgcatattaaatttaatgtcagaaaaaacttcgttagaacaaaatgttgtcgtaaaatatgattttctttttctttggtcggtgaaatatgtaaatctgtttctgctagactattgaatatttcgattttttggtcaaaaaactgttgaagttttcttcacaaattttaaaggtctttaaagttttacaatgagttatgactcatagacttacgaagtcatcacatacaacactagttagagcatcattaatggtagtttcttaggttagtcttaacttagttcttaggattttttttaattgattttaattttttaaaacaaaagataagaatacttcaatttgtcttttatataagagactcttttaacaaatatatgattaaaaacattaaatttgtaaccaaaatttcctaagaattaagctaagcaactatcaataatggtgctcttagtcggtccaatttgtttgagaagacttgtttttattgataatcaccacttacatttttgtaatgtttcacaaatccacgtatgtagttttatttaaaataaatactatgttttaattaatagtgggattctaaagtaaattgaaattatcaacaatcgtgaattcgaacatgtatatagtctatatataatgaccttgcggctccttcaaacactgaactacacctggtggaccattttcacattcttgaatgacgaaaagtctcttcactaatgcatacccatgcattatcgtaatggcaacacctgaaccatgagtcattagctttatggttagcattgtagtgaagttttgtacatgttggtgtagttacaataatttcaataacaaaagcaaaaccacattctttctcatggactaaatctttgccataagagaacttctcgctgcaatcatgttggcatttgggcatgtcacaatgactgcttccacaaatgccaaacatggctgcaccaagaagttctcttacgacaaagagttcttccgatgagaaggaatgcggttttgctttatatatgttactgaaactgcaactacacaagcatgtacaaagatctctatcatcactacaaagttaaccacatgtacatgtgtaatgacgcatggtcagatgatgtttttctgacacgattatcttatgctagaggcaaatattctagtatcatgttgataacgttgatcaaataagcaaacttccaaataatttattgattttgatcatctcgatacttccacttaagaaccagtgaaaaccagtgttctgtcaaaatgatgggtggatctttggaaacaaagccaccatcttctattggacttgaaaataaaatccaccaaacttatgcataaatttttcgttcgtttagctagattgacggccaagaaaaattaacaaattttggtcatcaatctagctaaataaagaaaaaatagtgcataagtatggtggagttttctcttgatatttcttatgtctaagaagacgaggtgagatatattccataaatctacttatcgttttgatgtaactagtatctttttattttcttaggagagtgtattgtaattcttcttaaacactttactcttaccaatttatcatgtatcaatattaattagtacggcacaatagtataattgacataagaatgcggaaacaacatatagtccacgctgaaatcaatgaagtaagaaaatggaaacttaattcattcgcaaacataacattatttgttatacaaaaatgaaaataacagatattaactatcaaaacaaacataaccaattcatatagtcatgcagatcgaaattatcaatcagacgatatatttatcaatcttgcaaagaaacaaaaacaaagattttacaattaagagagatgaagatcggaccgtaatgctttcattccccagaagaagagatgagatgggattcagattcagacaataatacctatcgatgtaaccttttcttttccccaaaagaagtacacatcaaattcccaccatcatggatccatcatccttttaggagatgcttgttttgtttttttcctcttactctcttgaacaagaacaacaaggccaagatctccatcgtgtgtttcgtatgtctgaaaatccctctgaactttttattatagttttgatgagacttgtttggtggaagtttggtggttctgatgatgatgagagagagcgaagaaattatggcttataaaaaagaagaagagacatgatgattactgattggtacaaacattgaaaatagttataaaaagagaagtaaattgtcaaaacaatcacaactatttactctacctacgtatgggttatataacataaatatacgaatttgttatacatatggggtatgaacttatgactgcgtataatgagatttgaggaccgtgttcaaaactttccttttaacaatcgttgcatataaaaaatacataacatgtgatctacagtgcatatcttgcttttgggctcttgagttgatagcgtattacattgaggatgtgagttaatgaagccctaaacatatagtgttgtttgacctttttagtgttgctttatataataggtcatcgtttgctaagtttatatccatgcatatgtaccttcttgaggtaggatttttatgcccctcaaaatatggaaattgtacaatacatatactccaaaaaaatcactcgtgggtattctttggattgggatattcttggttttcacttttcatatatcatctgaaaaagtttagtttggacaaaatggctgtaccgggaaaaaacaaaatagaccgttaggtgccttgtctctcaaatcaatatcaataatatgctctaatatattgtaccttgtaacatgtaaatgggtccataaaaatcagataataagtgggggttttcatttattttttaaatgcgtagttagatatgttctaattgatttttcttatcattgtgatatataagtaagagatcattatttctaatggatatatgatatcttggattgggtattgtgactaaacttcgtcttctataactttttgacttcaatcaataatcaatttgtagctgatggaaacttctcattctaccaaaacaaaagccctactatttggtgggttgcaagtgatcactaagccatcttcctaaaatatttttgtatgtttaaatagttgagttaccagtaattagaaaactttgcaaaaaccaaaaaagaaaaagagtgattagccaaatgcactttcaaatagaaaatcaacaaaatacgcaaatatagaggtttaccatatatgtaaaaaaacatctgaaaaaagttcgtcacaataaagagaaaattttggacaatagagatattgacggagtacatgtatgtgatattgttgcaaaaggatagcctcaaactcatattcataggaaaagaccacaaactttatttgttatgaatccatttagttacaacgtcatgttaagtagattcttaaaaaactatagaagtaattattatcctaaatagtatcaacataagacaacatattcgattgagataatagttggggcagtccgtagtcgtcagagaaagattaacatcacatacttttttggcttatcgttcacttttcattttaagtggtagttgggttttacactttatatattgaacctagataacaactgttgtgaattc

SEQ ID NO: 99 - DNA, 88037 bp, Arabidopsis thaliana
aagcttcttacatgaaaaattgcttactcctatgcattttgcgagcccaagtctctgacactcctccatttcagaccacactacttcgaaatccattggcataaaatcatcttcatcaataggaaacttgtatttaccaggtttcgagctaaccggccaatgaattatataaagatcaagatagtccagtttaaggtttctgcaaaaccatatttgttacacaggtggtttacattaagttatgtcactcccaaaataatattcaatcatgaaacataattgacacggtgactgatagagaacctgatccatagagatatgtgaaatagttttctgtatttctcaatcggaaaagtgtttacaagtatgtttgtatacatctacactaaaccaactaaaccatatacaatcacaatttaacttaaccggaatcactaaaccggactatcatatatacagttcgaatagtgacacctactctcagtgattgaaaccgtgcattctaatttcatgtgaaaatcattaaggaatctaaatcttacttcaaactccgtttgatcgccggtacgacgagaccaccatgagcatcagcacaccaaagtttggtagtgacaaagaattcagatcgagatcgaactaagccgagtgaaaccgcctccgctaaagcttcgccgatcggctcctccgtttggtaccttggagaggtgtcgaaatggcgataaccaagcttaatagcctcaatcaccgtctctttcagcatcgttggttccggtagcggagaagcggcggttccaaaaccaagaaccggcatcgagtgatgaccggatggtccggatctgatggcgagcgtagggactgtggttaaagacattggttaaagagaagtcaacgaaagtgtgctctcagaaaatggtttctctcggtggcccaaagctttactcagtagccactgactaatgctagtgcctgataatattatattaatatactctctttgattagaaaagtacgtaagtcttcatattataagtttataacgctatataatttgactataaattgttaatagaaagtagtcatgatattatatacgaaaaatatttgaattagtattctttaatattgtttatttggaaaacttttaaagaataatatgttatgtaatttgtgctaaaatttcaaaattttaatatgtaaatcaataatgaattaatataagttgttttcagctttttctcaaaagcatgtcacgtatgagcattaacacccgtgtggaaaaatggagccaagtgagctaagcattttagcttcataaaacaaacacaccgacgtcgttaactcttcatcttcatttttttctgtaacttctcccatattttttcttcccaaaaatatactataaaaatgagaacacttcttctaacgattttgatcttcttcttcacagtgaatccaatctcagcaaaattctacactaacgtctcttcaatcccaccgttacaattcctaaacgcaacgcaaaacgcatgggaaacattctccaaactcgccggttgtcacatcggagaaaatatcaacggcctctcaaaactcaaacaatactttcgccgtttcggttatatcaccaccaccggtaattgcactgacgatttcgatgacgtgcttcaatcagcgatcaacacttaccagaaaaatttcaatctcaaagtcaccggaaaactcgattcctcgactctccggcaaatcgttaaaccgagatgcgggaatccggatttgatcgacggggtttcggagatgaacggtggtaagatactccgtacgactgagaaatactcgtttttccccgggaagccacggtggccgaaacggaaacgagatctgacttatgcgtttgcgccgcagaataatttaacagacgaggttaaacgcgtgttctcacgcgccttcacgcgttgggcggaggtgactccgttgaatttcacgcgctctgagtctatcctccgtgcggatatagtgatcggatttttctccggtgaacatggtgatggagagccgtttgatggagctatgggaacattagcgcatgcttcttcgcctcctacggggatgttacatttagacggtgatgaggattggttgatctctaacggtgaaattagtcgtcggatattaccggtgacgacggtggtggatcttgaatcggtggctgttcatgagattggtcatcttttagggctaggtcattcgtcggtggaagatgcgattatgtttccggcgatttctggtggagatcggaaagtggagttagctaaggatgatatcgaagggattcagcatttgtacggtggtaatccgaatggagacggtggtggttcgaaacctagccgtgagagtcaatctaccggtggtgatagcgttcgtcggtggagagggtggatgattagcttatcatcgattgccacgtgtatattcttgatttctgtttagtgtaggttttatttatacttttattccatcttattttggggtcaattaatcgatttgtttttgtttttcttctaaaagtaacgattctatgttatcgatggaaaagtaacgatttggggtcatggtctcatggaaatgagagaaattgtaaaattcttcatatattggattttggtgtttattaatgcatattaaatttaatgtcagaaaaaacttcgttagaacaaaatgttgtcgtaaaatatgattttctttttctttggtcggtgaaatatgtaaatctgtttctgctagactattgaatatttcgattttttggtcaaaaaactgttgaagttttcttcacaaattttaaaggtctttaaagttttacaatgagttatgactcatagacttacgaagtcatcacatacaacactagttagagcatcattaatggtagtttcttaggttagtcttaacttagttcttaggattttttttaattgattttaattttttaaaacaaaagataagaatacttcaatttgtcttttatataagagactcttttaacaaatatatgattaaaaacattaaatttgtaaccaaaatttcctaagaattaagctaagcaactatcaataatggtgctcttagtcggtccaatttgtttgagaagacttgtttttattgataatcaccacttacatttttgtaatgtttcacaaatccacgtatgtagttttatttaaaataaatactatgttttaattaatagtgggattctaaagtaaattgaaattatcaacaatcgtgaattcgaacatgtatatagtctatatataatgaccttgcggctccttcaaacactgaactacacctggtggaccattttcacattcttgaatgacgaaaagtctcttcactaatgcatacccatgcattatcgtaatggcaacacctgaaccatgagtcattagctttatggttagcattgtagtgaagttttgtacatgttggtgtagttacaataatttcaataacaaaagcaaaaccacattctttctcatggactaaatctttgccataagagaacttctcgctgcaatcatgttggcatttgggcatgtcacaatgactgcttccacaaatgccaaacatggctgcaccaagaagttctcttacgacaaagagttcttccgatgagaaggaatgcggttttgctttatatatgttactgaaactgcaactacacaagcatgtacaaagatctctatcatcactacaaagttaaccacatgtacatgtgtaatgacgcatggtcagatgatgtttttctgacacgattatcttatgctagaggcaaatattctagtatcatgttgataacgttgatcaaataagcaaacttccaaataatttattgattttgatcatctcgatacttccacttaagaaccagtgaaaaccagtgttctgtcaaaatgatgggtggatctttggaaacaaagccaccatcttctattggacttgaaaataaaatccaccaaacttatgcataaatttttcgttcgtttagctagattgacggccaagaaaaattaacaaattttggtcatcaatctagctaaataaagaaaaaatagtgcataagtatggtggagttttctcttgatatttcttatgtctaagaagacgaggtgagatatattccataaatctacttatcgttttgatgtaactagtatctttttattttcttaggagagtgtattgtaattcttcttaaacactttactcttaccaatttatcatgtatcaatattaattagtacggcacaatagtataattgacataagaatgcggaaacaacatatagtccacgctgaaatcaatgaagtaagaaaatggaaacttaattcattcgcaaacataacattatttgttatacaaaaatgaaaataacagatattaactatcaaaacaaacataaccaattcatatagtcatgcagatcgaaattatcaatcagacgatatatttatcaatcttgcaaagaaacaaaaacaaagattttacaattaagagagatgaagatcggaccgtaatgctttcattccccagaagaagagatgagatgggattcagattcagacaataatacctatcgatgtaaccttttcttttccccaaaagaagtacacatcaaattcccaccatcatggatccatcatccttttaggagatgcttgttttgtttttttcctcttactctcttgaacaagaacaacaaggccaagatctccatcgtgtgtttcgtatgtctgaaaatccctctgaactttttattatagttttgatgagacttgtttggtggaagtttggtggttctgatgatgatgagagagagcgaagaaattatggcttataaaaaagaagaagagacatgatgattactgattggtacaaacattgaaaatagttataaaaagagaagtaaattgtcaaaacaatcacaactatttactctacctacgtatgggttatataacataaatatacgaatttgttatacatatggggtatgaacttatgactgcgtataatgagatttgaggaccgtgttcaaaactttccttttaacaatcgttgcatataaaaaatacataacatgtgatctacagtgcatatcttgcttttgggctcttgagttgatagcgtattacattgaggatgtgagttaatgaagccctaaacatatagtgttgtttgacctttttagtgttgctttatataataggtcatcgtttgctaagtttatatccatgcatatgtaccttcttgaggtaggatttttatgcccctcaaaatatggaaattgtacaatacatatactccaaaaaaatcactcgtgggtattctttggattgggatattcttggttttcacttttcatatatcatctgaaaaagtttagtttggacaaaatggctgtaccgggaaaaaacaaaatagaccgttaggtgccttgtctctcaaatcaatatcaataatatgctctaatatattgtaccttgtaacatgtaaatgggtccataaaaatcagataataagtgggggttttcatttattttttaaatgcgtagttagatatgttctaattgatttttcttatcattgtgatatataagtaagagatcattatttctaatggatatatgatatcttggattgggtattgtgactaaacttcgtcttctataactttttgacttcaatcaataatcaatttgtagctgatggaaacttctcattctaccaaaacaaaagccctactatttggtgggttgcaagtgatcactaagccatcttcctaaaatatttttgtatgtttaaatagttgagttaccagtaattagaaaactttgcaaaaaccaaaaaagaaaaagagtgattagccaaatgcactttcaaatagaaaatcaacaaaatacgcaaatatagaggtttaccatatatgtaaaaaaacatctgaaaaaagttcgtcacaataaagagaaaattttggacaatagagatattgacggagtacatgtatgtgatattgttgcaaaaggatagcctcaaactcatattcataggaaaagaccacaaactttatttgttatgaatccatttagttacaacgtcatgttaagtagattcttaaaaaactatagaagtaattattatcctaaatagtatcaacataagacaacatattcgattgagataatagttggggcagtccgtagtcgtcagagaaagattaacatcacatacttttttggcttatcgttcacttttcattttaagtggtagttgggttttacactttatatattgaacctagataacaactgttgtgaattctctgtttttgattcgaccctcttttgaaccatggttatataattgttctcgacagacctcaagatttttttgttttaaactgattacaaaaatcttatatacacatgcacatagtaaagtctaaaccaaagcaatataatagatataaatgttcagtcagagtttctattatcaatcttgcaaagaaatgaaaatatctttcgatagatgaagattaagattcagacaataacatgcaacctttttctttccccccaaaaacacatcgatcacccaccatcaatccatcatggatcgatcatccatttagggacctatttacgtttgattttttttttcctataactttctttaataaggacaacaaggccaagatcttcatcgtgtgtttcgtgtgtctcaaaatccctctaaactttttattgtagtttggtgagacttgtttggtggtgctgatgatgatgagagagagagagagagagagcgcgcgaggaaatcatggctggtaaacagaagaagagacatgatgattactgattgaaatattatatatgtacaccattgaaataagttataaaagtgtcgtaaatcgtcaaaagaatcagtagtatatatctactctatatgatctatatacaccattcatatataaaagaatcacaagtatgttattgaggatgtgtgtcaatgaagccctacgagaaaggtctgtgcactaccaaaaaagagacacatagtttgtttgagtttttttattgggttcatttgttaaatttatatccataaatacctccttgaggtatagccgtacagggtttttttgcagttcaagatatggcatttgtatgaaacttatatacccgccaaaaaaaacatacctaggtcacccgtgggtattttttgattgggacaaactggctgtagggaaagaaaaaacagacaacgttaggtgccttgtctctcaaatcacttatcaggactcaggagcaataatttgttcgaaccaattgtacgttgtaacatctaaatgggtccataacaatcagataataaaattttatcatctttcttaatttatttatttccaaataactttctttatcatgtttcttaattacgttgatgcatgtttagatagccgaaacaaatcactattactttgattcttattatttatttatcaatttctggattcatgacatttgaaaaactaaatgatgtattactgtgcatttgcaattcaatcgatcttaaagtcttaaaatcaactagacgataaaacggtctatttccctatagaactagatatatatactatgcattgtgatatagaattaagagattactgtttctttggatgtatgatcttttatcagaataaacttcttattttgtcttcagaaataatcttgacttcgatcaatcattatttcgtaagcgataaaaacttctgattatctaccaaaaaatgatttcaatatattgtgacattgttgcaatacgataaccacaaactcatattcatagggaaatgttttaacaaactttgttacaaattcatctacttacaacgtgatgctcaatcattgatatacattataaaaagaattattatcttaaaatagtatcaacataagacaacatgctcgatcgagataatacatgtgccagcgcagtccatagtcgtcagaaaaagatcaacatcaaatactttttaggcttatcgcgcacttttcactttaagaggttattgtgattacactttacgtattgaacctaaatatcaatttcacagttggaagtttacaaaaataatgccagtgtcgatcctaggatgatgcgaaaccaaaagatgatgttacatatatatacacatgcacatttagtattctggttatcaagataaggatgaaaagactaattaaaccaaagcagtgtctatgacattgcaagcattctccaacccataagacaaaattgattctacaaactttcatatcatcagaatctatgaaatgaatcaacaactatcacatctcagcagcaaagttaaaggactttccacatgatctatatttataagggtatcgttaagatcttctcacatgtgtggcacgtgacatatttaatattcttgatgggcttttctgttttttatgggccttttcgaatttcagggttttaaataagttagaaattagataaataaaaaacaaattagcaaaaaataacgaagtgtctcgtctcttctctcttgtcttctccagatcagtgtttgtggggttttcccaatggagcttcttctctcattgtctctcctcctggggttttggtgtaacaacaatcctcaattcacgaggcatgaatcattattctccccatttgcttattctctggctagaatccccagattttactgtatcgactttgggaatttaactggagaaccatttccactcaaactgggaaacaaaaacctgttattgaacaatggccactcattcatcgagatcggagaataaagacgccggagaagaagatgagctccgacgaaggaacccttatgaagtccttggcatccccagcaattcgactgatcaagagatcaaaagtgcttatcggagaatggctctcaggtttttcaaaaagattgaaactttgcgttgattaagatgcaatttaggtttagaattgatttaagaggtttagaatttgtgcgagtgttgtatctgtgttaaagttgattacttggtggttacatgtactgaagtttggttcttcaggtaccatcctgataagaatccagacgacccggttgcagcagagatgtttaaggaagttacatttgcttatgaggtcttgtctgatcctgagaatcggcgtctatatgatactactggctctgaggtgagaatttcagacaattcctgagttttaacatcgctggttggtttgcaaagttagcattgaagagaatattatataatgggaaagtttggaattgaatagtttagcattagagtagcggccatgctaaattacctaaggctatagtttctagttcttctttagatgaccctttgttcataatcatttgcgatttgatatctaagttttattgattcacatgggatgtaggctgtgggtccggaaaatgaagacctagagctcgatctgtcaagcttaggagctgttaatactatatttgctgcattgttcaagtgagtttcgtagacttgctctattctctgttttttcattcttcttggttctgaaagagaatgttatcaattgttttacttttgtttgtgagataacttcgaaacttgactatttttgtcctccacagtaagcttggtgtgcaaattaagacaactgtttctgcaaatttattgggggaggcgttgaatggtacggttactactttgcctctcatggttgggcaagtcgtgtccaggaaggtatgataatgagagtcttaatgtggatttgtcatctgtaacatattttcttctttgcattaatgtggatttgtcatctgtaacatattttcttctctaacaggttgaaaagcaatcggctcacttttattcggttacgttaacagaggaagaagctcaggatggattgatatgtaaggtgcattcatctgctaaaaacaaattcaaggttcattttcccaaactcttaccttgcgtgctcaagaatctcgtagctgtttttcctgttctgtattttacctctgattccttttgctttccagttgctttactttgaccaagtagagaatggaggactgagcttggccctacaggtatgaagttttatactattagtttgttgagtaactaacttcttgtcacatctccggattacatcatagagtggtttgatcagatttgttttatactttgctattctcattaacctgtaacgtggcatccggtcgaatcatcatggctttgaagcttctttcggtttctaaatagtattttattttcctccattctgcaaaaggaagacagcaggaaaacaggaaagctctcgactgcagggttgtattttttcggcttccctgtttatcgtttcgatcacagggttaattcagttaattattttctctaccctcttaagctaaacacgtttattttcttcttctgattaccatgtactcagttttcactcttctgcacgcagagggctctctcaagggatccagagaccggatttttcaaaaggcttgatgcattccaaccgtttgagatcactgaacttaaagctggttctcatgtctttgctgtttatggtaatgtttgttttatttgcttacaggattcaaggaatttgtagtctactctattagaagtaaagtaacctcacttggtgtcatatttctctaggtgacaattttttcaaaagtgtgagctacactctagaaatattctcatctgctccattcggtaacgagaaagagagtcttcggtccactgaagcgcagatagtctcaaaaagaacagagctattgaagtttgaagctgaatatcacgaggtctttgcacaattcacagaaatggctagcaaatgcacaggggaagtacaagaggtgagagacagcttacaatatcaccccgttttctcctgttttcttgattacataataaacaagtaacttagatttgttttgtttgcagattgatgagcttctaaagaggaggaatgagatatgtgcggcttacacaatcttcccaccaacgaagcaaggttcaagcaagagcagaagctggagcaagaagaagagcagtcttttaatggaacctagagaagaaggagaagtcgcagttagggaagaaggtggagtcaagaagaagaaatggtacaatattcagctgaggcaagacaagaaaaaaaactgaagagactactgcaatcttgagttttcttcaggcacatagctatgttcgagaaacgatatatatatgtttcagtgataatctttagggattatcaacatcttataaaaagtggtctatggtttatctctttgcacactttgcctgattcatctcttcgtatacttctacggattcagatttacattctctgttcgcagtactgtcaacttcgtcttcttcagaagctttgctgaattcatatgtgtcctgctgattacgccgccatcttcttcctcaccggatcctggttttaacgtaacattttgctccaaaaaaagaaaagtaaaaccctataaaaaaaaggaaaaccaaaaagtggagtctctatgcaatagatataattgctttggtaacattttagagaagaaatgggtggatcttggttcaagaactaattccaagtctaattttgtaatctcaaaatcactgcaaatgtcacaaacaaaccaaagcaccatttcgacaaacatcagaaacccacaatccataagacgttttccaagttgttaggttacttacttgtttggaattaaataaactttatccctttggttttgttggtttagttaaggttggtaatcacttgatattcatatactcaagacttggagcgtcgacttcaacaacaagatcctcaaactcgagatgctaagactgaaactagtgtgaagctttccaatggttgtgaacgaaatcacaaaactttgatataattgtcggataagtgatcacggttaaatcctcaagaataggacaacttaattagagagtctccaaaatggaatcgtcatcaaacttgaccttctctaaatacatagcattgacacaaggtatagaaaccgattttgaatttggattatcaaatacaacacattagagagtcaaattcaccaaattcgaacatgtatagagcgagaaaggcatcataactaaggttccaaagactctaaaaaacgttagagagttaagatgcctatcttgttctatttttgtgcgactttggtggatttaaatctccattgtgttgtcttttatcatccgaaatcaaaattggtttctttaccttttgtatatatttaaagggggttaagtttgttggcgactcaggtttgaagactctcatatcaagctgtatggttcttgaggatttaattatgattacgcatctgaatgattatctcaaagtcatacatgttcattctcaatcactgaaaagcatcatactagagtctcagcatatattgaatatgatgatcttgtggttaaaattgatgctccgagtcttgaatatatgagtattcatgattaccaatctaaaagctttctaagcccattccaactctccttcaatatgatactttctgctttgggcctacatgctcaacccgtatggatttgttattggcttcttccaaaatgcctcattctagttggaattggacttgacttatatattagacacttattttctaaactttcgatatgggatgtttgtttgtacccaataatctccccttcaaaccaagaaccacggacattggacctctttttaagcgaaactttggtacccttaactcggcaccttcttattttcgaagttcttgaatcactttcttatcatgtcacatttaatggcttcttccacaccgaacttttagcccacacccctaaatccattttttcaacctaggctgtgatactatttagtgggttttctaagtcattccaactctcaattagtataatattgtccgttttgaccctacatgccaaagcccgcaaggatttgttattgggttccttcccaaaaagcttcatactaattggagtttgactagacttatatattagacccttcttttctaaacttctaatgtgggacgttggtttatacaacaacaacatagtagtggttcctctatagaggtaaacgttgatgttgtgtttggtatcgagtattatgatccattggaaataactaaactccataatattctcactaggaccatatttgaaaaagtgaccatatctgttagaactatagaggtacatttactttctttagttctattcacagattatccattccatggtggaaccgtcgcctccattttctaacttgtctcgcttggatgcctcattagtaaaatcttcttggaaagtttgatgcatgaatctacattcactcacaatagtgcatttatcggtttgctagggtgggtatctggctaacaagtggcggagagtccgagagttgaactattatggaaagctagttgtgggtccggcttaccacttgtaacatatttgagaagggattcaaatactctcacatctttagcacaaattccaaaacaacatctccaaaccagctttcattaatatctataaatggtctaacttgaaaacaattgtacacaactttatcaaaagtttgactactaaagtaaattttccttccgtagttgttttaccatttaatgggatgattggtaaacactttggaggcttcaaatttttttacaagtctttacagtttatgggactgattggaaatccttgttagttaaggccgtagaaacgttttgactgtaagaatttttgttgtagaaactgttgttctatggactataactatataaattttataattgattggtaaagacttttttaaaagcttgattggaaaaaaaactgtggaaacttttgaaaagcttctcaatcacactttgtcggttttaacaaatttaaaagcctctagagccatatttatttttagtttttactctttactaccaattttatttttaaagccacgtaaacatgagtttaaaaataaaaacaagaaaagcttataattttctcttttcttcttcgccatatgtataaaacctctcatcacattcacttataaattagctttttaaaagaaaaatagttgattaacaattgaattgtttatcttctttttttaagatccattatccatatttttggtaattatttaaaatcgttatttctatattcacatgttttcctaaagtcaaagttcttacaacaaaagtctttgcaggccaaaatctatataaccgaaagtaacagcggttaccaattagtccttaaaagtaattttttacgatacattcctcatcctataaagaatactatacgaaaaaggtttacgttcaagttttctactaatgaccattaaaagaacaaaaaagaaatgaagcacatgaacaatgaggaatgtaacataattttttgtggaatggaaaggaaaatttactcgaaaagaataaaaatatacttatgatgaatggtaaccaaacaaaaacaatattttaagaatatttcttttatatttaataatttaatacaattattttaatcaaatgtaaaattattccacaaaaaaaaatcaaatgtaaaattaactaaatacaaagtattttcactaatattatttcgtaattatttcatatatttttaaaaaataatgttatttttccattccttataattgtatatcttatttttttctctgaatttttattatttttatgtttcattctttttttttacagctttatgtttcattcttcattattcattttgtataattgtttttgtttatttaatggtcacgagtagaagaatgatattctttgtgtctttttttcacaaagaatgatattctaaactccaaaatattaattgtaaaaattattgattgtaattggtgagcagatagggaatgtattttgtgtgaaaatataaaaatgcataattaattattatttattttttaatttttaaaaaataaaaataaaaagtcattgtataaggaataaaggtaatgatatcttaaaccaatatcaataattaataagattatttcaaatattactatggaaatttattttcataaagtcttttcgaagacattcgagaacaaaatcatttttgatgaataattgataccagaattattatacttactttacataaaatcttaagttatatatgaaaattgaaacatatccagaaacaaataatcaaacattaaaatcaagaaatacatgtatgaatggagtttgaaggtacttgtgttttctttaaccatgagatctaaatctgggacctaatcctatttctcggagaacaacaaatttggatcccggataatttgaccatattaatcgggttctttatagctatttataaatttcaaggatctgactaaaaacacacaacaaaataaaaaattaatagaacatgagataaaagtcaattggagaatatccaataaaacatcaagtagacaaaattttgtgaacatcatatgtaaaatattgaaattaattgaaacgaatagaaactgtaaatgttcttattatattggcacatacctttcgatgaatggtaaaaaaaattcgaggggaagagatactaggctttccactggccgatcattgagcttcgctccaaaagagaggcattttatttgataagatcttggtctcatagattctcatctaatgtaatcaaagattttatattttgttttctaagagatcggcggcacaagtactagaaaacagttttgagagtttgtaaacctatatactactgaaattaacctaaaaatggattaagacacatttaaaacgacaatgtataaaatgctctggtcctggcttggaggagtgttcaggtctaggcccagaacgatagtaaatttttagtaattgaaaagaaaagtaaaaaaaacggtatcgtatcgagaagtgctgattgttagaattaataggtcgataagttaaacatagtaaagttctcactagataaatatcaatatcatggatatgtttcttgttttccaaaaccaattatagtattacatgcttttgttgaccaatttgtgaaaaatgaaataatattcagtttttttctacatcaattttatatattcaaatagtatatatcattcgtaggttatccaacttctaaattatcaaataaattacatgactatataaccagtggcgtgtccatgcttttctaatgtgatttttcttttaataaaataaatacatgtaaaaatgattttgaaacgatacaacaaacatatcatcttgtcttgagcataaaacttgagtaaacaaagatttagaagcactaaaacaagatccacaatttgaaaagaaacatagttaatataaacaaaaacaatttaaaaaaaaaagttgtacacttttaaaaagtattaaacaaaaaaaatcctctatgaaactatgaaaagaaacagaggaaagataattttggaatctagattatgttgatttccagattcttttgagaggatcctaaaaccactttgatacaacatattttttgtggactttaaacaattatatattttggaggcctgaaacaaatgccttttttctaacccatatgatatacctattcttaaggctacttgatatattttttggtacttcaagttttaattgagtatttatatcctctttttttgtatctcaagttttaaataattaagtttcaagtgtctccttattcaggattattgtctctagagatttcaatatttttcatggcttagaccatctccgatgtatacctctaaatcttactcaaaaatagagtaactctattttaaagaaactctatttttaaaggagggtttctctccaatgtatatctttataatctactctaaaaaggaatattcttagaaatattctatttctattttatatactaatatcttttagttatataatttacaatctgaccccatatattatagatttgcaaaattaccataaaatatgatattatttaaattaaacactaattatttattaaaaaattacatcatataaaaataataaaacattacaaattttattaaagcatttcgtagtgagaaataaacttttttatctttgatttttttaaatctagcaagaaactcttgaaaccggactattaaattactagttttatgttttagtttttttatgttgtttatttaaaatttagtatttgtttgcttattaagtttataaaactatgtgttgtaattgttgttgtaaaatgattatatgtattaaataaaagaacttaaatttgaaggactaaagtataaataaaaaaagttgaactcaaaaatagatttaacaatagagctgctctatatatagagtcaatctgcagaaatctgtattttagagtaaattatagagtagggttggagaagaattttgcatttttactctaaaatagagtagggttggagatacccttagtttttcagaggcaaaaaaaaaagaaacacttctctaacttgtcttcttctgctgttggggaatcaaatggactattcaaaacctaatggtaaaaaaagtagaagatattggtttgagaagtagtttttgttggatccaacagcagagtttttggtgtgtatgaatttggagcattgatccaatgtagaccaagaagattgagacaagtggaaagaacttgaatatatttttcttcaatcttcttctttgtctttgtatttctatgttaattgaaatcaaatgcatctttttggtgtcaaagtaacaaaaatttcattcatcagatggctgattgcatttgcaacaaggaaaaaaaaatacgaaaagaagctcggcataaacgagattgtattatctcatatcaaaaaatttggtacaagaaaataacagatagtgattattcgattttgagtacttctatatacaacaaatctatggaattgtaaaaaaaacaacagaacttaatatctcacagcttgaggctcctctgcttcttcagctttcaaaaaagctgaaacattaaaaacaattagcttctctatctttctcattgttttgcatctatggattcttagtttacttacctctcttcttaaccttgttcctaaaacctctcttcctgctgaatgcagtttcctgaatatttcatacaacataacacaagaatgaatcatcagaaggaatatgctaatgttcatgagctaataatattgcgcttgagtatgcagcggattaaactacattaagatctttgatagaatttataccactggctgacccatcttcactgcttcacggattgcctctactaaatcacggttagcctcggtgtatagactggtcacagttccatattgcccagctctagctgttcgaccaatcctgtgaaggaaatccactgcagaactagcaaaatccgcctgcaataacccccgagaattttcaatattgagtttagcgaggtactgtgaactgaagagagtattaattgagatttagaaaagcaacctgaataacgtgtgagacattaggaacatcaactccacgggcagccgcatcagtgcaaacaaagacaccaccagtttctctgaaatcagctaatatattagcacgttcgtctagcttgtgattcttgtgataacggtaacactggatactagctttctccaatatatcggccactgcttcaacagcttcgaccgtgtttgcaaacaccattgtcctctctgtgttggtgttgttattgttttttacagcctctataagagcatcaacctgtgagtctactgtgacttcaacccatttttgctttagtctgcaaaatagcaaagagaacaacaaaatctgagttggagtggcttacttactactactaagtcggaatgatgcttagtatttttaagaagatgaaagagagaaattttcacctcggactgtttcggtgaagaaagtttccgctaacccaaacagcatcttgaaacatatgtttcaaaattcccccggcagtcttcttcccgttaactggaagtgtggctgcaatgaaaatatactgcttactacgggtatagatctttctcactcttctccagccctttttagtatctgacccagcttcagcttcaacactaggcatttgtgctatatcatcaagatattcctcttcctcttcttcatcctcttcctcagaaatagatccttcatcgaattctgcatcatcctcattttctagatcaatttggggtacagaggcatcaatctccattggtctgccaagattggatttagccaaacgagacacctgtttctcatcgaaacgcagcatatttatcagacggataatctgattctggaagcttccacacagaagcatatcagcttcatcaaagacctgaaagcaatccaaacattcaaaaggcgacctgcaagtgatccaaacaacacaactctacacaagaaaaccataccacatatttgacacatcgtagaaattccagacgcctatttcttttcggctcaatattattaagaagagcagcaggtgtcgaaacaattatatcagggagtctatctggccaaccctgcagcaaatgcaacttccatattcagctatattcaaacagttacaaaggaacagttagatattgcttctcaatatgaaaatgttacctgagatccacacacagcttcaactctaagaagtggattaccatcttcatcaacaagaccattaaccatccgaaccacttgttcacaaagcatcacatttggacacagaataagagagatattcttaagcggaaacggtctttcctctctattcgtaacctcggaatcaagagcggtgtttgttaattgatcaattattggagcaagataaccatgtgttttaccactaccagtttctgctgcaacaatcacatctttcccagacaatatagacggtatgcaaacagcctacaggtaagaaaacagtataaaatcagattcacaatcaaacatttcagaatcaaaaacgcaaaaatgattccttttttcccattcactaaacaatgtctcaagactttacataaaaacagaaactctaacttatcatttcccaatcaacaaatgcttctctaagttcttctgttagatttcaccaaaatttgaaaacttacctgagtaagagatggtctatcgaacccagaatctcgaagagctatagagacattatctgataacccaagagacttccaagaaacggtatggtcagcaaaaaaagtatcattaccctttttctcgacttctgcttcagtagcagacgcaaacccacgaacccattttctatcagatcgattgagagagcttaaacggaaagaaacagatgaaccataagcgagagcgaacgagaccttgaacctctgagataagagcttcgacggcgctgaagaagagactccacacaaatgaagcacggagacagagcgtgagagaatcatcgagtttcacaaatcaaactttcatgaagaaaaaaagcaatcagattttatcacggcggataagatttggagaaaacctaatccaaaaagggttttagggtttaagcaaaatatgagagatacagagaagaaagtaagaaacctctgtttcagtctctctcttcattagctcactgatgtaagaaacgacgacatattagcaattagtacgttgaggaaggaaacgacgacgtataggctttgttaagtgactttagtcttttctttgtctcacatcgtctaaagtgaagataagttggactggtcacgacctaacctgaactgtcataggctcgtacctctgtaaccctggttgatcaactaagaccgtgcgatctgagtgtctatagaatttcttaacggatgaggtcgccaccgtttagctcttcctctctggggtgggtctttacggtctcttcacttgtgaagttagagttctatagtgttttggttcagtgaagcacaccactaatgaacgaagagtctctgtgtgatttttcttacatgtgtataaagagaagtcactaggtttcttgttaattgttaattgttatcgagagaaggaacaaaactaatgcttttgattgattctaatgttgtattttctggcaaagacacacaagtgaacaatttggaccaacaccttctagcataaaaagttttattgatcttttgagttaattagttcaatcaatataaacataactctaatgtataaaactctaaatgattacacaatgttgttgtatgatatcaaaatttcttcccttgagcaaggtttactcgaatcgcccgaccctccagctcaaatccgtcaagcgattcaagagcggtttccatttctgctttggaagagtaacatacaaagccataaccccgtgatcttcctgtatctccatcaaacacaactctagccccaaccacatctccacattctcgaaacgctccagctaatgactcggaagtaacagtccatgataagttaccaacaaagagcttgtgctctgtttctggatacagaggttctttgttaggctttggtttgtctgcaaagttcactttcaaagcacgaccaagatactcctgagaaagaccaataacaaagatcaactaaaatgtgttttttccttttttttatgtgttttgtaataaggctgcaagagacttacagttccatcgaggttatcgatgatgatgttgcaatcttcgacattgctcatggtaacgaaggcgaatccacgactctgtccggtatctctgttgtaaagaacctcaacgagctcagggttagcgaaatcttgaatgatttgagccagagttgcactgtcaacattgtaaggcaagttaccgaagtagagcttagtgttaacggcggcaggaggatcaagaacagcacttgcaccatcatccttctcctcctcttccaatttgacggtgatggtctctgacaagactctgaatcgtcgtgagcagctccgtgaggagatcaggagaggttttggggttgaaaagttgaatctgaggagtgtttggttagatgagtagttgcagccatggagaaggtttggttgatgatgggatttgaagcacgagagtagtactgatgatgctgccatttctctctggacagagagacacagagattggcctaagacacaaacgtttctgcccacaaaaagatttcggataaggccaaaagagtgattggcctatcggcggctatcgcaatctttagaatcaagtgtttctatgactggatagggggtttattccggtttagttatttcggtttggtctggatttctttggtttctggtttcagaagaatatttcagaataaattgagattggtattgagatttctatgtatgttttgaccattgattttttgttttctggattaaaaaaaaattaaaattaaaagtaacaatttattaatcagatatctttttatagagtctaaaaacattggctggcttcagttggattttcagattttttatttcaaggatatcttaaattcttgattcataatatcggttcaattttttggtttggtatgggtttgatgcaaatgcccatccttgttggtttacttagctcatctatgttatactatttgctaaaaaaatgaaaaaagtagttataaaaaaaaaagacaatgtaaattcaatttgattttccattcaaagaaatataaattttgagaaagtctactacttctctgaagaaaaataactaataatctcaaataaaattggttattttcttaaaaaaccatcccataaatgcatgaaaggatgtgtacctaccaatgatcaatccaactcaatgcaattcttacaaccatttatacctcacataaccatctaaatcaaatgtttttggactcatttaactaaagttttttgaactttattccaagaatttgtgtaaaccagtaaacaccaacaaaaacgtatgtttttacaatctattttttgattgatttcttcacatggagcacatatatacattaacaggacaaaaaagggacttagttcttaatctctgcatagttctttttacatcttaatctataaaattttcatctcctatgtaaattataaccagaaaggaacataagagaagagtttattcaataatgtttatatctctttcttcttcagattccatcttctgaatgattcacacacagagactacgtttcttgtccctcacgtaaaacccaaacatcaactcgtagcttcagagatgctctgcaatgatggcctccatgtttttgatctcgatgaagctgaattcgttaacactgaacgttgcttctcatctttcgtttcctatacaaagaaaaacacaaacccattaattttcataattttatattaatttggggaaagaaatagagtaaaatctttaaactaattactttaattattcgagtgaaaattgattcttgaagctaaaccatatcttaaattctaagtaaagattccgtaccagattctgattcttgtcggattcttcatcaatcttcttctccgatgatggcttcttcttctccttactcgtttcactttggtgtttctttgttttcgcgtacttcttggctcttaaaaccttcataacctctgaaaacaaatcaaacgctaatttaatcagaaacccattacaagaacacaaacagacacaagctaaacaaaaacaaatatacaagaacaaaccttgtgaagtgatgagacgataagcatgaccaagtacaagattctccgttggtcggagaagtttcacgcgcgtgaacctcacaacctttctctcactcttatcatctgttgttgttgttgtcgccggaatattcttctccggcaaaggaataataagagaaacgtagtgaccaggatacatacgcatgatctcactaacggatacaggaccgtaatatctatcgatcttgccatcaggatgttgtagaaccaacgcagccgcatcaaccgcttgacaatttcccatctcttacacaaacaaaaagaatctctgttcttcaaaaaaatgttatgattaaagaaaaaaaacagagagtagaatgagagagttgtgtgaaggaaagaggaagagagaagagaagagtctttttcgggacagcgtgaagagttaggtccaccacactggctttgcttataaaacatgtgaaacccaaaaaacaattgttattatttaattttggtcacttttatgatgttttgtgattatttaattggactgtcatttgggagttgattaatgataagaataataatattatttaaagatttgtaaccatattgttgcaaatttgactgtggttgcctggggcatctctgacgtttactttatttaatttttgttatttttggagtttaaaaatttaatggaatagagtaataggatggtcggaaattaaatagttgatttgaacgggtgggtgccggcaccggagatcagggaccgatgattttgacattgtttttgttcttactgattcatataatttaagttgcatttaattttcttactcgttttagatcatgtgataagccaataaaccatagtttttagcagttaatcatcgaatgttgtagcgtttgacttttatttaggacttgattatactactactgtcaaagaataacttatcgttccgaagttaataagtttctttttgtgtaatcaaataaaaaatatcagttacataaattgcactttctgaaaaagaaacgtaaggtgttgtcttcttttgtttaatttataatttaatatgtttgtaacgtttgtaagaatggagaaaaatattagtttgaaacggcagattttcaaagtaatatttttcgagtcgtttttcacttgtaagttgtaacgtttcaatttcgtaacgataggtaactaatattttttcgatattttcttacagaggtttatttttgtccaactacccataattcgatataaacatcatgcatatacttgaaaaaatgatgttaaagatagttagtactgattttttgtgtgtatatttcccttttgctcatttgtatagataacgtttaacactgaaattataacaatgggtaccaaatagtactatattagtcatactgatatgagttcatcttcaagacttcaaccaccgaagcttatgtattattctgcatattttcaaattcgaccgaatataacatttaatgcacgttgaacttggaccatggacaaaacgatatggtatatagatttagacgaatataagaaaaaaaatcagagatagctgaagataacctaactaatagatccaaaaaatcaattttggtaccactcatgaagaataaaaaaacaaaaataaaataatactttagaaattggagacaaaaaaaaagctagtatttttttttgggcaaagaaataaacaaaagtataggtagataaatagcccaaaaaaaaaaaagataaataaaaacagaaattgtggattgggtggacaagggacactgcaacttcttatctcttttttctcactttcacggacttaaatgctttctcttgacattttatttttgtttttatttacttttgcatgattcattcggttagtaccgatttggttcttttgaactccggttcatgtcgcagattggttcagggctaagaatgggtcgtcccattagtgttcttgaatagcaaatataatgtacccattccttcacgaaagaacccatatgggaaattcactcccatctgaaatggacaattgtgactactatattcgttaccagcaaaatctacttttggtattgagagattatccacaatgcaagaaagttttttcgacccctatagcttcttttttttgttgttgttgttgtcaaacttcgacccctatagctcattagttatttgttgtttagtaactatattatacgttcaaccacacaatgattgtcatttatctctctttcccctaaagtatttgttttcttacatcatcatcttcttttatcttataaaactaacgttatcttttccagggggaaaaaaatatcttaaaaacaccactttaatgatgactacgtatggaagagatatgctaggacttagggtttgattataagacgaactaaagtgagatttctaggaatgattatatatctgattattatcagtggaagaatactgagaaatctataaagtacatagttcttccgtctcaattgactcaaatttttatagggttgttattgtacttttcttaaagtaaattttagatttaaaatttaaagacacgggacataaagatttcagaaaaccatatacgaggtttaacaattcaaaaagaaatatgaaaaccaacaacaaaaccaagaggtgcaaatatatagcttcaactcgacaagtagtgaagtaatagtcaagtaatgttctattagctcgttataacatgagtagtaattatagggctcatttaaggatttattaaaaaacaatcttatcgcacatgtattacaaccacttttactaaaagactacaatattttatgttatatgatctcaaacttttttctactttgtaattagaaacactaattaacctagtgaatctaagtttctctaatatatgtgaatgtgatacgtcatgtaaattgcagtggcttataagattcatatggtagttttacatttcgaacaaccggtaaatcaaccatcactgcaatcccaaatttcagccacgctaagtaaatgttaaaatgtaatacatgagatacagagaccatcgtgcgatattttatgttactatacacattttattcaaattacgattttaatgatcacagttattaccaaacgatatacagtaactatggacccattttcgagttattggtccgtaaaatcaagaatatgcaaatactcacatgacgtaatcaattcctattataaatagaaccgcaaattcggatatcctaaggaaatatcttcatgataaagtaatttacctgactcatgattatcagtagtgtgccatcaaaattatattttaaaattgcaaaaaatatatattaaaaagtgttgtccttcgtggatacatccttacgtacgtccctacctaatagtttcaccattcattgattttgtacaaaccttttttgtaaaacaaataataatagctaaagttaaaattcagatttgcatatatacggagacctaatcacattgacgtttgtacggcgaccaacacgcaaaagaaaaaagaaaagattttggatcgcaaattgtgtcctttggttcttcatccacccaacatcacaaattataataatcttttttactttcgttaaacacaaacaaaaccagcctattcttccagagcatcttggacttgttggtgaaatatcttgagatgattaaatagtatataggaataatgaaaataaattaagtataattaaatcccgaggatttagcttatatttttagtttaagactttaattgttgacatgtgtgaacacatgatctgatacaacggtcagagtgtgtgtgtgtgtgtgtgtgccatgtgaaggtgttggaaggtctttcgtctctcaacttattaaatgtctttgacgattgaaacttcattttcaagtttgttctctacatcgatataattgcacatcccaatccatgaccaaatactaattaattcagccctttaaatcatctaattatgttattttaaccacaatgaatcttgtaacattgtaaaacaggtgtgttaaatcgatcttaactggacatatttttgttttggctggtcttcgtttcgttgtttacaatgccgctgtaaaaaatttgaacctactttttcttggtaaattttaggaacttcaacgggttgatctgatatcgctatacttacttatagtattcaaaaatttataacaaaaaatacaatgttttgtattatttcatatatacttatccattctaagtaagagcaaggttgttgacaaaaaaaagtaagagcaaggtcatcttttaacatgcaatatttcaattatcacagaccatgaaagaaattttgtctttaatgtttttatttaaaaaaaataattgagttttggtcattattttttattaaaaaaatcaatgaacacatcgattattaataaaatctttgcacataacgtacaaataatttgagaaggatatataaagtgtgaagcttaattatcattagaggttgtgattacaatatatatacacgagagattagggtaatactagttacaattataccttaactatacataacctctatacacctcctcaagatggaggcagttgtatgactccaatcttgttatttatttctgtgaaacgttggcgggagagaggcttggtaagagcatcagcgagttggtcgttggtggagatatgagcaacacgtagtatcccagcttgaacattgtctcgtatgaaatgatagtccaaggcaatgtgtttcatacgagaataaaaaactggattggcggagagatatgttgctccgacattatcgcaatagatgacgggagtagtgggcaatggtattccaaattcagtgagaagtgagatgaccatcgaatttcggagcctgcgtttgcaactgcacggtattctgcttcggttgaggatctagcgacgccacgttgttttttggatgaccatgaaatgggatttccgccaaggtatatgatgtatgcgttggtggaaacataatcctcattatcacctgcccaatcagcatctgagaagccatgaagtgttaacgggtttttggcgcgaagaaaaataccattcgatggagtcccggcaaggtaacggagtacgcgtttcatggcctgccaatgtagatcggtcggtttgtgcataaattgtgagagacggttgactgcaaaggcaatgtcaggtcttgtgaatccgaggtactaaaggctgccaagtatttgtcggtatcctccgggattgtcaatgggagtgccagatgttagcgtcagcttcggtgttggcgacattggagtggagactgttttggcgtccaacatctttgttttggtaagtaagtcaagaacataccgacgttgcattaagtgtaatcctgctttcgtccttgtcgcctcgatttcaagaaagtaactcagctggcccaaatcttttaaagagaagcgattagccaaacatgtaataaattgagcgataagattggagttacttcctgtgatgagaaaatcatcaacatacacaagtatgtatatgtagtctttgttatgttggcgtataaacaaggaggtgttagcgacggaattcgtgaagccacatgtgagaaggaacccacgcaattcttggtaccaagcgcgtggagcttgtttgagtccatgtagcgccttcttgaggtgacacacataattgggtctgtctgggtttatgaaaccgggtggttgtgcaacgtaaacatcctcggttagacggccttgcaaaaaggcgttgttgatatcgagttgtcgtatatcccaagagcgactgaccgcaatatcaaggacagtttgaactgtggtggacttaatgacggggctaaatgtgttggagtaatcaagaccgtgttgttgatggaaccccttagctagaaaccgtgctttgtacctgttaatagagccatcaggattatatttgatagtaaaaatccaacgagtaccaacaaagttttggtgtggttttggcgggaccaagtcatatgtgctgttccggagacctgcattaaattcctccgacatcgcatttcgccaatttggatcacggagagcttcggccacagtggttgggattttggatttaccttttggagtggcggcaagggtaagtttttttattggttttgttatgttgtttttggctcgggttctcatggaatgttgattttgtggaggtgggggtggggaatttgatgactgtggtgatggagagggaattggagtcggggaagaggaagaagacgatggggaattcggtggagttttattgggttggtttgagtgtgatgggctggaagtgggctcagatgggctttttgaggtggtaggtgatgtaattgggcctggtggattggaaggtgatgataggccatagtccacgtgagaataatctccatggagcgtcgttgagtctcgattgctcgagaattgtggcgacgatgtcatgaccggtgacgacatggaaggcggcgagagcggagagggtgacggcgccggttgagaaggcggcggctggtgaggatctcttgtagggggtggtaccgacggaagctgtacgaacggcggtgacgggactgttgtggttatggagtggttgtttgattcttcaaggttggtgaatgggtcgagtgtgggtttggtaaatgggtaggtattttcaacaaattggacatgtcgagatgtatagacacggccggtggttcgattcaagcaaagataggcgctttgggtttgtgagtagccgagaaacacacacggagcaggtcgatcatcaagcttgtgtgtagtatacggtcgaagccacgggaaacagaggcacccaaacactcgaagtttgagatagttgggggcttgaccaaagagccgcttgtatggagaaatgccgccaatgacatcacttgacattcgattgatgaggtatatggcaatggtgaatgcatagctccagtatgatttcggcatagaggcttgtccaagaagtgtaagaccagtttctactatatggcggtgcttcctttcagagatgccattgtgctcgggcgtgtgaggtggtgtcgttaaatgagtgattccatttgaggagagaaaggagcggagagcaatgaactcaccaccattgtctgagtagagatgaatgattttacgttgaaatttgtttgcaaccaaggctttgaaggtcatgaacacatctttgacatgtgacttttgcttgatcgggtagaaccatgagtatcgtgtatagtgatcgacaataacgagatagtatttgaagttgtcaatggacactattggtgatgtccaaagatcaatgtatagatattcaagtggttgagtggaggtaatagtgtttgtatgaaaaggaagcttgtgtgttttattcaaaaggcaatcagaacagttgaactgtttttgcaaagaattagaaacaggaagagaaaattgggaaacaacaacttttaaagtagataaagacgggtggccaaggcgtgaatgccaagaggtgaggtcggtttttggagtggttgtagtgaagtgggatgacggtttaggtggattcaccggccactcgtacaactcgtctttagtcctgccttggagcaattggacccccgttttgagatccttcacctgaaaatgtgcaggaaagaattccacagacaccttgttagcgttacacattcggtaaactgatatgaggtttttgtgaatattaggcacatataaaacatcagtcaatgcaagagagcgagagggtgttgaaattaaagccgaaccggtgtgggaaatggataaaccagacccgtcagcaatagtaacatcttcaccgccagtgtatggttgatgaagggagagattgttcaggtcagaagtgatgtgatgagtcgcaccactatcgagtaaccaattgttggcgttgtatggtgaggctatagctgcatttgctcgtggctgccacggtgtgaatggtgaggctgggattgactgttgcgagttgtagctgctaccttggagctgaggacaccgacgtgcgctgtgtccatgaatgctgcagatttggcagcgtccttgatagggttttggtgtgtactggttctgtcgctattgaggttgattttgctgccagttgttgttgttgcgaccatgagatttgttgttgcgattgttgttgttgtattgattgttgttcgagttccctttgtagtttgcagcatgagcagtggcaggaagcgatggcgttgttgcagcagcacacatgagtttggcttcacggttgaggagcttctccagaagctcggtgagagttggaggcttgtcacgaatctctgtttggtcgaccacagacttgtaatcttccgagagacctccaagaaggaactcaatctgttcagcatgttcaagtggctttccaagaagagcaagctcatcgaaacgggttgtgtgaccttgaaagtactcagtgattgtttttgtacctttgctccattgtttgatgtgttgacgcatttgctggatgtggccccagcttggtgtggcgtaaatggatttgagtttctcccagatctctgcagccgtgttggatcttgacaggagaggttgaatggtggtcgtgattgtgccaaggatagcactgtaaatcagcttgtcttgacgcttccaaaacttgtaggcgggattagccgcagaaacaccagcagtggtgatcatttcagatggtgcggtgacggatccgtcgatgtagccagcaaggtcgtatccatcaagcaaagcgtgaacctgacggttccacatgatgtaattcgtgggagtgagttttgtgatgtttgccatgttgacattgagaagggttggtgtttcagagaaagcaattgtttctgtggatcccgacggtgtggaagtcatcgtgaaaaatgaaacagacttgaagaagagtgtatgaagaagaggcggcgttaaaaaaaaaagtttaggtctgagagtcgtaatgctctgataccatatagagtgtgaagcttaattatcattagaggttgtgattacaatatatatacacgagagattagggtaatactaattacaattataccctaactatacataacctctataggatatgcctaaaaaaaaatgaaaacctatatataggggtgtcaaaatgggtaacccaactcaactcaactcataatcaaatgagtttagggttaaatgagttatgggttgatccaacccatttaacaaaatgagttgggtcaacccataactcatttaatttgatgggttgagttgttaaatggattaacctattgaagtaataatttaattaattattattataaaacaataataaataattatcattattaattcattatcatcaaacttatgatatttacggattccactttttacggatttacgtttttgacgataaaatcatgggtttacgtttttggcggaaaaattacggatttacatttctggcgggaaaataacgggtttacgtttttggggagaaaatcacgggtttacgtttttggcgggaaaattacagatttacgtttttggcgggaaaattacatatttacgtttctggcgggaaaattacgggtttaaggttttggcgggaaatctcgggtttacgtttttggcgggaaaatcacggatttacgtttttggcgggaaaataacggatttacgtttttggcgggaaaatcacgggtttacgtttttggccggaaaatcacgggttttcgttttttggcgtgaaaattacgagttttacatttttggcgggaaaattacgagtttacgttttttggcgggaaaattacgagtttacgtttttggcgggaaaatcacgggatttacatttttggctggaaaattacgggtttacgtttttggcgggaaaatcacgggtttacgtttttggcgggaaaattatggatttacgtttttggcgggaaaatctcgggtttacgtttttggcgggaaaatcttgggttttcgttttttgcgagaaaataacgggtttacgtttttagcgggaaaatcacggatttatgttttttggtggaaaaattacgagtttactttttctcaatttcatcgcttgtatatttaagaaatttggaaaaatattaattttattaaattggtttagatgtgttggttaaacttaaattggtattggttttgagattttagttggttttattcaattttacaaaatttgatgggttaattgggtaaaccattgaaaccattaaccattacaacccaacttattttactcatcaaaccaattgactcatcaactcatttgacccatcaactcatttgagtcaaaattttcaactcattagggttcattagttgagttgacccatgaattttgacccattttaacacccctacttatatacaatctggttttgtctatttatatagactaaatatgaaagggctgagaataattatgatctaaactctaataaagatagctgggcatgcgactaaactagggtattgactgtgattcgactcgggatatcatcatcatgaatttcatccatccactatcaatcattttgcttattagatattaatatgtaaaattttataaatttcttgggggtttgaccgagaaagaattaatcattcgagatgtcaaaagttcatgtgatgtgtaatcatttttctttgttttccacatcaaaggtgtttttatctatgcatgatgactccgatgagattgtttggttaatgtttaatttgctttatgcctaagcatgttaacaaatgtgattttagtcagatgtaccacttctcgtggaaactttccaaatctatcaatttcttttgttcttttatgaatctatcacattttgtagtaatgtgatagtttgatgatgatttacccttgctagtagagcatgatttctgtttatcagataaagggacaaaagtgatgatagagaaaagagtgaagcatcaacaagtttaaatcgaatgattaggatggacaaccagttggaatatgcaatggatcagttagaatagacgattagctatttatctttatcatcgttgggggacaaaatcatatatcgggagggggagggggaggggggacaatttttggaaatttgtccttacgggtagtactagaatacttgtccacatgacgatttgaaataaccgaaggacatatgaggaaaaaataaaattaaactcgagacaaattcatatcaaatgaatgatagaatttaactcgaggataagtttatattgaatgggtaatacaattatattgaagaaaatttcatatcgaatgactaatacaattagaccgagaaaaaattcatatcgaatgactaatagaattagataggggatacgttcaaatcgaataagtagtcaaattagattgagaacaaattcaaagcgaatgagtaataaattagatcgaatagaagattgtggaccaaaatcataatgacgtgtagccgatttaacgtcgtggaccaaaagacatacaattgatcaaatatatttcaaaaccagatttaaattttgtaagagatgaaaatcacataagaagaaaaaaaacttcattgttcttgaaaaagaagaaaagttaagaataagagagaaaacaataagaaaaaataagcattaaataaataaataaaaatatatagaggaaagaaacaacaccatcatccgtttgtgaagaattctcacttgttacttggacttaaactcttggtttgcttgttactttcataccgcaaatggttggtcttgtcaacaaagaagacaattagcgctatggaaaggaccatggagactcctaggatccaataagttgttgcttgtggaatctactgggctcgtgagtaaaaagccaatgattgcagtagtgagacaaaatagagagaggtctcgtgccatacggtcctgtaccgtgatcccaatcacaaagggagccaatccatcaagcacaaaacaccacatgcctagaaaagtgtccatgatagatatcaacaatagtcgactccttatgatgctgtctatgaatgttgaaagcgttgaggttaacacagctcctccaaagagatatgcgaagatcttcacttgtgagttgaggacacaaccacaaattcatatcgaatgactaatataattagatcggggataagttcaaatcgattgagtagtcaaattatattgagaataaattcaaatcaaatgaataataaattagatcggagacaagattgtgaaccaaaattatgatgccgtctagccgatttaacgtcgtggaccaaaaaatatacaattaatcaaatatatttcaaaaccaaatttaaattttgtaagagatgaaaatcatatgagaagaaaaagaagaagaaaacttcattgttcttaaaaaagataaaaatttagagtaaaagaaaaaataatagaaaatgataaatataaaataataataaaaataataaaaaatataggaaagaattaaacatggaagccaaatttttggcagcttttgggcgtctgcaaaagaaaaagcatttatgtcatttaatatttgatatgtggtagataattagaaaaggatgaagaagaaatgatatttttgaaaagaattttgaaaaaatgtggtagttctgttcattttcgcttatatgccagaggtggctgtttgagttacaatggctgaatggtttcctacaaagttggaacaatgacgtcattaaatcattttgtgattagattgtttattggtcatcattcaaaaaatttagtctttggtgtatataggagaattaaattacagttttgttggattccaatatcatgttaataaagtttatatatatatatatatatatatatatatatatattgatcatgatttaattcgttctatgaattagaagttactaacttactatttgtattgtatatgttttgaacatgaaatttctgaacatattaatgactagttagcaaattaacaatgtatcaatgaattaacaatattcatgattaaattaagtgggctttctcatgttttatggttctagctttcttattttcacttaaataaactcaaattttatcccaaaaagttatataatatatcgtccttggttcataaaatatcaaaaaaatataattcttcttttggtttatatatatatatatatatatatatatatatatatatatatatatggtattctatggtgttactaatcttcgtatagataagggaaccacttattaagtagaaaatgtggtggtgtttaggacagtccaaagttagttgtagaatgtcgttttgttactttgcttgccactaaacacccaaaactcttatatattattcgttttaaacaaagcacttgtctaatactacatcctttaattgtttggcttcttctaccaaaccattaagtcattaaccatagtacactgaacctaaggatcctttttctttcccttctttttatataaataatgttatactttcgattaaggttttttatacgattaatattttgtatttataaatgaaaacattatttttatttagataagcacgatttaactaatagtaaaacaatctgcaaaatattaattatctaaaccaataaaaatataattagttttgcattgaaagttataaatatcatctaatctaaaataaattttctcctaaaacacccaacagtttagcaaaaaaaaaaaacaccaaaaaaaaaaacgcatggagacaaacacaaaacataaattacgtcataggttattgtatttaactcttatctaaatattgaacattttatgatataataggggaaaattgaattaagtcataaaagtagaaaagaaaattagtcattggagtagaagtatgaatgataaaggatttagacccaaaaaaaagaatgataaaggcagatacaatacaaactaggtgacatttataggaaaaaaaaaaaaaaaaaagaaaaaaaaaactaggtgatatctaattgctgacaaaagtgttagatcatagaagcaatcaagcaactagataatgtaaaacgcaaatcttagcattatgtaatagatattcttttatgtgcgaagactaatttcttttcatcactcctatatgtttttgacatcatcaagtctaattcttttccataaattatcaaatacttttctatagtaacaaaaacagtgtgtgaaatgtccaatcgttttccgacaaagagaatcgccaccaggacactacatcagcaatcaccaactatgaaggatcctacagagcatgtcaactttttcgtaaacagttttatgtaaatattatagacgttccaatcatgtgagaatattattgcacataatttccttaaaaatactgtattttcaaaatttgcggaaatgacatttattccatattacagagatacatataatacttatataccctgaccacgagaaatcaaacagtgtttgttttgtaatttacttgttcattgatacgttttgcaatagctaaatcaaaaaagtttttttatgttaaaacttttaggtttgcaaattatgaaaataaaaataaggccaaattaatttaattgagctgggaatgcactagatatatagaaactctggagctggataaggaaaatatgtattatatatgtaaatttctttaagtcaaagtatgtccaccaaaggatgtttagagacgtgcatttctgcacgagtgatcttacacactttatcaatatgtatattattcgtattttaattaacatttttttcttagaagatggacattttaaattcgtttaaccgacaaatcaaacagaaacaaaggtacatgtaatcttctgacgagagatactctgaggaaacttttacatgtgtcgctgattagttagctttaaagttttgcatgatgtataacgataataataaataatcttatatgcaaacatgataataaataaacttactgtcagcttttacaaaataaatggaattcatattggcttcaatgtgcaattgattcgatttcccaagatcattttttaatcaagaaaaaaaagttatcatttcaaaagaaaatagtttttcttgtttgttttgtcaactatgaattaaatttggataataacgtaacgatggtaatatacactacttggattattacgtcgtggccatcttagattgaagaagtaagttaagagacgggaaaattataaacgtttttggacgtggaaaagcaaaaggatcaattcatccaatttgcatggattggaaagaatgaaaatcgccattttaatttacatatctattatttaatagggttatagggtcatatgacttacttcctaattaggcctttacgtacaaattgaagaatgttagatcgtactggtctattatgtgaaacagttcacgtataaatacgaacacgcacatgtatcaatatgtcaagacatctctgattaaaatacttcaatgaacttggaagataactatgagagattgagagtggaaactagaaaaggaaaaaagaaaaagaaaaaactcaaaaggaatgagagagactacagagaaggatgagacagaagcagaagtcactggcctctttggtcgctcaaattgcttcgatttcttaagaaaaatacaaaatttgttgtacaacattttcctaacactataacattataaattaataatgttaggaccataaaattttattaatttatagtgatattaatttaatttataaaaatatttaagcaaaatacaatactatcttttccggaataaaataaagggtaatattagtagataaccaaataaaacatacaaattaagaaactagcagagagaaagttttttttacaaaataaccatggacccacgttgtcggaagaaagaaaataacaaagctacccttcatttgttgtaagatgaacagtaaacgaaacacatccgtgtaatttttcaaaatagcatgtaacattaaaatttcacatgttatatttagtttaaaaacatgctatttcaaaaaacgttatgaatttttaagaaaaaacattattatgaaattcttttacatgaacagaatcttaaaaaaaaaaaattatatgtgattttaataaaaaccatgtattactaaaaaataagaatatatttttaaagaaatcacgtgtgatcttaataaaaaacgtgtattactacaaaatatcatgataaaatgagatattaaactgaatagaatgttttttccaaaaaatactatgtgctttttacaaatactatgtaataagagaaaataacaagataaaaagaggatattatgttatcgcatgtatttcggaaaaataacatgttacaaaggacatttacgtaattacacgtgttctccaacatgtttccgacaagatactgtgactcaaggttaatttgtacattcttttcaaatctatagtcatttattataaatactctaaaataaatgtcaacaaactattcgaatatctagatgcaaatgaagcatactcaaaaattcagagtttttaaaggaaattgtgatttctgtctataatgttggtaaagaacttgaaaacgataatgtgaaactttttgaaatagtgacacgtaaggaagcaattaccgcgtctagaactctttacaacttttggatgcatatcgaaaagacaacaccaagagtttttgatgcaataaagaaaattagagatgaacttcaaaaagattcaaattttaagaaaagacaaatataactaaagtcatattatactagattatctttaaaagtatgcttaatattagtaattattaatttatgatattattgggaccatattttgacatagagatttcaaaaaaattattatcatattatcttatcgattttggttaattttcacattggcccgacttgagaccgatatattttattaatttattgtgtttattaatttatcgagtattaatttatagagtttctactgtaattcataatcaccttagctggtatattctttaagcaacattaatcattttaatcacgtgatgaccagaaatgaagaaataatcttccctacttcctccggtttattgcaagtatacttatacaaatttaatttaatttaattgcatttttaatataatttttcctgtatttttaattaaaaactatataaatttaattctatggttaagaagctaaagagggaaagagaattgaagcttgaatctttctaagcaaatcttcgattttaatctcaacaaagtagtacgagagtttcatgtgttcaaacaaaagctaggaagcaaagttcataaaactcaacaattgtgcctacatgaagagaggggaaaaattgatggtaaagagatatatgctgcttgttggagtaatagataaatgttaaacttccatatcttcttatgtaaatctctagtgtatattctctagatcctcctttgtattctagagaaagaaaaaattccagctagaaatgtcaaataacatcaatctgaaacggcaagctgtgcaaagtgccctacgctgaaaacaggcacacaccacaaagaagtacattaccaaagtaactaaacgggatacagtttgagaaaacagagttatatttgacacaaaatgttatacataagagtagagtcagtgccaagccaatgaacactttcagcataattttcattgatcacacagagggaaaatacttgttgagattgaaaggcaaagagtaaaactcttcacttctagtatctgatttgaacgacatgaatcgatcccaccaaaacatccctcggtctttcctcgtcgcactgtctttagatgacattgttacatcaagaaagaatgccaaaatcccagccacaaaggctttagaagagaatggaacattgatcatatcattgaactgcacagaacacaacaaatcagctttgtgttttggttataaacttatcataagtgggaagatatcgaaaagattgagattcttgttttgttatttacccatcttgcgtgtgtgtgaactggtccatacttgttaacagctgtatactggttgaagtactgtggtatcgataagcccatgaagaccgagaatccgaggatgaattttgttctgaagctgtttagattacagaactgaagtaagcttagaccaccagcacctgcatgcaatttcatttctttgctcagtttgcagtttaaaaaacctagcggtttcaacaaaagaagaggtgtttcaagaaacctaccaacgtatgcaaaaaacaagcaatgtaatgctgcgactactggagctggaatcgaagcaaagatagctccaaatttaccaagaatggaaaagaaaatcataaaaccggctgatatttgaactacccttctactaccaacgcgtgttagcgctaacaaaccggcattttctctgcaagatcatcattataaccattggattttgcaataaagatcgttggtttcggttcaaatacttcatttgttcataggtaaactagtcttacactgacacagatgctccatttcctgctccaaatagtccacagagaagaactcctacaccctatacataaatgcatttgcttaaatatataatctagtaaggaaaattaggatgaattttttttgttaatgttacctgccaaccaaccccacggctgagaacggaaggcgggggcggagttgcgcttgcgaacctcgacacaacaatgtaagtccctgtggactgtttacatgaatcagaagtataagaacatgaatatgcacaatgatctaagtatttagtgttgttacagcaaaaagaaaattttcaattctgacctcaattagggaaacaaatgaaacagccatcatagcgaaagcttcaccggcatgaaatgttggaggtccccattgaaaagggtaaggaactcttatcctggaatcctcaagaatcagtctcaaaatgtactaaattatgtagccaaataatgtcactagagaatgcacaaagataagagacaaagtttctctaaccatggagagccgctaataaggccagaacgatctgttctacaacttgtctgagtgttgactcctgtgttcttataggctccaccaacggtaagtagatgcgcgtaaatccagacaataaccacagagaaaatcacagcaaatcgatggaagacttgtctttctcctcgaatgagatgaggaatgtactgcaaaaagaaaccaaaatgatgaatctctagttaacatctctttcgaaatcacgagaagagcttttcgcagagcgttaacctgtgagaataagagtagaaggatgatctcaggcagtccaatctcgatgcatttggctagctgccagaaacagaacaactctgtattcaagaaaatgttataaaactgaaagagagatcaagtaaagcaataacacaccagagggaaaccgtgctcataaagtccaaaaccagctagtgctactagaggaactgcagagagaggactcaggagcctaaagaaagtaagaacaatcatcagaaaatagcagaagagaatctgttagttgtgttttgtatatgattgagtgttcttagctaacctaactacattgcgccaaagcccgctgaagccaacaacgatctgaagaatcgaggcaacgataagagcaccctggattcctcgcatgatcctcttaaatttctgcatattttcactctatgaatgagaaaatatgatacagaaacagatagatgctctgtttttctttaactaacctcctgaggatccaaaatgtcgctgtaccgaccagccaagatgatggaaagcgtggttggtacataggtgtaagagcctccaatgaccgctggaagtctagtcccaaagaaactttgcaataaagtattaagtccagaaacaaaaagtaatgtctgaaccatctttgccttctcttcctacaacaaatgaatacaaatccgataaaaaaacagagtttctatatatgttcatggaaatgacttgtctaagaagataacttacatttccaccacccatctgtggaactaaatatgttgggatgagaacagttgttccaagcatcactaagtaatgctgaaaccccaaaagtattgcctccgctgatcagaaaaaaaagaagtgatctttagttgttaaatcaaagattacacattgcacaaatgaaagtatgagagaagatggttacgccaaggaggaggacttgtgatgcaataagagatagaagaaagttgatctttcaccggatgtggctcaagcccatcatgttttagcggcggcgctacccctcctcctcctccaccaccaccggccatttcctttaacttctgatgaaacccaaaagcaattcaagagaagaaaaaacagagataggttgagtctttatgctggaatcttgaagaacgagttaagtttgtaggagcttggaagataaaatccaaacctagacaccgaaagtgaaaaagggtttaagaaatgagagtgagaaagtgaaagaagacgaagatgaagctagaaaaagagaaagacatttgtcggggaatttaagtaagaaaccgtcaatataaagcaagaacgtcaaaaagttgattttgcgcgttttcgtttaaagacctttgagaagaaagaaccacttggaggacacgaaacctataagaaaaataaaagcttcaatgtgaagaggaagaggaaaagagctatttttataaattacttttaaattctagtgaatataatatagaacagcataaattgtgaaacaaagaaataggtaaataaatttacaaatacaaacaaaagtattaaattttagttttaatatagagtttgtatatttatagcaacatcacctaacttaaggaccacatttaaagtatattataaatcgtatttgatatcaataaaacaagagattttggaaacacgcataaatagtatgtatactgattcagacagaatgaaacacaaaaatgaatatcttctttgctcaactctcttccattaatcacaaatatcaagatagaaattcacatttaatcgctaaaatcacgttaaatacagaagcttgacaaagtttttaggagaaataatgcaagaacactttgaaagacaaaagttaagaaagtctggacgttacaaataaaatgtaatagagggaactagagatcgataactcgacggtaaagaaacttgaaaatatttcaagagttgacagaatcgagtgatagttgttggtacggataaaatattcaaaaaatattatgtgtttagaaattgtatgaccgtcaatttagaacctagttaatcaaaaaattgtaattgaggaaaaatgaaataaattcaacagtcgcttctttcacctttatatactttagcataacgtaaagtcgaagcaatccgtagacatgcatacttctcttctacctttaatgactccatccccacactttactctattaatactatatacttttctaaattggaaccatattgaatggggttataatcagttttgggatgtttttatttagcgtaaaactctaccttactacaccacaagttacaaccactttgacttttgaaactttacaagtaacagtattattaagggaggacttttcacttgaaaaatttgacaaatcattgctctgtgaacatcagtacttaaaactttttagtttttgtgttttggctgaaaaatagaccaacggagttccagaagagacggcaagttcttcaactagctgacgttagtcgtcggttcgacagtactagcagtcgctaattgatagtatactgtatatagtttcacaactaactgttattttttggggacttactgttagttttgtctttagataatttagaaaaaaaaaaaaaaactgttagctttgtcattggcagctgctagtcactcaccattagctaatatttttgcaagaacgtctgccaacttttcattggtaactactagtcgtcacgttctaacagttactttagggagaacatgtgccaatttttatctcaaattttttaaaacttgtggtagtggccaaatcagtggcaatcaaataaatagcatatagagtaataattatattgcatcgcaagccttgtagaattgaagttttggggatttgattcatggatatgcttatgaatttgatcgtgaacaaagcttatatgtagtttcatgggtactttattttgtgtttacgtcacaagttgatcagttgagttactccactgaagttcgttctaattatgagaatgctgattaggaatgttgacttggtaaacacgaggtcgagggacagaaagacttgctgaagcaaacactagattgacataaagaacgtgtcatccgtcattaaaaacaaggcatctccaagacttgacagtgaattaacatctgaacaagtatgtataactttcattccctgctctagaagctttaacgagttgtgcaatttaggttatgaactctttgtttcttgcatggtttacaacgttttgtttatctgataagttggtgttgcagtcaaaatagggttacagagaaagaataacagaaagaaaggaaaagtttgattaatcaataataaacaagaaaaaaaactaccaactttacaaacatggatttgtgttggagcaaacatacaagttaagagatactaaaaaatgatcaatcaccgagaaaaggtgaaagaaacatgatttcactaacgtagtcatcaagttatcaaattgaaatcatatcggagctcatcgtttggcaagtattggtggtcatgagaggatcgctaaatgtatgaagtggtggtagtcttgaggcaaactccagatcccaaacatgatcatcacaaaaattccctagattgtaagtttggtaaagttctgccgccgcctcctgaagataattaccgccgaaagtgccaagatgatccattcccgtgtaagctgcatcttttgattcgtaattggaaacattctcgttcaaattccttgacccgcggaccacgtaagccaactcgtcaaatacatcacacgaacccagcttcttatctgaaaccctaattagatgatcttctgacaatatatccgtcaaattaggctctatcttcaacttgtgatcggagatggccgagttctctgaaacccttgcaccatctttttcggaagaacccgtgagcgtcttcttaagaatttctatcttttgttccctgactccaagtaattgagagtcaaggtgaaggagatgcttccttaactcctcacgagacaaacccttgagatgatgagggaagtcattgagatcacatgcatgattcttcctcctctcatcactcaaggcattgaacttggccacgatctcatgtagggcttgtgggttatgatcttgagactgaggccaaacatggagatcgttgtcgggaccgtaacagatgaaaccgacagagttgccgcagagaacagagagctctgaggctttcttcttaaagcctggaaatctctgtttgaaaaagctctgtttcttcctatgcaaatcaccatcatcatcatcggacttgttaggtttcttctgacgaggagccatcttttgaaagagagagagaagatgaaactttgattaaatcgtgagagagagataaaaagcagagaactttcgatcgtaatgggaagtgcaacgagaaggctatgatgattctttaatatatagagacttagaagattaggtttcctcaatcccacaacggtcataatttggtgaaaatgcgtaaaaaatcatatctaatatgcgcgtccgaaatcttgtgaggtcttttcattagatctcgtagtgatattttcctttttttgcttcatcctattttatttagtttttatgaaacgcgtaactgtatttttcctcaattaattgccaacaaatattttataaatcgacgcagtcttcttaagtggttttgtcaattttattatttggcttaagtcaattatttttatttacctacatatttgctttaaaaagtaataacatttacacatggtctcaataattggatttgcccaaaaaaaaaaggtctcaataattggacaacacaaagcagaacataaacacaactggtcatatacgttaaaccttaattaactcacaactcatgtaattggtaaaaacctgagagacgattgattttcccaatttttcaataagaacactgctttcagagataagatcccacaaaccgtccaacatactcttcaaaccctaggaattctagaatcgaaattaagttggattgatagagaaatagggtaattcgagtccaacgccttcgaaatcaagaattcctcttacctaatttctccttcaatacaacttataatttggcaactaattgagtgcataattaccctccaaatgcttagagataattttgttagttattctaagttaatgactaaacaaatgtgtctttttaagaaaagttcgtagaaaagctttttggttagtctgtttcgggtttgaattcatgtcttcaaccaaactctccacaactggtttgtgtctgattcagcattcacctcggttttggattttattcattttttttgcagatgcggtgggtgctgcaaaaagatgtagctaattggatgttaaacaattttgactgttttagtagctatatatcaaaaacattaaccacaatttgttttcatggtcatttatggttttttttctatttgaactgtttttattgtagtttgattatatcgaatgagttttggttgggttcagtgtttgtgaaaattctcttggaactgatataaattactaaattagatcaaccggatcattcccgtttatagtgagacgaatgccaaagatggaccttcaagtagtttcatataagtaacaactatttactatttagtcctcatttgaggttgcatatatgattgcatcgtgagttttatttggataaaaagtaaaacttatatttttttcgttttattttaactcataatttacttttaattttgatagactttgatacattcctctcatacaaaaaaacgttacaagactttatatatatatttgttttgcttcacacacatatgtttttttttatatataatttcttcgatttacttacccttaatttatgtttaacataacacaactaaacacattaggcgaacaaccatttctgaattaaacttgatcaaaatcaccattcgcgagcaaaagtggagttgtctgttcatctgaatccaattgatgattatcgtttttctccaccgtttcatttggatcatctttttgaacttgactccacattatcaatagatatccagttcctgctatagcagctcctaacacactgttcacaagaagttcacatttaacaacctgaacatatcatattcaaatcgaaaattgatatgtaaactaaaaaaaaaaaaattggtttgaacttttttacttattttaaaatatgaaaaaatcaaaaaggaaactaagggacaacttaaattttttatataacacattaagatatgtatataataaaatttgaacaggaataaaagtcatatcaaacatatatgcatatttgatttggtattaagcatttgggttaaaaataaatgaacgcatgtaactagagaataatttgagtctcttcgttgtttaaatataactttcgaaaattatatttaccttccatagtgaagactattgacaaagaagcttgtgccaaaaatggaagcccaaaggatcccaaatggcttgaagagtggcacataataaggccccttcattttggagcacttcacttgaacacttgttctgattatgctcccaaatattccctataaatgaacaatatatatgattatatatacacatcctcagattacgaaatacatactatatagtaattataatatatgatcacatagatataccgtggcaataatgagatataggtccatgttaagtttgagttcccatgcacttaggtctggctccatgaacgctgagaagattgcacattggagtgtcccagctaaactataggcagacactactttcatcacttgaggatatttttggactgtatccaactgatataccgaataacataacccgaccaacaaaaacaaaaaaaataattaataattaaaacgtgtatgcattacttaagaatcaagttaagacgtgtgtagattcatctacaaatgataatatttgttttcgaaaatcgatatcttgaaacgtaattttgattacctgtataatattccaaatggagatggagagcgtggcgcatgcaaggaggagagagccgagagcccaattgtcagaatttttgaagaaagttaagtagtgtgagattgtagtaaggaaattggaggttggggatgaaggaggagaaggtcttataaaaggtcctaagtaaataacttcaacaaaggctcctgtgaaacatatcaacgtgcctatcactcttccttttgttctcttacttgcccatcctaaccctccttccttactaatttatattcaaaatttattgaaatcattgttagttatagttcaattataaacatagctaaagaaatttaaattttaatagaagtaatttagtttacccaagagcaagagatagcaagaaggagaaagcaggtgactgcaagcccatggcacataccacaattggagagctataacttagccccaaaaatgccatgttctggaacaaaaacaccctgttcaagaaaaatattaatttaagaatctaaactctaatataactatttaattatgaaatcaggtgttccaattttttttatttaattactattttttttaattattacagctattacagtcccaatatatttagttattgaatgaaattgggagataaataggaatgcaaaatatatcattgaatcttatgtaaatagatagacaatgatatatataaagttttaaagggaactaaccctgtaaaaccgagtaggaagatacgaacaagggaaggtttcgtgaggaagggttcatcgtcactgtaaacaaattagaacatctatatcatcataatatctcaaattgagaaagccatgtataaacacatagatcatgctttttaagtacctttcatctctatggaagtagaaagagtaagggaggagaaggagagagccaagagcgttggtgtagacgatgaacacgaaagggctcatgccaccggtcagtgcggtcttagccaagatggtgagtgcaatggtacatgcctccatcaacgccataacaataaatggaactatggtttcccatcttgtatccattaatcccatttcgtttgtgtgcggcttatgttgataatacacagccttggatgagccgaaattttgttgatctctgtctctctctctctttctctctcggagaagatgagagaccaagtccacaacaaaactttgttaggttgtctacttgtcttgcaattaaaatgttagtgtgtcttcattaatatttatatgtgtttgcatgtgagtggagggccaaatgaagaagagggtttttctagacgtggagagagtcattagttagcctttggagaggtgatgaagctaataatttgtttcgcctcatctcttatgactaatatatctaaatagttttctgttggacaaaataagaacattcccttctattttaaaatatatgcaaatatgaaaagaataaatcaaattttggtacacaacaacattccacaaacaaggaaacaatcctaaacaagacttatttcgttttttttttctacgtatcataattatttctacaaaaaaatattcatttaattctacaatattttaaaacatcatttataaaaatagacatggaaaaatgtttaatactactttttattggatttatgtttcatttatatagataaccaaaatatgatgcttttcttaatgtatataaaaatattaattagtggacaaatatcctaatgcaactatttacgtttaatcttgttcggatataataccaagtttctggaagaattgggcttagtataatgaaaaactgaaaacgttttgagttactaattctatgcaatatcaactcccatttgttgaaactccaaaaatcatttttataataaataaaacagatccccacaaaatggtggtggtggtagtataagttgtggtttaaattgcaaaattgatagtgtacttcaatttagtgcaagaagtcaaaatattatttgattgcaagagatccaaagttcgagtctctctatacgcagatatctgttttaatatataactcacaacaatattgttttcgttgtcaaatttcagttgtaaaaccaagcttaaagaaaaggggattcataaacgatgacaaattgacaattgaaattaacaccgaaaacggtattgttgtggtttatatatcaaaaaaacataatttgtgtataagtctttacgagctgaacttcaaaatgaaagagtcgtgacaacattcatccctttgaaaagctgtgttaagatcacagatcaaaagtgtgaaagaaccaacaatcgtttataaaaatctgggtcaatctactgaataactgatttttagttaaaagccaataatattttaacatatatagtactagagtccagtaaatacaaacggatataagcaatcaagaaaatgttgttcgatttaagatgaatgagctaaaagatttatcgttccaagaaggtgttagccacttatatatcacgacaatattgaacaatctattcattgacaattatgtctgtgttggtaccaacaaaataattggaaaaccctaaatctcaacaactgttttcaaaaccattgtttttttaaaagacacaaatgaatatataatgtttgaccttgaatttttcttaatcgattaagagtcgcatttcctttgacgtagcagttgggggaatgaaacgtcaccttttatattaatgttaggattaaaatggtgacgacatttgaaatattcccacgatggtgaggcagaagaaatgtggagaatatattatcttctaactgtcttcacaaatattattataagttataaatgaaaaaataggttagttagtataatgtagagaaataatttaaagttgggattgtttttcttaattatatatgacttgtaggtgatcgttatgtatttagtttaggttaatgttgaactgtatctcaaaataaaacagtttcattttacataatggtagccctaaaaaaacaaaaaaaacaaaaaaactagtacaaaaaaaataaaaattgaattggacggttcggatcgggttcagttctcttaaaatatctgaatgcatattttaaaaatatattctggttttcggtttggattaggtaatatccaaaaatcgaataattatccaaatatatgcatgaaatccaactaaatttatcatcttttttgaaacatatattcaccagtttagtcaggtctttcaaataatttggatttaaattaaccaatccgaatcgaaccgatatctttttggtttttagctagctttttatacaaaaattccaacttacacgataccgaaccaaattcgaactgaactgaatttcttaaatacttgaatgggacctagacttatattgtagatcataaagaattgaagttgatagaaccgatctgaatctgaaccgatacttgaatactcggacgtaaccagaatgtcattggtatatatacgaatgagtcacgcatacccatctttagggtcagattttgagatgtgaattttatatttttgaaactttaacattctcgcgcagtttcgcattaactgaatgatcatctttgaaaagattcagcaaggatgtggacaactattaaatggctccataattatgttagaggagataaatgagtaaatgacccatcacagaatgttctttttatattatactatagattatacttgttttaattttttaaaagaagataatgtaagaagtccaactggattagtcagaaagtatcttaacaatgtatatatttagtatatatagtcatcacaatgtgatgatcgaatctttatatttttctctgtttttttattcttattttaaatgcttcttcggattttgaaaggataaatatggattttacaaatatgtctccacaatgaatatgggtttgggtaaaccgagtcttctcttgtcaaataataccttccttatttaattgagaaaaatgtgaaaatatttcatttacaatacaaaccatatgtataactttaagcaattgttggagtcacaaatcgcagtatctaaggtctccagttccgtgcactttaacttcttacttcttagtaggctcgagtaaatgggctgaagcccaacgaatcttttagctcacatcgcatccgattattgcaaaattgtatatgaacatttttaagaggaattatataaattccttattttggttgtttaatcttttagcagtacataactgcatagagctaaaactttgaaaattcacctcatagaattacaaaactaatattgaaagacagaagactgatgttactgtcttactgatacacttgcagaaggtaaaacgtggaaagaatagtcttagtttatcattttgaaagatacaaacaatagtttaccaaattagtattctggcagtaagttgaatatttttaacataaattaagaaagcgaacaactagttattattaataacaaaaatccaaaataaagaaaagtggtccaaaatttttggatcaagacaaatatatttcattcactctgaactataactagccacaaagagttgagcatgatatgacttgtagcccaaattatcgtggaagaaaatagctctatattgtatacacatatcacaagattcccttcctatatgtgttaacatcacttaatttttaatatgtctggactctaactcataattgacaattcacaaaaaaaggaaggtaaaacagtctacatatacaaaatattgttgtatacggcaggtaaatatatacttatttaaattttaaactcttatcagaactttaaactgaactagattaacattaaataaactagttagtgttttttaatttctataaaaaacatcttgtgttatgctaaaaagctttctttatttttgctttgtatatttgcatattccatggaatttatgcatgttttgaaatgaagatgggtttgatgagaagatagaatagaagaggatattgcctacactgtgaccatgtctcccatgtgccatcctttctgtaaagaaaatggaaaattaaaacaaatactatattttatgctaagcaaagcaaatcaagtgctttgacatttgaaatgacatattgatttttgtaatccaaaaaattattaaattaataaagtgttgaaaactatgcgagggtatctttgcccaaagtccttggttggttgttagggagaagaaatgcttaccaaagtatatatcactaagctttctttggccctttgaggaggacaatgcactagccaccttactactattatggatacctataccacaactaatgtttcattcatatgaaaacatactttccaataatttccattaccattatttttttatataggtataaaagaaaactggcattgtgtctataactaatagtttaatattggtgaaggttcgaatctttttagtttttttttttatcaggacgcttttacaaaccctttataaataatattaacttatagaactttcgaaaagaaacaaaattgaggtagttaaaaataactatggtatttttgaaacacaaaagtaaaaaattggtagcttatacaaattgtctcataggtgttttaaaaatctgagttttaaacacattggtgcaatggtcgaatgaaaaagaaaaaatatatatatataaagcgaaaaggaaaactaaaagcaagaatcaaatcaaaaaaaaaaaagagtatgagaaaaaggaaaaagtaagaagatagttgtggaagtgatggatccaattataagtgtctctatcttaaaaaaagaccccacattaagagatctcagtcatattgtcctccaacccataggagctttaagatgtttgttacctcttttccttttctctatcattgtttgtccctttcatagatctattgatttcacactcttatatcatcatttccccacctctttctctctacccacgagtatgttacatcttgatgatgatccatcataaacccgaggttaatcttcgtattaacaattccgatttgcagtccttttttttaaaagtttatcgtatatgtgggtttgaattttataggtaatgaatccagttaatctttaatgttttgtatacttaataaaaccaaatatatgccttagagcctttaaaatgagtagttataaaagtatctacaattgaattcttgtacactatagatggttcatagttcctcctctagctctatgcatagcaattacacactatacaacgtacacaagtacgtacacatatttcagtatgatatgtatatgtatgtgtgtgtgtgtgtagcaatatctctttaggtggacaccgttggtgtcgcgcatgactttgtagattccaataatgttttgatgagtactgtttcgaatctcatacttaatattgttcctgctgtcatgcacaaatgaaataacagttatctttaaataatattttgataaatctctccttcacacgatgataaatttattaatgcttcgtggaccaacttcgtttcagagttgtctaattcatatattgaaatttacggaaagtgggtgttctccaaaatttttgataaatcgctttctctttttgaccttataagccaaataaagttaacttttaatgtgttattttccttgtttaaattaaaagatcaacaaatttttcggttttaagagcatctccattagtttatatactcctatagatatctcaacacaagaatattagtattttatatagtttaattatatatttaattttttattattttaatttaagataagaaccaattaggaaaagacaagtgtagtatacaactatacataggttctcaaataagaacctctctctatctccttcatttttttttcattattctagtgggagagtatctcattgagataccccaatggagatggcctaaataatctgattatgcataaagaagtttcctttaacttaaaaataaataaatcatttaaccttttttgtgggaatgttacaaaagattagaaaaaatgtaaaagttagtattataccatcttgtaaaatcatagagatatttgtaataaaaacaaaaatactcctacattaatacgaaaaaaacttgctgacttaaaatccaagtagaatatcttatacgtcattttaggggatttatttttgttaattgaaagcataaattattttaagatcggaagtcttgggaaaatacttcattcacaaactacactcttaaatagacagtgataaaagcaaacttaatcattgtaaaaattatatacatgaaatatctagtttttatgtaaactgtaatactaataaactgtaagttttgatgaagttcactgccaaatatgtctaaagatgatctcatttcttaatttaaagaaagagtatgtgttttcaagaataattgtaaataacgttttgatttgtttaagcttaactgtcttaattaaattatatagctaaaagagaaggaggacaagaaaggctttcacgtgatgctttgggagttttaacatctgcagctaaggttcatttccttactgcctttcttacacttgaccaacttcttgtccacaataagacctctctatcattctgtttcaaaccactttattttctgtgttttcttcttccattcgaattgctaaaagtatactaatagagcttatttatgtttaaatatcgaccaacttttctcatcagtcttagatttttatctatatgtttttagtatatgaaattgtgaaaactactattcttgtatgctccaatcaccatataatatttatttgtttttgtaaggttttcttgtattaaatttgtactaatttttcttatattgagagaaccaaaggattattaacttatcatcagaaaatttgaaattttttttttttaaaatgaacagtatagcactatgttgtgcatcgaaacttagaataatccaaaatgtgtgtaatacatagttggaaatgtttcactctttcttttgtccactagatttaagtggacagctcatttatttaacttttaaaatcggatctcatggagaataatcctaaaattaccggctagaaaaactggcgcagtagcatatgagttatgactcgatcgtacttattctctctcacccaaatgtatatgctaataatatatataaaacgtgtatcatgatattgcaccaaggagagtggtgagggtcgtcgcaatcgaatactaattaagcattgccctttaccatatataagtcgagctactttgtcagctgagattcacttatcttgtttggtctatttttacatggaaaatagacaattaaaatgtaattattatgcctcaagtgcaccttaaacacgcatatctatatatagatgcacgacactattttagatactgtacgaagtaacttctttttatgagataaattcacctttttgaactctactagtaacttaactttttaagatgtaaacgtaaagaccattgaacaagagaacaatagcattgtgtatcaaaacaagtcatcataagttaacaatcagtcgtatcaagagctgttgttttcttttgtatgttaggccaaatactataccaatctatgtaagtttttgacttttgaaggaaaatatttacagttttttcttggtttactatttacatgtgagaatgttcatttcatctgtttcagatttcttttgggagatcttctctacgagatttctcgcgcctataactcctgccaaacccgatttacggcatttggcttcaacgcgattgtcatttccaaaaatcctattatagcaaagaaatcctgacaaaaggacatgcaagcggaagctattcaaattccgcacgaccaaggcttgcttagtttttttttttttgtcttcttttttggtctatctccacaatttatagattttcttagtaatgacaatgtttgtggaatcacacaagttttaaatatataatcatttgtttacatatttgtttgtcttccgttaaccacactataaaatatattttttttttttatcgtttgctcatgatcaactgtgtaagaaagttatacaacaataacacccatagctatgtttatgactgatcgatctcaacaataatatatatctgaaaatataacagatatatatatatatatatatatatatatataattagctttggtattaacctagtaatatataaacttgaagccaatgattataaatcatcacatacatttgtacttgttgcatctttctctttctcttgtaatatagaaattgcatctctcatctaatatagaaggcacaaatgcatgtgcatggtttacgagaaggccacgaaatattatatatattgagtattgactaagagaggtgaggagcatttattatttagttgaacgaatcattataataggctatataaaaaataattttcgtaataaatgaataatagttttaaaagtccgaggagcaaaaacgacggatgttggattgttgggaaacggattgggttattctaattaatctagaaaggcgaaagatcgatatagtttttttttggtaccgtgtgatgatagtggtaagatataaacacatttatttacttatattagtattttatttttctatttatcatttcaagaagacactgaaatttaggtttttgtatggacatcaccttcacggcttcacctagtctaatcatgttatacaaacaaatatttgggaccttcttaattattattaaatgcactgaacataccataatctacttattgatctgctgtttcttgtccctttttatgtagaaaagaggcaatgaataaacaatatggaatgtcaaaggagacaatgattatatatcacattctatattagtttaataaggaattaactttcattgttttaaatttagctagcatgtggtagtgaaaccaggaaatgcatttgggtttatggacatgataagtttatcaaggagaaatagtgaaatacatatacattaatagaaaatattcattaatgaacttccataaaagaatgtaaaattgtaattccagtattgttagagatcgtaaaaaactaaaagcaaattcgaaagaaaacataatcgtaaaaaactaaaagcaaattcgaaagaaaacataaaggtctttcatgaccttgttgatgatgagattgaacgggaaaacagaccaacggaacctccacaacaccaagagagatgatagtaaagatccctggatgggaggattcgatatattgcatagcttaactactagcaagattcaaaattttggtccttaaaaattggatgtaagactacatgtttgttatgagaggagcgctcaatgtgatatggcgattaaaatggatgccaaagttttgttagtggacaaaccaaaagtttgtggtgttttgtggagaaatttatttggatgtcaattaaagtcccacgaagaaagattagacaatgattatctaatacattataagtcaaatccagttctagttaatataaaatattattttcgagaagtaactaatactaaaaaaaaatcgtacgtaattatttgactactttgattaaaaataaaaatttatagagttcacatgatttgcagaacctaacaaaacaattctttttcaaaggtcccgaacttttggtttctcctcaacgaaattttagttcctagtttgtaccaccgttactatcaacaaaccactgtctaatgaaatgtcaagatatttgtttgtaatttgataaccataaatcttgaccaacgctctccaaactttatgatttataaaatgcaattgatcgatggttaaagtactatcaatattattccatgctataatgcaattgatgagttaaaagtttatgtgtatacattctctagagaatcctagtagttttttttttgtacattcctacatgtcttttaacatttattgctaatctaaagcatctatactagtataatgtttttttccactaaacttttagaaggtttttacaacaatggggataattcgagcaaatgggtggagcagagattccacgtcctaaatgaaggaaagggatggggcattctctatctcagtgtacttattatcttagacctcaaaataaattaaaaagtaaatgaattcaatgcatacaaaatacatatacatgaaataataaatttctcgacttgtgcccataccaactttcctaacatacaacaattactccagatgatcaccggccgtcccagaaaatgttgccatgtaaatcataaatgataaaaagtttcggaatccatttactgaagttggataaaactaaactgtgatctatagagcccacgtttgaaaagaagtaagaagctttgattcaaaagttgtgattgatcgtctccctatagcactgcaacgctggcacactatttcataacaaatctctatgttgtttaacctagaattgacagccaaacaaccttagactacttgccataagaaccatgttgagttgtaccataataattttttgtggtattttgacccaaaaaaaaaaaaattgtggtataaagtataatttaattgttgtttaatagtatgagatttcaatacataaatatagtaatagcattaaaataatgctaacatccacataatgtaaatactttgtattactttaagtctctaacatacataagaaactaaagacataatgataattatttgttcaaaaaataatatcttataactagagaatattttcccagtcacaaacacacacatttgaacgtctaagacttaacggacttcacttaattaatatccgaactttgtcgacccataattattagttcgcaacatacattgttattgaagtcatatacaatgctctttcatttgttatacaaaattagatttaattagtatatatgtgtgtgtcactattgaaaagttttttagtactcgagtgcttacctcatctcattcagagcttgtccctagctagttctgttatggcatcttaccgtgtcggaaatattacaattgtttcttaagaataagatttaacgaacacacacacacgtatatatatatatatatatatatatatatatagcatttatttttgttcttaaagcttacaaaagttcaacaaaatattgtattagattaatattcaccaccaaaccctggatatgtaacaaatttccatttattaattaattttaagagattttcagaattgttgaaaatattatgctgcccaatatcggtagctagctcacagtggctacatttttattgttgttgtagatcattttctatagttgtttgttttatttgttcacgaatcctaattccaataaaaagaaatctaataaacctcgcccagtcaatctacataaaaacactcaaactaaatggtaaatgaaatgagaaaacttttaattactttagtatcatatgcttcaactataacttaaaattcactcttaaataatctctattacaatcatatggttttcaatagctcataaatatatagatataagttatatcatataactaattagactagcataaatacatttatatttatgttctaattaatttttcatagatgtataaaaatataactgtgtatgtatgtatatacgtagatgaaaatacaaaatatgggttgccaggggaagaatccaagagagagatagtaaagattgcaatgtctgtccctatctagaaaatctaagaggtgtggacaaattgctagacctatgaacattaaagactatgcatgtgaatttttttcacatgaattaagaaaaaacgatatattgtttttatattatgtatcagcttctcaaactcattattaaaaacaaaaaaacattataaactttgaaagcgaatctccacattctaataaactgatacgtttttatgtgagcccatatcttacagagtttttaataatttgctttctagatacatatttctgtaatcatctcccggagaaacaaaaattcaccattttttctgtaacataatgtaaatcataagtcttttcccctcattataacttacgatttccatgtaagcaatgaaaaacaaaaattcagtttcaaaaaaaaagttacaggaacatgcaacaactgaacaattgagctatataccaaaattttgagaggaaaggaatgaataatatattgatctttacaaattttgcaagcacttgatattattgaattgcatgttaaagtatattcgaattatttccattcattacagacaactttaagagaaaaacatttagttcgacatacatattttttcttttcaagattttgtaaagtatataccaaacaatatgcacctaaattatgagaagtagaaccaaaaccatgtaaacataattagagaatttagtttaaacaaaaaaaaaggagagaaggtaggaagaatggtcaaagacaagagcataatggtctgcccaaaaacactttcttagtgtcagcctcagagctgaattgaaagcactgaaagctccttttagtcatcatgtctttttcctccaatctatttccgtttttattttcttattattcttaccatttacacatttttaattgtttttttctatccgtatagagagagatgtatgataaattaaatgaagcatctattattatttctacttctagtccctaaacctatctacgtgggcacacaatcttcgtaccaaaatgataaaagttttccaacgtacactttttgttgttgttggcttcaatgtatgcctatgtggaccattatgcttcatggagaagtaattatattttaaaactggatatattgaacaaattaaatagaaatctaaatgttttaagagaaatctaaaaggggaatgtttcaaagctagttgttaaggtaccgtgaattatctagtattttaagagaaatcaaagtctgcatggatgatggatagagtagaaacattatgatcaagtctttgttatgattctcgattataactctagataaacaaacttggatgtctgcgagaattggaagattatgttcattttttgtagctatttggcttttaagttccgatcgaaaagtgatttatctaaatgcaagttgctaacctttttgatttacgattttaaacaaaatatttggatttgtatttgtatttctgtttagtaattttttttcttgtgcaatatttattttagcaattgaaatattaattttcatctttatatgaaaacaaaacatgttattattcactaaacatcacataacaatattggcgcaaatatgaaaaagttagaaatatgtatcaagcacttgttttataaagccttagttagatattctatatatatatatgcaaaagtaacaaatagtttaaatgatcgaataatgaaaatattttatctgaaaatagcttacgcatgataattatatttataataaaaacaaatgagcttttaagattaatgaagtctaattcatttcttaagttaatttttaaaaatattaaacaaaaaataacggcattacgtggtgagataaaaaaatattgatatatcattcaccattgacgcttattagctcttattctccaaaatcattaaagatgaatttaaagtcgaaaatcacattacgaggcctctcgggtgaaattgatgttgcagatgatacaacagtaataaattaaaaatcgtagctagctttgaccaacataagagaataatcattggacttacatcttagtatattttattaatatgcttaagtagatatataaagttcgattatatgtttcaatatccttgtccaaaaaagaatcatttaattcgtcaatactatcataaggatccatgtgacacatttgaattagttctaccgcaaactgtgggtcctttaagtactataattttcacaaacgtaacatctccttatgtagagatgtcttgttaaattcctaggtgtataatgatttggattttgatttgacttaaatatcatgtgacctaaatacctgtataatgtcgttgattaaatccttagcatcatcaatgagattttgattcctaagaccatgacatgtgcataaatcgatacacacatgcctatacatgtatatttttgactttttgtgcaagtaaaagttttcgatttttttttatgtattgaagtatgaattctcgtggatgtaacatcaattttctaactagtaaagtaatatggtacatgcacgagagttcatactttcgagtttcaatacatacaaaaaatttagcaaactttattagtagactgaatttaacttttttttacaagagaattaggaaagaaaagaatagaggtgagagagagaaattaaaacacatgtacaaaagaatcaaaaaaagaggtacagttttcgttaactgactactgaactgaaaataaatgaatgtgttgttggtaaaggaaaaccccaaacctttatttcataggatttgaaattaaatcaatttggcagttttgtcagaaaaataaaacacttatttgaaaatgtattcattaactacatatgattttcaggtaaatagacagtttctcatttagtgtaaaacccaataatgatgaatatggtatctctacattataattagagttcaaggttgacatagtcataaaacttgcaaatttggtattcttggtaaagtatatatctggtccggactatcaatagatttaatgtgtatattcatgttaaaagatcatgtgtagctgaaaagatatcaagtttacatgaggataatctaattgtattttgttaaatataatctagttgttgattgatctgccaatccaaaaatatggcgaacttgatatacagaatatatagagactacgcgatggataacacataacatgtatttatgtctacccatactacaatattgtacatgttgttctattgatttctccttgtaaatacatgcacaaacatgaatctgaaaattgttcttaataatattatttaaattttaactcactagagacaaacaacaaggactatactatagtatactattggagaagttacacacttaaaatggtttataaacaaactaaaaaagtgtcatcaaataagcaatatttgaaatgctattttaaatatttatttagtaagtatcaggacgtctacttagagtttttcatgcgtcataaattatgtgacatttacttacatgcgaaagaaaaaggagtaaataaaacacgaaaaaagtaacgttaggtaaatggctaaacacgaggaaaagccaaaaatataaataattcaatttcttatctccatcaagatttaataaaagtaaataaaaattaagaaataaataatgaaaagatgctttggggagtggatctataaatcttgttatataaaggaggatagatagtgagggttttctaccttcttctatctaaaggaagtctttactcagagaaccaaaagaaaaataaagagaaaagaacccaaaaaaaaaaagccattgtaaattcagaataaatggaagaacatctaaatccattagcagtgactcatcttcttcaacacacactaagaagcttatgcatccatgagaactctcaatgggtttatgctgttttctggaggatcttgcctagaaactatcctcctcccaagtaagcttatcttcaaaatcaacctcctacatatataagaaatctaaaactcgatttttcatttcgaaaatatttctactttcttgttattatttttcaattattctgcaagtattattgtgagtttgttttggggaaaataggtaatttttcattaagaaacacaaatctttcaatggtaaatatgtactgatcatttcatgttgttggcaagcagatgggatggtcaaggagcttatgatagatcaagagggaacaggagaaactggtacaataaaacaacctatatatgtcacaaagttgtatgtatatctaaacatttcttggtgtatataattaagatatatatgttgtatgtaaataattggcaggatcttggtttgggaagatggtttttgcaactttgcagcttctgccgcggaaatgagctccggagaaggtagtggtggcggtggtggctcagcggcttatggaaatagtgattttcaacaataccaagggcttcagcctgaattgttcttcaagatgtctcatgaaatctacaattatggagaagggtctgtgaggataatttttcagcaaaaattaaatgatatttacacaaagaaatataaccttttttctatttatatttttgtatatagtactttctctcttttgggtttcactttttttgttaaccgagtttttggacccaagtccatactattttctaactcacattttatatccatatgtatgtatatgtaaataagttggttttagaaatttatgagtcaaagtacctcttttattctatttttcaaagtttatccgtaactgttttaaaagtcttgaacattgtttgcaaagtgtttgatcaaaaagctgataagagaagagtatttaagtattatttttttggcgaaggaagtgttaaactaatcattgtcaactaaatattataatggttgttaattaatttaataatactctaatgattgaaaaaatgttattaaattttgtgcaggttgataggaaaagtagctgcagatcacagtcacaagtggatttataaagaacctaatgaccaagagattaacttcttatctgcttggcataattccgctgactcagtaagcatatgcttataacctacctatatgctatacactcctttacatactcacatgcatgctagttccgttttataagaagaaaaaaatgtatcagtgtgtatgtgaaatttacacatatgtataagcattcttattcactaacactaattgaaatttatgtaattttgcagtaccctaggacatgggaagctcagtttcagtctggtatcaaagtatatttctccaaatcttatattatatgtacataatttcatatatgcatgatcatacatttaacttgtaaaattgtgtctctttatatatgattacatgaaaatgttttttcagaccattgccttgatttctgttcgagaaggtgttgtccagttaggagctgttcacaaggtttcccctctctctctctctttctctatacgttacatattttgcattaatatttatgtattaaatttttgtattgattaaaggtgatagaggatttaagctatgttgtgatgctaagaaaaaagctgagctatatagagagcatccctggagtacttcttcctcacccttcttcttctggttaccctttcatcaacgcttctccttctgacacgtggcatttcccgggagtcgctcctccgcatcagcagcctgagcaccagttttatcattctgaccacaaccaccgctttttgataggccaccacaaccagccacaagctgtaggaggggctgcaccgcctctaccgctttcgatgaagataacaccgtcaatgagcagcctcgaggcgcttctctcgaagctcccgtcggttgtacctccggcgacacaaccagggtactacccgtttcaccacagtgctaaagaggaaatgagtcaagaagaacaaaacgatgcgtttagggttgaacgtaatgatttggtgggtgagggtagtaataatcataatcataataataattacaatagtaataatgatatttataactatagcaataattgcagcaacaataattacgatagagagaataagatcggtgggtttcttagtgaggattattgatgagtctagtaaaatatctctcttttttttgtcgtacaataagtataaattgtactaagaattttcgtagtctgacatttgtaattcttagattttatttttctactggttggcaaatttaatataaatgattttattttaatatttgcattgtagcagtgtatatgtcttgtttctgacatagtgacatagtagtacgttgttttaacggtacttgtgttaaaatgttgcagattccatgtcctgaacaaaatattacgtaagaattatgtatataaaaaaaaatatgaaagtaattaatatgtaaaatattcttatttgcaattcaccacgccctatgtataaatacttcatttggtccaaaaatatgtaattcttttataattagcaccaaaaatttgataaaatcgtagtgccgattagttgagaagtgagaaaatatatagctaaacaaaaaaaattacattcagacacattaattcagagaaagcattggactaaaattctggacagaattaaactccaaaagaactgatctggtactacactgtttccatatgaattacatctcatgacttttaaactttagatcatgatagatacaaatataatcaacagattttaggtatcaaggacttcttttatcttgttttgtttagctatatatagcttcaataagtgttgaaaatgaagttgctgttattttgttggatatgttcatactattaaccagaaaactaatcaaatggttgcattacattgttttatgttttaataactgttcaagaaaatactaggcggctaagtattgcatctcactatgacgattactaactttaggcagcatggttaggcaagaaatgaaaattcagcattttggactgcatgtaaacacaatttgaacggtttgaatagtgcataaacaatatcgataggcctaatttgtcatacacaatttttgtttaaaattaaaaaaaattgtccgtctaatttctaattattatactgaattcggagttgatgaaaatcttcgttattacaaaagacaaaataagttattttctaaactaataataaattgttttctcaaaatgttactatggaaaaaacaaaaacgttttattaatgatataaatgatagagaagaacttgaagcagcaagaagaatacatttgacgtcacacattctcataagtaactcagaccatcaaaaagttatctcactttaaacccagatttcacacaaagccaacgaatcacacatacaaaggttctatgaagaagtttgttttagtctatgggaagtgattatataaattaggaatatgtatatgaatcttggaatacctgaaacgttctcataacccacgtgggaaattgttgatttgtccttcctccaacacatctttgccattaatcttgtaacctaccctcatccgcatcacaatgggtttctgaaaacagagaagaacagcgattattctgagcgctttgtggtatcggtttcacaaaagattgaggttttgtgcttgttgttatataaatctggtgaagagaagaaagaaaaagaagaaaatgtaccttccccttttggctatttgtaactctcatagtttgtttgatgtttccgttagctggaagagaattgctgctagcgggatccaggtgaagttgtagaaactgcaatgtgtgtgataacatgaatatattagaacatcgtcaacaaaacatatcatggaaacctaaaccgaacccaatttactccaaaacagttccaagtatttccactaataagaactttgcaaaaaacatgaatctatcactatcacgaccataaaaatgtggaacgttaagaaccaagcacatggcagaattgttctttaggaaagattgtgttcttattagctatgaatcataaggcctataacgtaagcagaaaaagcaaatttgggacctgacctttggaactgcagcctggaaaagaaattctgtgtacacgttaggagtaagatttatgaaattggccacaatgtctgtcgtttgaggattttctgattgctttgtgaagttgaactcaatcttcaaggagctgctttcaaatgcaacaatggacggatatgctgcactcttgtcctctgtcatggaagaaaagagatgatatcatcacatttgaaaacaagaagaaagaggggagaaactgtgctatgtaacttttcaatgtttaatatagcgcatctttaccgctctttggtggggtgggaccaaatccatccaataaatccatcatcgaagaaggcgcagtgggagaagtcaaagaaggcgctattggagcattgttatcttgaatagataataagtctccattcgccgagccattttgcacaggggcaggagttccgattgacaacagatccataagaatatccgcaccagcttgcgatggctgcatggcacctgaaattgaaaaatgcaggggtaaacaaaggggtcgacgatttagaatatatgatgaaacttcacaactgaacatcccaaactctctacaaaacttaacactacacttatcttcactaaaatttttacagttttcttcgggttatagttaggacaggccatactgcagctgaagccaataagttgaggacatgaccagagaaaattatctggctgaagaaaacgtatatgaattataatctaacttctattccaggaagatagtgctatacagatggttaacaattaatattatcagttgcaatacaagaaaaacttcaataagttagttttttctttgagctaatgaagtggaatagtgtaagcttggaagtctaaccaggttgtgctgaaggctgcgataaatcaacaccaagaagatcttgaagaaagttgttactggaggaggtaggcgcaggagtatcatcagagcccagatcgagtaaatcaacaagaggagctgctgctttagcaacaccgtttggaataccaagcggagattttccagaagttgacacagatgctggtaaagaaccagctctccttccactaaatgttgcctcatcaaggaccggcattctttcaaccagagaagatctgcatatttatatcaatcgtgttgagtaatttagtagatcaatatctataggactctctcattcaaattgatgaaaacagatatgtccagtagcatcgaaagaattaccttatattctgatgcttttgaataactgaactgaactccagggatctttgttgaagttctaagacaaagctacctttgttctgtcctataatacttttaactctcctgtaagcaatacaacaagcccaacactggtgagaagtatcattgactaattttcatcgcggcataattaataagaaaaaatcagggacgtgaaatgagttcatgcgtgattataaccagaaaatctagaatcaactagctaggtaggagttggcatactctgaacaggatgggaaacgagatgagatctttaacagagcaatgagtgccattgccttagttgtgacatctgataaatgatgcttaatagcattctcgacaacatccactgcatctgattctgttacctgattacagaagcttgagaacacaaataaatatctatcctcctaatatctcattgaaaaatatacctttggcatgtaaagaggatcattcaaaatgttgcaggcagaatgttcattaatgaatctatttgaatgagcaatcaaatagtaaggaaaatacatccccttaagacacagaaaataacaactgataccattttcttcattttttatcaaacagaaaactagccagcgcagaaaatccacaagatgacgagttaacatttctagggtgtgaggatccccacataaatcagtgaagcagaaatattttacaagaccaaaaaaagcaaattaagaaagagatccccaaattgcacctccagtaccagtcacaacaataaaccctgagtgcaggatgatagtacttaccgttattggatcttctaagtcaagcattccagcattgttaaccaacagatcagcatattctcctatgcaccatattgcaacgcgcacaagagtttcctgcccaaacatgataatgaccctcttactcctaagttacaagatattcaaatttaggaaatgtctaaccaaagaaatgtctacctgttcaaaagatgtatgtaatgctctatacaaagccctgacagtgtacccatggagatcaggggcatttgttattacaacaatcagcgcgtgccatacatcctctttcacataagttccagcctgttatggacataatcaagattagaactctcagattagaacctacataaattcatatgaagtaaaaagtttgttgttagttaagtgtacggaaaaacgtaatctcacaacctgggttcaaaatatacctcagatagaacctttagcatttgatcaatgtaccagattttctctggagcaaacctagcagaaaggaaatactaattcagtaaccaattaggtctgatggacaccatttatccaggccagcattctgataaacttaagggattactattaattgagcttaacgcacaactttgatacaaattaaaatgttcagttaccatatactagaagaatgaaatctctgtacatgctggctgaagagttgcgcaacttacttttcaactatggagcatatctttgcagtaagatctcctttaaaatcttgttcgcttacttccaaatattctataagctcctttgctagtggcttcacgttattctcattcactagaaggtaaataagctcaagtgcccttttctgaattgaagcatctgaatcctaaagcacaagatattaaacactttccatttaataaagaatgatctcagtcgacctacacagaattagatggtttactatactaagacacaaagtcggaagcatgttacagctctgatacataaattgcattccataaccagtaaatccagtggaatctaaatcgcctagtaaatcaataggatatcccaacaaagaagtaacaccacataaaataccttaacacactccaggattgtagctctgtgtctttgaaccgcttgggaatcaacagttaaggatctcatcagcatgtttaatgctacgtatctgagaaagcaaagctaaggtttattattttctggaaggtggtcagtggagagacaagaaagagatcagatgaagtgttctatcaatttttcacaaaatctcatacaatagttccatccatacacaatactgtccaaacacgtcagttttggtttattttatctttataaacagctgctccttcaagtggaataatagaaaaaaaaacagaatcactgcaaactagacatatatgagtgtaacaacttctgtcagcattatagcaaactaaatttggaagattattgtagatgaataataagatctcagagattagttacaaaaaaaaactcaaatatggtggtactcgataaaaacctgatgttattatctcggttggacaagaattttcctaagatattgattgcaaggactcgtaggccaccattttcttcgatgctcattatcgtttgaacgcattcgtataggatagcattccctgcatttttgtttgactcggtttttgatgccacctaatacattaaaaatcaacttaggaatcaaaaatgattatctgcaattacgatcctgactgatgtagatcaaaagcgttttcaaagcaaatttcacaaatgatctttgaaacaaaacctataaagatgagaaaaaggcttcattttttaccattgtttgaaaagagaaaaaggcttgaaaaaaaagctcgacagactacgtacgaacaaacctgagcaagtatatcattcatacagtcactggcatctgcatccccttggcccaaaacacgcaacagtttgagcaatctgatgtgaaggaatggatccgtaattccagcgacgtcatactcaggtgaatatggactgtttgcaatatctctcagggttttaaccaagccctctgtgcatttctgtcaattagataaggaaaccgctcattttccatcatggcaagaacatcaaagattgaaaacactcaaatcagtttagaatacaggcaaatattatccaggaagataatgaatctaaagagacaaaatggagaatgcagggatcatacagattccagacaagaatcatgaaaccatgagacagtaagaggctatgagttacaaagagaagcctaatgaacaaatgtagagtactttccgattctccaagaaagaagaagaacgcaaactagaacatataaggcatcctaatattcgtttaaccacatagataggatatcagcagattaccttccggaaatattcaagggcttcggaactgactttacagatttctgtgcaaaggtgaactcccgtaatgagaacaccatgatgcttttctttgagtaaagcagcaccaggattaataaagttctcagaaagatccggaacttttctgatgatccttatcgcgcaaagagctgcctaaataaagaaaaaaaaaactagttcactataatgtattagtctatgcatacaaaaaaatgacagaagtaaagtgtaaattcgtgaaaatgatacatagctcgtaaattaaagccttcacgtggttaatacatgcacgttaacctagcatctaaggttttccaacatttccaccactgaccctcacaacaaagacacctgttatctgaacgggtacaatgacagtacaagaaaacactcactttcttgcgtatatttggatcacgaaactgaagtaatcgttcaacttcaggggcgagatcacgagccatttctgctgaacaaatatttcctaaagcacagagagcaagccccacaatgtactggttcgtgtgattcagatctctagacgtaagtcaaggttctcacaagatgaacttaaaaatttgtgcgaagatgccagcaaaaagttaaaacactactagggaatcaaaatcaaaaattaacaccataaaggatactgcttcagcgagttggtgacaagcattaatacttcttgcctttcatcaagaagcaacattaatccaagataaccaatcctcttctcaggaaatccaggagaagcaattaacttcaagcattccatttgcccaaaatgagtagggtaaccaagcatatgaatgaacataagcttcgctagatcccgatgtctatagtcctggtcattttcattaatcgaagcacggatcgcagcacattctttcctcacaacagcacgttcctcagcagcggttttactcgcacgtatagctcgaatcatgtcgctgcaacacaaattgtcattaaaatgatgaattcatttacatttacatactctcaatttataaagaatcgaagcttcatcaaaaatgctaagaggattctatcatacaacatgcctaatctcacacaatcagccaaaacatttttctgataatcgtcaatttccgattgaatttgccgattactagaagaatcaagctacattatggatttagacactagaaaacgcacgaaaatggaagtatcgcaaagtcgcaatagagaaaaagcagattactagttggagatcggagtaaagtgattcctaacctgagacgcgtgccggaagagaatggattcatgaccggagcggtacgaagctgatgaaatcagatcggagacgattgaagcggaaaaatggatcaacgaatttgaaaattcatagatctaagaagctgaatttccagatctgagtgtttttctttcacttgatctcttccactatcgatgaaaacatgaagagagaaaagagaggtctgtgttttttttttctcttccctgaaagaaaacggaaaaaatattaacggagttgcagattctaacggaatcatacaacactttaacggtaacagattaaagcctctgtcggattcagaaggtttgtttttcttttttttttttttcttgggcaacaattttttttgtactataaatacgtcaaagacagagagacccagacagaaaattagggtttagaaaaacaaaagtgagtcgccgatggataaaggtagatgtcgaaatctctctgttgtgaagtcaaacatgagtatgaattaacattaatggatctttttgattcataatactcatgtttggtttcacagtagatagatatcgacgtctatctttcgttaattatgttgatgacgttgtggagctatctatcgttagagtggataaacttgtcttgttacattagagagttgatcatatgcatggattcatttcagatggctgtttgggtaactaatatttaagattttggtcaatttaagttaccaatttatatattggttacccatatggccatctcaaatttaatccgttaaaaatttgctcgtagattgcttggaaatctaaattttataatcttttacccaaaaataagtataacaagttttctggttacgttagagtgttgattatatggattcatttgagatgaagatatgggtgatgatcaatgcttacgattttggtcaatttatgttagcaatttaattctttttcatccatattttcatctcgaatttaatctttaaaaaagcgtttgttagatcacttagaaatccaactttgatgctttttagtattaactagttccgtgatggtcatgttgctgatttgctataatttcatcgttcttcttttagtctacttatcagtaattaagtgcaaatctatcattatttttttgtttttgtaagattcactttcatcaagatcagtattgatgagggtgagatcagttttctaggtaaatattgttcggatcaaagttctcatgaatcagtgaaccaaagttttagattcttctggtaagaattctgacttaccgcaagaatctaaagtgttgatatgttttgtcaaatacaaccaaatgtaaaattcttttatttgtttttttaatacattttgagtatggtttttaaaacaatggtcactagctagagtgtccatgatcaattcgtcttcggtcgttggatttgctaagatgtagttcttgaacatgatgtatgcaagttaaagagaaagagatgttcttaatcttcagttttcttctctttgtacgatgcttccttttcggtgatcgatgcattgacttgttccttttgtccagagatgacaactactataatggtttgaaaaacttagggttgaaaaattagggttaaaaaaaaaaactagtggatcgacgccaatggatagagtagaggaagaggcggaagatagggaagtaagtatacaatctaaagaagatgagagtttttgtaagtttctcgagatgattcctcttgatctaattcctgatatactcttgagacttcctgctaaatctgctgcgaggttccactgggtctcttagctatggtcatcaatcaccactcatccagatttcatcaggtcgttcgcgagtcagtcttcaactaggttgtgtcttttggtctgcgtgaaaacaagtgacaagcgtattttctgcgcaatgccccaacatgaaaatccggacagatcatgttatccacatgtggagcgttatctgaaagacactctcatatttgattatcacgaatggtcccagtcggtccatggcttgatatgtttgggagattcttggggcatattgtagtttggaatccaatcatgagacaacatgttaccttaccaaaagtcgcatttgaatgtagctctttaggatatgatccggtcgagggtaagtataaagtcttgtgcatctcatgctctagataccaagatcctcttgtttttactttgggacctcaagaatcatggagagtgacacaaaatacccctaaacatgtccctctatccgccgagggactaatacaaagtatatgtatcaacggggaagtgtattatgaagcgagtataccttttggagtcgatgatagttctgaagttgagaaagtccttatgagcttcgatgtgaggtacgaaaagttcaacacaataagaaaatcagcggctgataatttactttgcaaatttttcctcaactacgaaggaaaatttgcatgggtttgctctgacgacgtctctggtaaatgattttgggttttggaggatgaagagaaacaagaacggtcacttagaaaatttcctcaacgtgacccgatctggaaagtttcttgggggctgagaggtattactcatgatccactggtgagtttatttatacagctgcaacaacatctgaagcaatttatgtcttatattatgatccaaaaagaaccctagtaaggagggtcaaatatgattatatgaaggaattggtgacgaagaattctggaagcttaatcataaaaatgtaagagaggtccgctattatcataatcacactgagagtctcatgtctttggaggaagttcctcgcttagcatatgattcttccacagattcagaatgattttatgttatttagtatttaattagtctctcgaggactttcctcgtctagtatggaatatttctttcacagattcagaatggttcttgttacaatgcctcttttaaatggaataatattttaacatacccttacattataacataaaaaaattcagaaaagcctaatcaaaaacaaacttgcgatggtggtcaacaaacaaacttgttaattgcttttgatttgaacatttgtaaaattaatcagcttacgcacatttcggttcgtttgaaatggagataatataatctcacacttacactagcactaaattaaagtcgttatatgacaaacaaaaccgtaacacaatcgaacaaaaatggtgaagagcttcttcctttgcctctaaatgggtaacttggtgatctgattaaaatatgtaacacaaaatttcaacaatgttatggaatcgttccatctgataaattagtcgatatccatctctcccaatatctgcttaagctcctttgctctcttccttgctaactcgacacagctctgcgcatagcaactttataagaaacaaaaaacggtgtaaatcaagtggtggattaacctaagagaaagctaaaactctcaccttgatggctgatgaataggcgagagcagctcctcctgatttgtagaaagaaaccatttgatccgaggaatccaaaacaacagtcacaagagtgtccatgatcgattcttcttcggttgttggatctgctaagatgtagttcttgtgaagtatgcaagttaaagagaaaggaatgttcttaagcgtaagttttctcttctccttgttcactgcttctttctcggtgatcaaagcattgtcttgatctttttctccagtgacggcaactattcttccattgtcattcagagcaacaattggaatttgcactgcaatataaaagatattttatgcatcagaggaaaaattcttctgtctcggaacaccaatcacacaacttctgaacaaaccgctattgtgcagggaagaatattactcaggtatgactcactcagcaagatttaagtgttctctaaggcttgctctttttactcatattcgaaatggatttgataaacttgagaatcagctttattcaaaggttctctaaaggagctgtgaaaccaactaaaggatgagaacagagaagaacttacgattggagaaggctgcgacagcagcaagcagagcagcatcaaagagagcaccatcagcatccaggcaatatatgtcctatgagaaatttcagagagcaacaatgttcatatatatgctagagaactcagttaaatatcaaagagaaagatccctagaagaatagatgtgaatcaactgacggacaagcaccgatataagaccaacgagtactcaccagataacccatccaagcagcttttccactaactagacacagttctttaagatcaatcataccagaactagaacaaaaaagaaacacttttagaaggaacattgtatttgatgctcaatgagacagagaaaatataaagagaaagatcaaaccaaaacacaccttaaaatagtatcagacaaacgctttgaaataacgggagcagcttcggctggtcttccaggacgaacagtcggagaacaaattggaggcatatggaactcaatagctaccaaaaaggaatcacaaaatgaatcaccaaagaagaacaacaaaccacatagagaacaagacaacgagataacaacctatgcatccttcgtctggagagtccgtagaaggagtcataacttccattctaatagcagcaagcatagtctataaacacgaaacaactatgtaagcaaaacattgctgatcatgtgaatactatcgaaacgactaaggcgggttcttacagtggaaccaatcttagcaagagcagacccatcagcagttgaaacaagtcctacaacaaacacaagaaaccactataaagttgacatttttaatttgataaaaactaaaaagaatcaatcttcattgtttataccaagattaacaatggtgtctctagcttttccaagttgtcttccatcaggacgaagagattcagagagatgacgctcaaagaaacgaagagggaagattcttctaaaagcatcaacttccatctctgtcgacaagtcttgagctgcatctggtattcccatgttttctttagctctgcttcatgtcacaaagataaagagaatcataaaccaaaagtctctgagtctgtgcttcatcaacacagtctcaaggaatcacaaagcttaccttgggacaaaagaaagaactgcctttggtacacgaaactgttgtagtgaagaggaaacacaagcaatagagtgtaagaagaagattgagagctcgcggtgtcgtaagtaatggggatttcgacggagacggtgacggtgacgacggctaggtttatctgagtttttaactaaagtacttcttcattctaaatgggccccaaacaaagcccaataatgttgcgaagcccaaagaaatgcgaaataagagatttgtttgcttcacaagacatgagtatattgaaatttgggttttcaattagatgaatttggcgaaaatatgaggcgcacttgattatgagctgaatttgggaaaatgtttagtgtaaattgtaaaatatgaagaagaagaaatggcgtcaaaatgaacattatacattcttgttttatatccaattttgttaatcctccatacattacttaatggtgtttaattataagttaagaaatttctcttttactatatatatcgttataagtattcgtagaaaatttcaattcaaaacatcgttataagtattcgtatattgaaatttgcaacaatcaacagaaaaacttatcgttattccgtttttttcacatctattttaaaattttaagataatgtatgtttaatattttatgctttgtaataattattaagttttatgaaataaaatatttttttctttataagaggaccaaatatttttactttaatacctcaaaagttattatatcatagtccatactattaacaaaaatttaggaatacccaaaaaaaattgaaatgtaacaaaaagtccaaaaatatttttttggcccaaaagccctcatatatgtggggctggggctgcatagccgcatggttttccggtcccctagtttctttcgttatttgggttggtcagacctgggctccgatccagcgtaatctgtttcttatcatagtaaataaagaccataattcatttcaacacacttcccaatatgtttcttatctaaattgcatcatcattaatgtctacgtcacaactatatctagcgggtacgcaaatggctactggacttacttattctaacatggaacgaagaaaagagtgtgtgtgtgtgtgagaaatggaacagattttggctctgtttgccatttttcttgcttttgctttctccgggaaatgcagcgacgttttcagcagatctgactaccctgagggattcgtctttggagccggcacttctgcttatcaggtttggaaccaatttatgagcttcttttttcttaacttttgaacaaaactgaaccaaatgtttggtctctactagtgggaaggagctgctgcagaagacggaaggaaacctagcctgtgggacactctttgtcactctcgtaagcttttcattttaacacaaactattattagtattagagtttgtcactcttgtgctttgattcttgtttctaacattgcaggtgaccaaggtaacggagatatagcatgtgatgggtatcacaagtacaaggttctttagcttctctgtttctctgactacatcatgaggttttattcatcaagcctgagtttcattatgaatttatacaggatgatgtgaagttgatggtggacactaacttagatgctttcagattctccatctcttggtctaggctaatacctagtaagttttcttaaacatgttatagctcagtgaagggatcaaatttatgatcagttcgtaatttattatctgattagatggaagagggcctgttaaccaaaagggtctacagttctacaagaacctcatccaagagttagtaagccacggtaagacctatcttcatatccacggtaggactcaagagttaggtttagttcgtattaactagagtttaagtagacttactacaggaattgaaccacatgttacactctaccactatgatcatcctcagtctctggaggatgaatatggaggatggctcaaccacagaatgatgtaggcgttacttattttctcttacagattttgtagtttaagataaaataacaaaagttgatgttatttgccattgcagcaaagactttactacttatgcagatgtttgcttcagagagtttgggaaccatgtcaaactatggaccacgatcaacgaggctaatatattctctataggaggttacaacgatggggatacaccgcctggtcgttgttccaaaccgagcaaaaactgttcttcagggaactcttccattgaaccatatattgtaggccataatttgttgcttgcgcacgcctctgtttcaagacgatacaaacaaaaatacaaggtatatattacataaccctctcttgaatgtgtgagaagaaacacactataaagtatatataatatgcaggataagcagggaggttccataggatttagcttattcatattagggcttattcctactacaagctccaaggatgatgccactgcaacccaaagagcccaagatttctacgtcggctggtgagtcaggcacaaactgttccaaaatattgttcaacatatctcaataaaaaagatttactctttaaaactcaggttccttagacctcttttatttggagactatcctgatacaatgaaaagaaccattggatcaagactgccagttttctctgagaaagaatcagaacaagttaaaggctcatgtgactttgtaggagtcatacactatcatgcggcttctgtcactaacatcaaatccaaaccttctctgtccggaaacccggatttctactcatacatgggtgtatcttttcattgtatgaatcaaactcaatcttttaaataacaaaacaagattttttctcttttatgatatcttgtttttgctaatcatctcttcttctttctttcttgggagagacagattttggaaaaagtttagattttcaggtaggagttttgaggctaagatttctttagtcttgatagagaatagtgttactaagttgttttgtttttgtttaaacaagtatgctaatactccatgggctatggaagttgtgctggagtatataaagcagagctatggaaatcctcctgtctacattcttgagagtggtctctcgctcgctcgctctctatctctctctttttttatcctcagctaaattcactttccaatggcaacaaataggtacaccgatgaagcaagattcgcagctgaaacagaaggatataccaagggtggaatacttgcatgcctacattggtggtgtgctcaaatccataaggtaagtaaagttccttattgcttcttctcttcacttttttttatcattgtaatcaagaaaaaatacattacaacgtataggaatggatcagacacgagaggctacttcgtatggtcatttatggatttatacgagcttctagggggatatgaggttggttttgggttgtacactgtcaatttcagcgatcctcatcgcaagagatctcccaaactctctgcttattggtactctgattttctcaagggtgaatctgcctttcttgattcccaaggcatcaaggaattgcagagcaaatactcttcttccttctagactccgtattgtttatgagaagtgtaatgaataaaatctcatgttctactgagtttaggctgcttgccatgagctagtttagtgacgacaccatacataagttcaatttagtttctggagccgacaaactctcagtagacacggtggttttgccttggatttgagatgttgtttcactcagttgctactaatgaaaaagtatgagaaggatcccagaaaataaataaagagcatgcaaaattaaactcattactgttgagtttgaattctgtagcatgtgattgatgctacaatcagacggcatatgaaataattgccgattcgaagctgaaggaatgtttgtagcaacttaaacattttacaagaacttgaactgaagtgagaatcctagtccaagaatttatggagaatttttaaaaccttaaaactaaaaatattttaggaaaaagaaacagagtttaatcgtttagtatgaaggaatagagagaaaacctaattttatataatttctcatgtcctctcattcttttttctatgacatgcaatagtaaaaactactctatttataaattaacgtccaaatgataattagattttgtaagcgaaatttgtgaactacgctaaataattaaatacaaatgttaaaaagaagggttagatgcaatgtatcgaccatatattacaatgcaagtgcgttttcacaggacaatattatattcaaatcatagaaattgacttaaatataaaattcctgacgaagtaatatatataagattgactcataaataaatgtttctgaatgtttttaaagtttttttaaaatacatatttgcagtataaaataataaaaaacatatttaaaaattgtttctaaagacacccacagtttctatactttattttaaaatgatatatttcaattcattttcaaaattttgacaggtttaaaaaaattataatgtattttcaatatctaatataataatatataaatatatattgttttattttaaaatctcctaaaccgcctaaatcatctaggcatcgactaaaaattttaggcgttaggcggaaggtcgacgtcaacatagcgccgaggccctcttgaatactgataatagtataaattaatagcgaactaatagttatattttacatttataaaagaccaaacaatttccgtgaattaaagtttcaaaacttgtataggtatattttgaaagcaacacctgaatagatttatatcaatggattaaacttatgtgcagtagagattaaatatcaatcaatacatagtttgacaaaaagacatgttctaagatggcttgtgtaaagactaatcgaatatattgactactagttatattttacatttataaaagaccgaaacttttttcgttaatgaaagattcaaaagttgtatatatgttgaaagcaacacgtgaatagattcatatcaatggattaaacatatgtgtagtggattaaatatcaatcaatacataatttgacaaaaagacaagtttctaagtgactagcgaactactagtgtaatagactaatagtataatagtataagtgactagcgaactactagttatatgttacatttataaaaggaccgaaacttttttcgttaatgaaagactcaaaacttgtacaataaataagaaagaaacccttcgtccatgagcttttaattttataccacctctacaacataacagcactctgatctctcctctcctccaccatcaacggttagatctttctctcttttttaatatgcttcgatttatgtaagatttattgatgaagaattgactaacaaaaacactatgctagatcctcgatgtctcaagattcaaatatgttcgagagattggaagcacaaggtaaaatagattcttcaagcgattataagtgggacgatggatccgagcatgatgacgtaacaaaaatatatgtaagctttggtaaagaatgcataaggaacatccgattcgactatatcaagagtggacaaccaaaatatggatcgttccatggtcccacttttcaaggcctcctccaaacggtatctttagttgaaagatactaactaaagttctttagtttagttttaatgtggatactattgactatgatctgaattttttttttgtacc

SEQ ID NO: 100 - DNA, 116177 bp, Arabidopsis thaliana
aagctttggtaaagaatgcataaggaacatccgattcgactatatcaagagtggacaaccaaaatatggatcgttccatggtcccacttttcaaggcctcctccaaacggtatctttagttgaaagatactaactaaagttctttagtttagttttaatgtggatactattgactatgatctgaattttttttttgtaccaaattatatgcagtttgagattgaccataaaaaagatgaacaacttgtatctgttgagggttattgcaagcccgggtcggatttgattcaaggagttcaattcaaaaccaacttgaggatttctgaaatcataggatttgaaaaagctatatttggtaatcctactacgttttcactagctgaggatggaaagaagatcatcgggtttcacggatattccatggcaaacctaaactctcttggagcatacttcacttggatttctccaactaagatggaagcaaaaggaggaaaaggaggcacagagtggaacgatggagctgaacatgaaggttttacaaaaatatatgtacaaggtggttgtgatggtatacaatacatcaagttcgattatgtcaaggatggacaacataaatatgggtcaccccatggtgtcaagggtagcgaatccacagaaccggtaagtatactgtgtttaaatcactcaagcccttattagctgctaattaatgtatttttttcattacccttttttgtagtttgagattaaccatctcgacaaagaatatttgatatccgtggagggttattatgatgaaggcgattcgggggttattcaaggaattcaattcaaaactaatataaagacttcggaactgataggagacaaaaagggtaggaagttttcactagcagccaatggaaagaagatcattgggtttcatggatatgctgacaagaatctaaactctctcggagcatatttcacaacctctcctttgatttcattagaacacactacaggttctgatttagttaatcatatttgggatgatggaagttttgaaggcgtaagaaaagtatatgttcgctatgatagcttggagatatgttatgtcgagtttgactatgacaacaaaggcaaagtggaaaagcgtgagcatgggatgttttattcatgggtacaacaaggagaggtaaatatttacgtcaacttgtataagtgtgtgttgtttgaatagattatacgaagcttctttttgtgtattgcagtttgtggtggactatcctaatgaatttatcacatctgtggaggggactatgcgcactgaatcctttatgcaggttgcatcattgactttcaaaacatcaaaaggtagaacttcttcgacgtttggaagtccaagtgatagtaaattcttgcttgaaagcaaaggttgtggtgttgttgggttctatggacggtgttttagtagtatttttgaccttggagcatattttcgtccgctgccgcctccttccaacacagagaaagtagaagcaaaaggtggtgatggtggagcctcttgggatgatggtggttttgacggcattagaaatatatacataggacacaacaagatgggtatcgcattcgtcaagtttctttacgataaggacagtcagatcgtggtcggagatgatcatggtagcaacacattactaagagttgacgaggtacttatttactttttcttatgagcacataacagcaaaatcttcatcatcaattcgtctaatttccattagcttctatgcttttcttgaaatggatggactgaaaaattatgattccatggtttgaaaaattatgcttccatggttttacttcttttttggcatgggattaatagaaaaggtttaaatcctaggactgtaaacctaaaacgttttgaaccaaaaaaaaaaatattctgttcttgatcaactaatcattacttggaattttctgtctatgtagtttgagttggagcatccgggtgaatacttgatatctgtcgagggtagttatgatgtagtagatggaagtgagtctgaagttatacgcatgcttaggttcaagactaatttgcgaacctctcaactctttggacacgagacaacgccaagcttcatactcgagaaggaatgtcacaagatcgtcgggttccatggaaaaatcggtaagatgcttcatcaaattggggtcaatgttttaccgattacagattgagcatcttcgtatatatatgagtatatgacatccaatgaaacagtctcgagccagtactctactacgtattatttcttaatgctttatggcttgtattccccattttcatgtaataagacagcgtttgcttttaaaactcagttctttaatattcaattatttagagaataaccaagtgtcattagctcaattggtaaaaactctacgcgaagcttagaggtcggttcgagtgacgtttgagacgaaactaaatattacatgctgtagtttcgggcctgggggaattacgcgcttcagcccagaacctcctgatattcaaaaaaaaaaaaaaaaaaaattctttaggaaataatattatttgaatccagcaggtaaaatagaaagaatttcccaaaaaagggttaaactaatgaggtattacgatatcaaaaaaaaaaaaacttgattactcagtttaatatattttctccgtttttttctaattgatgttccaaaatttgatgatgtttatcgtttttgatgcaatattaactagtttttattgattttgacgatttctatcgtgcataatatttttctattagttgattagacaagaaataatgttttaatttagaaataaacaaaacttaaatgattctttaatcgatgtgcaaaaatcttaaacatcaattaataaataacggaaggatattaagatgtcttagctaaaactatgtagaatacaaatggtaataaattttaaaataaattgaaaattgtctagtaactttaaaaacatcacataaaatatataaaataaaatttgtaagctatcatatataatgaaagagagagaatgtaataatatatgaaaaattgaaagtccaaatgataatcaattaaagtcttctatataatatgtgaacaagaaatttaatacaagtgcctaaaagtatatatatatacaaaagaaccctatatacaagagataagttgggaagtaaacacattttgcaaaaataattggtaaagtatgtactttttttagaaattagagatagaggtacttttctctctcttctctaatagaacttcacctctaatagagcttttagtaatagacacttttactcttttattgtgtagttgatattaattgggccttcactaaaaccaacccaataacattttcaatttttaaatcaattggaccatcatccatgaagggttcttagcaaaattttgattaaaaactaaatcaaaatattgaaaataattttgattaaaagctaaatcaaaatattttccttattctaatgtacgtatatggtgtactaatgttggcgtacgtatgtggtgtactaatgttggtgtacgtatgtggtgtacttatgctaatgtagacatttgaggtgtactaactctggtgtatgcatgttgtttcccttattctagtgtacgtatatagtgtactaatgttggtgtacgtatgtagtgtactaatgttggtgtacatatgtggtgtactaatgttggtgtacgtatgtggtgtacttatgctagtatagacacttgaggtgtaaattattttaactggtctacgaaatattgtatttgggcttagtaaatattatttgacccattattcctaaaattttggacccacacaaaattttccttttcacaacaaaagggtacaatagtatttgactcatattttagattttagtagcatattctctatctcataagctctctatctcacaagcccaacaaaaagtacccattcctcctatttctaaaaaaagtatctagtttccaagtaattttgtaaaaagtgtctacttctctaataagccctatatacaatgcatgcattgaccaaattacatcccaagtggccaagtgcgcttccactatgcatttattatttatgcacaatattatatttcaaatcattcatgaatcgtttaccgtcaacattaccgtcattattgatgaatggttgactaacaaacacgatactcctccatgtctcaagatttgaatctatccgagatgatccaaaggttagaagcagaaggacaaaagaatcccgatagccgatttaagtgggatgatggatccgaccatgatgacgcaaaaaatatatgtaagaggtgactctcagggcataagatgcatccgatttgactatatcaagagtggacaaccgaaatataattcattccatggtgcctcgtgtggaggtttcacccagacggtataatttggatctactaactaaactcccttcattttactctattgacagcgatttgaatttgtttcaccaaattatgcagtttaagattaaccataaagaagatgaacaacttgtatctgttgagggtcattatgagccagactcgagtgcgattgtaggacttcaaattaaaaccaacttgaggagttctaaactgataggacatggaaaaaaggatgatactaagttttcattagttgtggcctgtggacggaaagaaaatcatcgggtttcacggatatttcttcaatttaaagtcttcttacaccctctaaatctcatagtttcttaattattcaaactgccaaagcctaaacaagacttaaccacaaaaccaactacaattatgttataccaaagcgacatcagattcaagcaaaacaagaactggatcacatcccttcactaatttgtaatcatgtgttgtggacgatgacaatctcattctcaatatcaactgcgactgatttaaatattatgctatttagtttgggagatttgcaaaactaccctttttttactactcttttgcaacaatacccttttatgttgtccatttttataaataccctttcccttgaacagaatgaccaaattaccctcatctaataggaacatgtaattggaaactgaaattttcccgccaaaaaaaataatttccaccaaactttttttccgccaaaaaaaaaaaaattcccgccaaattttttttccttaacaaattttttctcagccaaaaaaatgcttttaaaaatccttgtaaatttttttggcggaaaatagatttacaagggattttaaaagggatttaaaagatttacaaggaatttaaaagatttacaaagaattttaaaagagttttaaaagatttacaagggattttaaaaagttttaaaaagatttacaagagtttttaaagggtcttcttgtaaattctttaagaaactcttgtacatcttttaaaacccttttaaaatctcttgtaaatcttttaaaaccctattaaaattccttataaatattttagaacccttttaaaatcaattgtaaatcttttaaaacccttttaaaatcccttgtaaatctatttcccgtcaaaaaaaatttttttacgggaaaattatttttggtggaattttattttttgaaaaattttggcgggaaaattgtgacgagaaatttattttagaatattttaggcaaaaaaatattaatatttcattttgttaacctaaaacaatttccaaataggggtaaaatgatcattaaaaatttaaagagggtagaaatgaaaattgctaaaaaaaagggtagagttgaaaaggggcatcatgaaaagggcattagaaagaatttttcttttagtttaagaatagaacgatttaaaaaacaaaacaaaaaatcaaaaattttatattgaactcggagatgtcaaaactaaattttgttaatacgctaagatattttaaaataaaatgatgttgtacaaatacaatgcaatgatactactttttagtttataaataaacttacaaataaaaatttaaataattaatggttatattataaaaataaaattacatttacgttattcataaatttagacttatagattagcagtttcaatttaaaaatatattaaaaatattggtggtgttaaaatgcatatgtactatatgtttatattatttatttttcaattgaagaaacacaatacatttaactgaatatatgtactatatgtttatattatgagatatgttggaaaaacatacatttttcaaacataattatcgaactagtacagttcctattcataatttgagattttaccgggtccacctcttcgtctaatacacgaactgtgaaatagaaaaaaatggggtatatcttgtgtgatggaaattacgtataagggttaggtttttgattggtgagagatagaaagaaagagacagcgtgtgggagagagggtgtgtgggtcagatttttttatttttttttattttgcttttatttgttacctcatattcttctaatgtctcataattaaagtgttcgttaatgaattttgtttttctaaaatttaacaaatacataaaaatctatgtttttttctttatcatttgatatgcaatttgtttgataattttttaaaaaattatatcataaactattgtacataaaaatttgatgtatagatataaaccactgtacagatgtatctgtatagtgatgtacagatatatttgtacaccacatctgtacagtggtatctgtacagtggtgtacagatataagccatttacatatatagatacaaattaatatagatgaataaacaactatacaaataagtacaaaaattactctttgtctttgtgttattttttgtttctggtattttaacaaaatagttttcttattctctttattcaattgtatctgtacagtagtatctgtacagtggtgtacagatacatctgtacagatataaattactgtacagatataaggtatttacatatatggatataaattattatagatgaataaacaactgtacaaataagtacaaaaattactttttgtctttgtgttcttttttgtttctggtatttcaacaatatagtttttttattctctctattcaattggtttagagactagctaatatgcttatttattttccatggtttgtggttgtgagaggagaggttgtggttaaacacaaaataacgtgaatcgaatataaacaatgatattaccagcagtgacaaatatcacataaaaattgaatccgaacatagccagttagtatatacatgattcgaagccaactacaaatttctgaattagcaaccataataatgtatagatagaaatcaacctgcgactaaattattgattgacgagcagaaaacctaacttcaaagagagaaaaaaagaaatgcatagtaatatctgtacagtggtctatatctgtacagtagtctatacctgtacagtgctcagtaatataaaatttaaaaattattaaacaaaatgcatatcaaatgattgagaaaaaaacataaatttttatgtatatgatctattttggaaaaataaattttacaaacgagcattttaattcttaaaattgaagggaatgaaatataatatattaaaaaaaggaaaatataaaaaaaacggacccacactctagttctttcacacgctttctctctctccataaaacctctcttctattgttttagtgacatgaatgtaaatagatgattttataagtggcaaaaacgaactcaccataaagccaacagtaacatatatagtacaaacccaatattaaataggaaccgtactattttctaattattttcccaaaacgtactaattttcaaacaaactcttatattatctatagttttcttatttaaaaattcgaaatatttaattttagcaagtttagttaacaaaaataagtagtatatcgaaataataatgtttggcacgatgaatagtaaaattaaataaatgaaaaagctgagaataattgtatgcttaacatataaatatcagaaactcttttttaatatattgagtggatgataaaattaaaaatttaaagcctcaatgataataaattatagtcttctatcgaatatgtgagctacactatttaagtacaagtgccaacaaaatagaattatttagaatgcattgacctttgtaatgtattaaacttaatttccttttattttttaatatcaatatacagtatactatcaagttgacaaataaaaacaaaaaaaagacatgttctaaacagaatcatatttattttacatttatatactgtaatatctttcgtttaatgaaagactcaaaaacttttcttaaaggactcgaaacctccccctctctctttctctctctctcgttcgagatggcccaaaggttggaagcagaaggaaataagaattttaaaggcaaatctaagtgggatgatggatccgacaaagatgatataggaaaaatatcagtaagatgtgaagatggaggcataacgtacatccgattcgactatatcaagagtggacaaccgcaatataatacattcccaggaaacccgggtagaggtatcctccagacggtataacttgacaactgctaactaagctccctattgactattgactatgatctaaattttctttaccgaattatgcatgcagtttgacattaaccacaaaaatgacgaacatcttgaatcggttgagggttattacgatccaaagtcagatgcgattaaaggacttcaattcaaaaccaacatgaggatttccgaactgataggatatgcaaacgatggtgctactaagttttcactagctgtggaaggaaagaagatcatcggatttcacggagcatacaacacataccttaactctcttggagcatacgttacttggattgttccaactaaattgaaagcaaaaggtggaaaaggaggcaaggagtggaacgatggagccgaccatgaaggtattacaaaaatatatgtacgaggtggttatgagggtttacagtacgtcaaattcgattatatcaaggatgggcaacaaatatatgggtcaccccatggtgttaggggtagaggttttacagagctggtatgtgtgacttaaaatttgattcaacaggcttattattagctgttaatccagttattgtttcattaactctacttctttttttctttcttttttttttgcagtttgagattaaccatctcgacaaggaatatttgatttctgttgaaggctactatgacgaaggggaatccggggtcattcaaggaattcaattcaaaactaatatcaggacttctgaattgatgggagacaacagaggtaggaaattttcccttgcagccaatggaaagaagattatcgggtttcatggatatgctgagaagaatctaaactctcttggagcatatttcacaacttctccttttacaaaactggaagttggtactacttcggctgatctttgggatgatggtacttttgatggcataagaaatgtttacattcactatgatggcgatgctgtatgttgtgtcgaggtcgactatgacaacaaaggcaaagtggaaaagcgtgagcatggaataatgattgcacccttcatagaaagaggagaggtaatcataatttctacaactcttagtattcgtggactcgtacatgtgtgttatttaaaagatttttacaaagccttttttgtatggcagtttgtggtggactatcctaatgaatttatcacatctgtggaggtgactatatcaaaacaaaatgattcgccagttccgtcattgacttccgaaacagttgcgtcattgactttcaaaacatcaaaagggagaacttcttcaacatttggaagtccggctactaaaaaatttgtgcttcagagcaaaggttgtggcgttgttgggttccttggacggtccagttattatacttatgcgcttggagcacatttctgtccgttaccacctcttcctgacggagaaaaagtagaagcaaaaggtggtgatggaggagcttcttgggacgatggccgttttgattgcattagaaaaatatacataggacacagcgaaatgggtatcgcattcgtcaagtttctctacgacaaagacaataaggtcgtggtcggagatgatcatgggagcaagacattacttggagttgatgaggtgattacatcatttttcttatgaacttgtgttcttgatcaacttatttacactgcaattttctggttttggcagtttgagttggagcatccagatgaataccttatatctgtcgagggtagttatgatgtagttgatggaagtgaatctgaagttatacgcatgcttaggttcaagactaatatgcgtacctctcaactctttggacacgagacaacatcaaacttcacactccagaaggaatgtcacaagatcgtcgggttccatggaaaaataggtgagatgcttcatcaaattggggtccatgtcctacccattacagattgagctcaaaatgaaacattctcgagcaagtttgttcatgttctttaattatctcctatcatgtactctactacatattatttccttatgctttatggcttgtacgtattccccattttcatgtaataataaaacaaagattgcttttaaaattcagttctttaaaaattaattctttagggaattagatttgaatccagcaggtaaaacttaaataacttatttccatttcaaggaaaagtattcttcttatggaagaaactacttaaaaaattggttatcaatacaattactaataatgagagttatcagaattcagaagtaaacaaaaatcaaggaaagttatacagaaaccaaaagcagagctagaaagcttacgccttaaaatgcggcagttttgaagtcatgtcagcctttaattgcatacctcagcattactttcgtcgctgataagaaaaaagttgcttttacgttcctcattcgcgaggaagaactgaaagtgttactagatttgagtattcgctgtcgtgtatttaaccaaacactctaaataccacttgttatatactgagggcattcaatttcttgatctagcttgatcgaataatgaacttacctcattatactcaaatcaaacacagcaaaaacactttgactttgacagggattaagaacagaacaaaattgagaagaaaactagaggacatggtgtaagtgtaacggagagcttttatatttgtgtcattagaagaaaaaatatctgattttgaacatgtaatgaattattggaagacacatctgaagtagataataagaaaacttttagatcatacacaagacagtattatatacaaacacaattggaaagagagctgtttcttgctcataactcgtaagctacgtacaaacctgacctaaaacaggcccaaatctcgcaacattaagtttcgtctctctgttttttcttcgtgttgtctatgtacaaatcatgttttcttatcatgattcaaattcacttttatcccctgccctacatttcttggtatacattgacaagaactacagtccgggtcagcatcttggtgatgccagactaaagcacgctctttcgcttctatactggatccatcggtagtctctgtatatagtctcataataggttccacaactttcttccactcgaggtcatcagataagccgcttgtttcccagtcagaattcagaagacttattccacctgcattacataggttttcttctaagtttttctttcccacccaccagattcagaattaagacagaacagtaacttaccttgtgaagtaaccgtgttcagccgctattccaagattctcacacggtgcaagccattcgctcaaagaaacttttccgctcccgctgacaataaatatagtgttgttaggatcacgtcacagtgccttcaaagcagatataacttcagcacttgggtcctttacgatggaggcctcaggaactaaagtaccatcagaatcaagaaatattgctctcttgctcgatcgtctgtaagtactagcttttcggaccagatttggacattttgaatttgtggttatgtctttcagtttaactaatactatagctatactcatagatttgattaacagagtatttagacggcacttggacgaatttattatagtgttcatcgatgatatcttggtgtattcaaaaagttgagaaaaatatgttgaacacttgagattgatacttcagaggttgaaggaagagtagttacatgctaaacttagcaaatgcgaattttgccttcaaaaagttttgtttttggaacatttggtaactacaagaggcaataagtaagtggaagcagccaagcaatattttagagatccgtatttttctaggtttggcaagatactataaggttcataatttttttttctcaaatggctaaaccactcactcaactacttcgccaaggaactaagtttgtttggagtaagtcttatgagtagagttttggagcactaaagcaaaagggtaacttttgctccgttgttagctcttccgagatctggtgaagggtatatgttggacgctaatgcttatttattatgattgtgatgtgtttcgatgcaagagatcaaggtgatcatggtggtgtttgtggtgttaacggtggtggtagcagtgaaaagcacgccttccatcattctcgccgtggacgttctacattagtaacattaccgtgaagccaaacatcttcacacgttccaaataggggtcattcaatgtaatctcatcaaaaattctgatatgtttgttgaacactcgaaaaaatctgatttggaattcaacccaattaaaattttagattttgtttttgttgataatagaaaagagaaagagaaacaaaaggacagaagagagagttgacaaagatgcaacaaaataagggcagtgtcatttttttatggatattttcatgttgctcaatattacgataatgcacatttttctttagtttaattattattcagtcgtatattatagagtgcaatttctctgaaaacttttaagcatgtactattttccaaaactggctaatggggttttaagatgccaaaaaaaaaaattacaaaaaaaaaatgtcttaagctaaaactacgcagaatacaaatagttataaattatcaaacaaataatacttgcctagaaatttaataaacaaaacgctgtaagctatcctataaacttaaccaaatgataatcaattaaagtcttctatcgaatatgtgaactacattaaatagataccagtgcccaaaaaaaagaattaaatacaatgcattgaccaaattaaataattacaatccaagtacgcttccattatgtgcccaatattacttttcaaatcatgaatcgaatttagagtcttttctctcttgccagctatactttttatccaatctgtagaggaaatttagctaaaagacatttttttttttctatatttatgaaactaaatctttttttatcatgattatattttaatttaaatgttctaagagtcacccgaaaataattttacgttttaatgggtttgtgtatcgtaatagatttatctatatctatttgtaatgggtttaactttctatatcaaatgatacataagttgacgaaaaaagaaggacatgttctaggatggcttgcgtaatataaactgactggcgaataccgagtcatattttacatttttaaaagacaaaaaaaaaaaacaaattggtatagaaagactccaaacgtgtatatgaaagaaaccttcatatatccatgagcttttacatctctacagcactctctctcgctctcctccaccatcagaggtctgctctctctctttcttctttgattttcaatatgcttcgatttacctaagggttatctatttttatattttaactacaaacttgtaaaaaagcacatgtgagtatatttatgaatgattgactaacaaacacaatgctcctccatgtctcaagttttttcaaatctgttccagatgacccaaaggttggaagcacaaggtcaaaagaccctggatagcccatttgtgtgggatgatggatccgaccatgatgacgtaacaaaaatacatgtaagaggtgactctcgaggcataaactgcatccgatttgattatatcaagagtggacaacggaaatataaatcattctatggtccctcgtgggcaggtttcacccaaacggtataatttggatctactaactaaactcccttcattttactgttaatgttgattttgtttcatcaaattatgcagtttaagattaaccataaagaagatgaacaacttgaatctgttgagggtttttataagccagactcgcgtacaattgtaggacttcaatttaaaaccaacttgaggatttctgaactgataggacatggaaaaaaggatgatactaagttttcattagctgtggacggaaagaaaatcatcgggtttcacggatgttccggcagttacctagagtctcttggagcatatttcacttgcattgctccaactagaatggaagcaaaaggagcaaaaggaggaacggattggaacgatggagctgaccatgaaggtgttgcaaaaatatacgtccgaggtgggcgtgattgtatacaatacatcaagttcgattatgtcaaggatagaaaatatatatatgggccagcccatggtgtcaggggtagaggtttcacagagtctgtatgtatggcttgggatatgattcaaggactttattataagctgttaatgtagaatttctttcatcaacttttttgcagttcgagattaaccatctcgacaatgaatatatggtatctgttgagggttattatgacgaaggtgattcggggatcattcagggaattcaattcagaactaatatcaagacttcagaactgataggatacaacaatggtaagaagttttcacttgcagccaatggaaagaagatcattgggtttcatggatatgctgaccagaatctaaactctcttggagcatatttcacaacctctccttttattaaattggaatccagggaatctactggtgatctctgggatgatggcacttttgaaggtgtaaggaaggtgtgcattcataaacagccggttttatattcagtgatccaattcgagtatgtaaacagaggcgaggtggaaaatcgtgacctggggttgagggtatttatagcagaagaaggagaggtaatgattcctataactcttaatattcgtcaacttgtttatgtgttagttgttgaataaattatagcaagcctttttttaattttattattattattgcagtttgttgtgaactatccttacgaatttatcatatctgtggaggggacattcacaaatgaaaaagatcctcatgttgcgtcattgactttcaaaacatcaaaagggagaacttcttcaacatttggaactccgggtactaaaaaatttgtgcttcagagcaaaggttgtggcgttgttgggttccatggagtgttgtccaatgattatatttctgggcttggagcatatttccgtctgctgccacctcttcctgacggagaaaaagtagaagcaaaaggtggtgatggaggagcttcttgggacgatggcggttttgattgcattagaaagatatacataggacacggcgagatgggtatcgcatttgtaaagtttctctacgacaaggacaataagttcgtggtcggagatgatcatgggagcaagacattacttggagttgatgaggtgattacttcattttcgttatgaacatgtgttcttgatcaacttaatatttacatcgaactttttgttgttttttgtggcagtttgagttggagcatccagatgaatacctgatatctgtggagggtagttatgatgtagtagatggaagtgaatccgaagttatactcatgcttaggttcaagaccaatatgcgaacctctcaagtctttggactcgacacaacatcaagcttcatactcgagaaggaatgtcacaagatcgtcgggttccatgggaaaataggtaagatgcttcatcaaattggggtccatgtcttacctattatagattgagcatcttcagatattatatatgagctcgaatgaaacattctcgagcaagtttgatgtttgatcatgttctttaatggcctcctatcatctactctaactatgtattatttcctatgttttatggcttgtattccacattttcaggtaataataagacagcgtttgcgtttaaaattcagttcttttaaattcaattcgttaaggaattagatttgaatccagccagtataacataaacaacatctttccatttcaaggaaacttgctacgcaaaccatcagtgtattaatcgttgttgattatgctaatggtaagaagcgtggtgggttgggtcaatatgattttcatagccgagtatcccaagtggtcacagcatggtccatacttcttttggcaaagggtcctaaggtcaagtatatctttcgatagatggactcggtccattcttggggacacttcgaacgggtgtacgatcccatgaactccactttttgtgaactgattatgtgatcgagaacaaaactcaagaacttccataatggctacgacaatgtaaacatggtgtaagtgtaaccaaacgcttttatattttgtaacgacaattagaagaaaaatatctaagtttgaatatgtaattaatagaaaacaccgccgaaatagattcttaaggagaaaacaagaaactttagatcatacacgagacattattatatacaaacacaaatggaaagagctgtttcctgctcataagtcgtaagttacgtacatgtacaaacctgaactaaaacaggtccaaatctcgcaacattaggttttgcctctctgtttttgcgtgttttctatgtacaaatcatgttttttatcatgattcaaattcacattttcccctacataacttggtaacccccgttgatctctgatttctcataccacgctttcgaaggagactctgaggtgagaagggtacctaggctttgggctcgaagtgttggcaagtccttgaagcaacttcaccacgtcgcttacttcatcgaggaagtatttggctttgctcggttttcttcccacagtacacgcgaatatctctgtagacattgacgatgattgagctgagagggttgttgatatgttttcaaacatctcctcgtctgatctatcatccccaatgcataccacaaaatctggcgctatcccatcttcaagcattcggctaagaattttcccggtgacaagccctttgcttactccctgttagtccaaaaatctcagattaagactacgtacaaaccagacaatataaggactgctttaatttagtgaaatgaaaccgagacattatgaatcatggaaaatttggagatatttctcatcaacagaagatcggtggcgaatgtgtacttacctgaggcttaacttcaacgatttggtggcctctgttcacaataactggttcattcacaagaacagtttctagatggtccagtagttccttggcttgacaagaaccaaagtctgggtcagcatcttggtgatgccagactaaagcactctcttttgcttctatattggatccatcagtagtctctgtataaagtctcataataggttccacaactttcttccactcaaggtcatcagataagccgcttgtttcccagtcagaagacttattccacctgcattacatagattatcttctaagtatttctttcccaccagaaattttcataaaactttcagaattaagacaaaccagtaacttaccttgtaaagtaaccatgttcagccgctattccaagattctcacatggcgcaagccactcgctcaaagaaacttttcccctcccgctaacaataaatatagtgttgttaggatcactacacagtgccttcaacgcagatataacttcagcacttgggtcctttacaatcgaggtctcaggaactaaagtaccatcataatcaagaaatattgctctcttgctcgatcttctgtaagcactaacagtttgctcaatggatagccttctgaaattaggagagagagcgacaagcctgaaacccaaaccccaacccacaccccagcaccgtttactgtaatgatctcgagatgccctctccaaatcctgcgaaaagctgcgcgcccaataacccacatcatgtgtactaatgtagtgaaagtgttttttatgtcgtagttgcttctcaaaatcagacatggtaatagcagaatatagtgaatcggctaccgcgtcaacgtcccaaggattaaccctaatcgcaccacttagagaaggcgagcaaccaatgaactcggacagaacaagggtgcttgtgcgaggcaaatcatcacttactcccaaagacttattcatactaggagttccctgccgacaaacagtgtacttgtacggaactaagttcatcccatccctcactgcattgactatgcagcattctgccagggcataataggcagacttctcaaaccgaggaacagggcgatcaatcagaaccactggctcataatcatgtgaaccataacgctcgttgattcttttaacagtatcatacgtttctttcctcgcttcctgaacgtctttacctgagcctctggctgggttcacaatctgaataagaactattttccctagcatgctaggatattgctgaaggaggtgttcaaaggccaaaattttaagacttaaacctttgaatatatccatgtcatcaacaccgagaattatctttttaccccgatacttttcttgaatctctttcagcttttcagctgtagcaggaagattcagaacggattccagccttcccatgtgaatacctataggaagaatcttcagaaaaactgtacgtcccaagtagtcaagagcaatatgccctctcttagattcatactccaatccaagcattctacagcagcatgacaagaaatgccgtgcataatcaaacgtgtgaaaaccaattaagtcacaatttaagagccctcttagtagttcctctcgaacaggtaaggttcgataaatttctgaagaagggaatggactgtggaggaagaaaccaagcttaaccctgtgaaaccgccttctcaaaaatgttgggagaaccattaaatgatagtcatgaatccagatataatcttcttcaagattaatcacacccattaccttatctgcaaatatcttgttggcagaaacatatgcctgccaaagaccacgatcaaaccgttcaccatgatcaggacacatgggtaacatgtaatggaaaagtggccatagttgctgtttacaaaagccaaggtagaattttttatgcacatcttgtgggaggaaagtcgctacacaattgaattcctcaaaaagattatgggaaacctcgtcttgctcactaacatcaacatgcgtcttgagcgatccaacataaatgacttcagtctctggagaaaaaccatccttgagatgtaacaggggagaatcattgtcgagactgaatttccactttccagtttctgaatcctttttaccattcaaaggaagaaaattggccacaatgattttccgctcacggcaaggtaatgaaatgacatctgaatcgccatcactaattccatatccatcaacgtcagagataatgccaggaacagtcatcactcttggaagatatctcggagtctgaggaatgtccaaaagatccccagaggccaagtctaatagatttccaaatgattttgaccccattgttggaaccaaaaaccatgaaaggtagttactccaaagctgtaaaaaaaagttcccaacgaactatgctttatacacctacagtacaaaaagagaagtgttggatcaaaaaggtcaaatctttaggttacccttcaacgagcacaaagccagagaaaacaaatttaaagtctttacagagttaggtttcaacatcagctattggattggatgctaatcatcttattcaaaattgcaatatcaaacaaactcttacgttatggagattacaaaacacagagaaggtgacctgatcatcaagtagcagagatgatgatgattgaatttaaatgaaagcagagccacatattttgtaattttccataacagttcaatcactagaagtgtagaatctgagatcactgaaacaacaatttcactgttcttagaccaacaaatttagaaacccaacccagaaaaaaccaatccctaagacacgattcgtcataaaacccatgaaggattagaaataatcaatcagagaagaaaggatcatgcgattcaacagcttaataactaagatcagatcagaggaaaaagcaaaattgaaaaggaaaagtgaaggattatgaacaaaagtcaaagctgcttaccaaaagtgaagttcacaaaaaatgatcaccggcggtcaccgtcagagagtttgctccgatcaccggcggttaaaacaatcaattcgaagtagagagacgaaagagagagaggaggaattggaatcagagagatgggatattctgggagagagtaaaaacgtattttaaatattattacaaaattgagtttggttcattcttattaaagtttagttggataagttccatcgactcatagactcctattttattttattttctttgtcgacattttataatcttcggattgattagtgtttaggacaaatttttggggttagtcaatgtaagtggtgattttagactctatcaaatgaacacttttttaaattagttgttataactaaactctatccattttgtagttctatactctatccactttgtaattatatataattgcaccacatgtttggaatgaatttttattgttatctttcaaaaaccaatgattagtatccttaggtaaataacattaaaccaatgaatgaaataaaaggagttaaaataaggacatgtcactttctattttaattttcatattaatcataatttagaaagaaaaaaatgagatttactaaaatgtgaaaaaaacaaatacaattctttttttctgtataccaatataattggtcagttatatgaatgttaaaataaggattaatagcgaaatcctatttcaaagaaaagtacattgatatctatttgatattttttcttatgaagatatttgtttaaatacaattataaggttttaaagaaaaaaattagaagaggcaaatcttacaataaacgactcacttgctcacgaagaggctcatctataatgctggctcttttttcgttttttagctgcctcctcttttgtttcttttagcttttctttttagctaaccaagtgttcttcatgtaagctatatacaaatacatttatacatctgttgacccaaaaacaaaaaagacaaaaagaaaacatattgacgatcaagtttcgtgatatccaatgaaatagcacctcgtcgaacttagctgtaaccctatttttataacattcgactgatttttctactgcatgctcatgaaattttctgttctttttatttatttactttactggtgtataagaatagagctcaactactacgttacgcacatccaggattatgtagggttttaattctaataaaaaccaaattaggctattagaatactttaagatttctagcgttatggtttatgttaatgccgtcgatgtatcatagtcatatgattcaaatttgcatattatatatgttgtcgataaaaaaaatagtaaaacaaacaatcaaaagttcataactaattaaattgtacaaatctatttttcataaaataatatatatacaaatttattaatgtcaagtgtcaacatattcaaactatcaaccatattcaatttcacatgattttttttaacaaattaagaattcatcaatgaaatcacaaacaattttatttcattaataaatatattttgtactacatattgtatatataacataatgtatcatgtttacatagtgctcaaaattcaaaaacaaaagaaaaaatctttatgttttggtcagttatcaaagactttaagatatcattaattttatgattgataaagagagaagataaatatatttgacaagaaagtggcaccgatgctaattaataataaagaacgttatcatatcaaatatgatttgtcgtatactcgtaacttacgaataatgctatcacttaatcattttaatagatgttttaacttaactttaaccattatgcgactcggcaaaggttgtcatgcataaatattttttttgtgattttataagttaaatggggttaccagttaccaatcaaaaatcataatattttttttttttttgaatttaatgttaaattatatttaaaaagtaaataaacgtttatacatcaagtgcaacatatgattgaaagagtagaaaattttttgtaaaaaagctcatgatcttgattgaaactatagttggagagccttatcatatcgatagtctccgcttgctgcgattgtggaaatttgattcctcatttgtttgtcgagccaccggattagatgagtcgctgaattcgaacgttccccatgtcttctaccatttctctcatgccatatggtgtgtatggtttcctggaagatgtatctagcaagaaaactctctgttctgtttcgccaagtagtagagacagaagttaaaatagtagaccagtttgttgagaacttagttttgtatatgtttttggcaagattttcccatatttctgcggtgtagcagcaggagaaaaataggtggtttcttgtttcgatattgttgttgcagagtacacaagttaatcataataatattgagctaacctggaaaacaagataacaaaccaaaacctcgtgaagcagaagttaaataatattttagtacagtaagatatttagaatatttttttacttctgcttcacatatttggtttgctgtcttgcttcccaaattatttcaatagataactaaaatagttaaaagtacaaacactattatagcttaagttaaatgttgaaggtaactaaaaaatttgataagaaaaagaaaaatgtgcaagtgtaacactcttgatttatgaagtttgagaaactcaactctaatgtcaaagactcgtagttaatacttaataatagtgcactatcaatcaacgaatttttatcatgcattaatatttaattttgagttggcaatagtataaattaaacaaggttatggctagcttctcgcaccatgactcatgcgtgatgactgatgagtaaatgaagctcaaaacaaggtattgtccagtgacttcagttatctggctgtctactaacgaaccaagtaaaaatgcaatggtatatcactaattatacgtattcaaactctaatctatcgcctttagttttcctcgtccgaccacataaatattaaatgttgcatttacatgacaaaatgattaattaccacttattttttctgagaggacattttggtacgaacaaattgtcaagtttttgaatcgaggacaagcaccataatctccacccatattatttatgatggataggtatcagtattaaatttaacataagatttttttgtttggatgaatgaaagaaaaaaataacaaaaagttggaatgtaatacacatataatcatctatataaaaaaggtttatcaaaatcataacatacaattatttgtatgtggtaaataacataccccgatttattgattaggtactagatcctcttttactgccagattatgtctatcaaatcttgaaacaatagttttgacaagtaatttgcattgtggtggtggaagtgtagatttattatatttagactattccaacataccagaaaactaatattaaaaattatttctagttatttttaaacatcacacatttcattctccacaaaaaaaatgaattctgtctttaaaattcaactaattaaccaactgtaaaataacaaaaactaaggagtgacttgacaaagattgtgactgtaatttccatttttgtaataaattttagataactagagtttttactgtatataagttttggatgtagaaattctagcaataaaattaaacaaaatctacttaatgtatggttattttgttctcaaatgaattatttttgttaaaggttttaaaagaatcccattattatggattcgttagtatatcttccctatattggtttatgagcaattgttgtcattatatctcaattgtttgtagtttttagtcttatatgtataaaaagaaatttgtgaaggtgttaggtgtctcaaagtttaggttcgaatttttgtggtgtttaaagaacgaaaaaaaaaaatatactatgttttgggcacgtggtcgccacggggtacgtgaatagacaaaaaacatgcgttggtggcttgtggtgctgtgacgacggtatgggtcccactggcttatccacttcgccgcgtttttcggttttagctcataaggtgggacccacactcttaatggcctgatcctcatcttctcaccgacgaaatattaccataaacctaactgagttgaccaattgggcatttttttttcattttttcaaagtttctactttttttataggctctattttaaacgtaaagataattattatgcgaataccttaatttagaggattactgtcaagttactatcaatgcaaggcaaccaactatcttaatttttttgttaattatattagctatttaacaaaaaatttaattgtttgcagttataaaataattagaaattgtcgttcaatatttacggatataactggtagacattattagagtatgataatttatttttggtggatttatacctttctttgtgttgtttttcttctgttcattcattcctctctattacaatgtaattactctagtatcttaccaatcataacctctacatttgtttttacacaacgatacacatcacgaaatttgaagtctataatttacgtgtgtaatatttaacaaggagtcaaagaaaatcttacgcagacccaccaaaagagattctaattaaaaatttcttaatcaatggtctgatatttatatacagtcacaatcaccacagatcttacaatatcaactttatttgtctcttaccttcctaattctttttgtaatgaaaatttacttaattttaatatatatgaaaaacttttaaatgacagaattataaaaaatcaggaaaataatattttaatacaaattattaaaataatttcctaaataatatgtcaaaattttgaacatcattaaaaaaaatgagagagagtatataaacatgatacgtgtacggtgtacccaaccctagtcggcaatggtgacaccaggaaagaaacaaataaagataaatgttcatcttttcaaaaggacaaaaattaaagaagatagcacatagagataagaaaaggaaatggaaagttgtgaaaatgacctaacgagtggataaatattaaatacagactaagcaggaatcataaattgtcttggaagttatagacaaccgtgcaagtctttttattatgggcataaatcaaaggccacttcaattgttctagttccaacctttgtccgcaagtcgacaaaactaatatcatgtctattttttattttatttttttgaaactgtgggttgtgtgttggtgtaagattactatttttgatcaatcatcctttttttgggaccgataggtatggaattcggatcggatttttggatttgaagatcttgtctacttctagttaagaacactacttactcgcaaaactgtatcttaaaaaagacgtggtacaatgagatacgaaatttattaagagacgtggtacaaagagatacttttgtttttggattaagtcaagatgcatcagaaattactgtagactgctttttggtatgtttaaacttaaaaccaaatagggatattataaaagaacgacacaaaattaatcggcaaaagaaaaaacatattagttgaaacgaagcaacacaatttgtttagtttataatattttggtgaatagtttgttttgcattacagaatgcaattacattttataaacttatatggttagtaaacaaattgtgaaggtgttacaaattttctctctttatatggttactaaaaaaatgtgaaatgtgttacaaatcccaaatttcctcatttgaaagtcaccaatcaaaactggtaatgtgaaagaattaaggacaatttatcaatttagtaaggatattagatatgagtccaattttttagaccaaacatcagtcgaatagacaccaatgcacccttccactgattttcacttcagttgttttccctagaaaaaaaattgcttcaaaacccgactatttagctcgtattgctacaatccattcatgtaatttgcggtctggttgtcgatgccactagtttaagttatttctatttattaacaactctttaggtgaaaagaaataatctctcctaactcacagttatcttctaagttactctgcttcaatatcaaatgtttatcaagtcttgaaaaccaaggagttattattaattttaccatccaaacatttgtttaaaataactaaattcccaatcacaaaattcttgagtgattgtttcagtttgtaggtatattactatcacatgcacaatttctaaacatgttgcacatgtacgtgggtttatatataatgtaattcaaagacatgccaatgcttaatttcttcactttgatagaaacaaatagtgtacatgacatagcatacacatagaaattagcagtagatacaaattgttattggatatcaaatcgatagttgcataaacttcaatatacaactatattatgtttttcttttattgttttaatttatcaactaagagattccgaacagaaaaatctatttatatatttttaaacgattcgaagcaacattaaataatttatttgtactgtttgtcatttaatcatatgatttcttaaattatttctgaatatttttccaatcaaagtagcaatttttagtaactatactatgttataatttgtttgttctataatagttttgacagtgatggaaaagagtctatttatccagaaaatgaccccttcgactataaacaaatataaatgatggttgttattcaaagcataggtgaaggtgtcccttcactttgttgtattgacttttatttaataagtaatccaaactcgaccaatacgaataatctactacataaacatatatgagagttttatttgtacactcgtcttttgaatttgacatttgtatgtgaagctgtcacaaattttgtaatatttttagttattataaaatatattgtggaggggcaacttaacatgtcactagctagtagccaaattaaattcaaagatttttgtttaatgagatttttaattagagctttaagtgacataaaggggataaaaagaagcgcagtgagttacaagtaggattcactttgtaattagaaatttgtttttcgacattaatatgaaaaagaatgtcacattatctactttaacatccaatcaaagactaactcaaatcccacttacctattggtctctatgcttctttaacaaatatctttagttgaaactcagattattcaattaatatgattataaaccaccatgcgaatttagtagtgatgcaaaaaatatgcacatctaaactcaattatcaattttaaatttagcaacacactagactataatcacaagtgaatttggtatatttgtattaagtagttgatacacttttatttccctaagtattagaatataaataatattaggaaatcttcaacctttgcttgttccttacggtaacgacagtcacagacgtcaaccgcaagaaacaaaccctaattcatggagatatccagaggagaaatgttccaaagagagtatagctaaagaatcatacactagaccatataagtcatcccagcttgcaagatgttcatatgaggaacagtgagattcgcagctccagctctgcaatttctccttagaaacgcatagaagtaattaatcacaagcttcttcacgaaaatcgaattcttcttcgcccttacatctccatgagccagtaaatacgttagccccgagtctgtggcttctctcaaagccgcaagttcatattccagagctggatcttcctccatagacgaccctacgcttgaagatggcaaaacctctgaatccaactcttgctctggctcagaacgctttgcacggtggatgagaggagccatgaggtcgtccgtgtaagtatcacttgcaacggaaactctatcgggatcaaaatcattcagagtgctctctagagcatcctctaatgcttcacatctcaagaacttctctagactttcaataagaagctgttcaaagactctagaatcttcttttctgacatctttgtaaccatacctcgcaatgcacctgaacatatggtagtccttaggacaaacccgtctgaagaggaacctctcttcttgaggaacaaccgggacaggaacatatttgatgcagacaaagatgattgttgagtgaatcgcaggaagagtgagcaagaactgtccaaaaatggaaggtataccttggacaagctcgttataaaggagtccaatcccagggattcgaatggtcccaagagttgaaccgagctcacgcataaaatccatggagattctttccctgacctcgctttggtacttgagtacacttccgtagttccaaatgtacattacagtgaggaagaaagtggcgaatactagcggaacccaaccgccttccaatatcttggtgagaacagctagcaagtaaatggtctccactgatccaaatataaggggaaagcaaagggcgagaaatatattggtttgccaaataagaagcatcactagagttaccaaaactgtgctaaccatcattacacctacctctgctatgcctgaaacaggaaaaaagaagaaaaaatatcaaaacgagaaagccttttcaggactctgcgtagaaatcaaaccgaaagactgaccgtaagcattggcaatgtgggttgtgcttctgaagatggagacgacaagaatgcacatgatcatcaagaaccagttgataactggtatatagatttgacctatccgtttcttagaagtgtggattatcttcagccttggaaagcaaccgagagccatggcttgtttgacgcatgagaaagtcgcggagatcatggcttggctagctatcatagcagctaatgttgcaatcacaaacaccggccagaacaaactctctgctcaacattgcattttatcacaactttcagaatttttgacatctaatataatcaaagctgagagattaaggatatattgaactattacttggaactgaatcatagaatatgcgagctgaggcctcgggatgctttgttagataagcagcttgacccatgtaagctaagagaaggcatgggaacaccacgcaagtaaatgccatctgtatagaacgaactgagaaatgtcctaaatctgcaaacattgcttcagctcctgcgtagttttaaacactttgtaagaaaggtttgatttattttagaagttgttaagcgtgttgacttacctgttatgcataagacacatccaccaagagcagaccaagcctgtttgctattcttgttgaagaacaaaacgatataaaacgggtttagtgctcttatgacagtgaagtcatacttcaacagattatagattccaatagcaccaagagagaagaaccagagcgccagaactggagcaaatagaaaaccaactttacccgtcccaaaccgttgtatgctgaacaaagccacgagaatcacaatcgaagacataaccaatgcatctgacaagaacaacacatcaagattgaaaatcaaagatcaaattgacatcaagacatagagagagaaatcatgtgataatgatacccacttgttccaaatcctttaacttcaccttgtagaccactcattgcagacatcactgcagaagaatcaaaaggaagatcaaattccaactgtaaatgcagctcaagttacactgtattaatacaaataagactcacctgacatagctggtgttagaattccatcgccaataatcatggaagttcccattaggactaaaagcaaaagaagagttttcaaatacccttttgtctccaaagcttctttaatccccagagctctttccagctcaggagttgggagtttaagcctaaaactcgagatctgctcatccgcaggttgttgatttggcagcttattcacctttgcatacctacaaataagtgaatacaacgcaaatgtccctcctgcacacataacaaacatatcctgagaaaccacttaaatatctcactttactaaacacatcggtgcggaagcattaccttcgccattgtcgttagctttaaggactacaaatacatactttgccaaaggaatcacagcaatagtgtagataacgagagacaaagctccaagaacatcaacttctgatcttataggaactttactaaacacatcactgaacacatacaaaggacttgttcccatatcaccatacacaacacctaacgtctgaaacgctattccaagtgtagtcaaaagtgacaaatcctaaaaaagttttcatttttcaatgtcaataacacaaacacaacatgtgcacttataaaaatcaaaactttaatcatgggtgattaaccttgagattgtgaccatgagaacctgcaatttccatagcttcaacatcaagagaatcagctcttttgggttttttcattaatcttctcctcaaattcccaaaactatagtctctatctctgatttctgaaaacagcggcgtttcagagtctacctcgcttccatcaacccatctccggtcactacttccggtaccaacacgtcttatgctgttgttgctgcttccttcttcaatttcctccattatttagaataatcctccaaaacgagaagaagcagagaaactaacaactctgttttcttgaaaggattataattttggttggaggaaaaattagaagagattggattggtcattgttattggttgagtgtgacttcactctctgacaatatctcacgggtaacatgttcatagttactgtcaagaaacagacaattatttgaactactttaataacgttcccaatgaaaacactatatttttttttttttttcctcgattatctatccttatcctataaaagtattttagttccttctttcttttgttatgtataatggaaatttactttattcaagaaaaaatttactctttttagtttctttgcttttttggtagcaacattttccccaatggagaacaaggatctctgtctcaaccatttttttagatacattttactctattttatttgatatacaatagattttagtttaattttttgttgtttcaagaaacacattataaagagagaatttttttttttcgatgggtgaaaattttgttttatcaaaaaaaattgttgatttgtaattgtaatataaaatttgctacatatgtataattattttaatctatatatacatttttgcagccactttgtgaaataaatcctcaagttgggacttatttacagtggctgccactgacatttaataattatttttgataattagaaagtaaatcttcgaattaaatatttgacatttaactatcttcccgaaatctctccatattaactacacaattagttactaaaataaaacttccaaaatatttaatatcatttaaacactacaaaattatcatttttgatattgcttttttcatgactataacaattcgattataagcatcaaaccgcagaaatatttgatagcagttaattactacaaaattacaaaatatttatacaatgatttataaatatatcataaataaaatcaacattaataaaataaataggtttcttttacgggacgggtttggcaggacgttacttaataacaattgtaaactttaaaataaaaatattttatatatagatacaatttgcaaatttttatatatattaaaaaattaattatccccgcggtgtaccgcggattaaaatctagtgtgacataaaatagaactgaagcaaacctaaagagtaacttccttttgtagaaatataattatttcaacaaaagattgtatagtaagatattttaaaacggaaatttgcagaagcccatttactagtgttagtttcaaagaaggcccattaaaaaaggcccaaatattgccggcttcgaaactcgacttttttatagcacacaaggtttcaactgaaaacattcctcttcgccttcctaaggaaaaaacactagtcgctcgctgctcttcaattttcttctcgaatctaatcgattgatttctccttcgattcttcaggtaacttttgattatcctcctctaatcaattgtgtatatcccaagctttctctataaattagggtttctgaatcaacgatttttcttttatccgtaggagaatcactgaagcttttgcctcccaagtagaaagagatatggtaagcgtttctttaactctattttcttcattgtttcagttattggcgattgtattctctgtttattgtaatcgtattgtgttaattttgatttgactcatcttctctaaagttcaatttcaaaattagggattccgagatcatagatattgctttgtttccgagatttgagttattcttaagcttgttttactaactttcaatatgttggatttgttataggcaactcttgaagattctttccttgctgatttggacgagttatctgacaatgaagcagaattggtgagtgttaaaacacttttgattactattatctgtttacttggaggagctatgattgtaattgtagtttgtttgattatacatatgcaggacgagaatgatggtgatgttggaaaggaagaagaagatgttgatatggatatggctgatttagagacacttaactatgatgatctcgataatgtttctaagctgcagaagagtcagagatatgctgatattatgcataaagtagaggaggctcttgggaaagattctgatggagctgagaaaggaactgtcttggaagatgatcctgagtataagcttattgtggattgtaatcagctttcggtcgatattgagaatgaaatcgttattgtccacaactttatcaaagacaagtacaagcttaagtttcaagagcttgagtcgttggttcatcaccctattgactatgcatgtgttgtgaagaagattgggaatgagacggatttggctcttgttgatctcgctgaccttcttccttcagctattatcatggttgtttcagttactgctttaactacgaaagggagtgcactgccagaggatgttttgcaaaaggtgttagaggcttgtgatcgggctttagatcttgattccgcaaggaagaaggtccttgagtttgttgaaagtaagatgggatctattgcacctaatctttctgctattgttgggagtgctgttgcagccaaactcatggggactgctggaggtttgtcagcacttgctaaaatgcctgcgtgtaatgttcaagttcttggccacaagaggaagaaccttgctgggttttcttctgcaacgtctcagtcccgtgtgggttatctggagcagacagagatttaccaaagcacgcctcctggacttcaggctcgcgctggcaggctcgtggctgcaaaatcaactttggcagcaagagttgatgctactagaggggatccgttagggataagtggaaaagctttcagggaggagatccgtaagaagattgagaaatggcaagaacctcctcctgcaagacagcctaagccacttcctgttcctgattctgaaccgaagaaaagaaggggtggtcgccgtctaagaaaaatgaaagaaaggtagcctttttcatcctactttgtgtccttaattactgtagattgagttctattcacctgtatttattttgttgcattcttacgtttctctttaaatcaggtatcaagtaacagatatgaggaagctggccaacagaatggcgtttggtacacctgaagagagctccctcggtaatatatcttgtagttacacttgttaatggccacttataaggcacttagtctaatatctactcttcatgatgataggtgatggactaggagaaggttatggaatgcttggccaggcaggaagcaacaggctgcgagtatccagtgttccgagcaagcttaagattaatgctaaggtcgccaaaaagtaagtgttcctctatttctcctgtgttttttcggatttatcatgttaatatttttactcttacaaattatcctgccctgttcttcttccatcatatctcatttgcgtctttatatcaattactttttcaggcttaaagaaaggcagtatgcgggtggtgcgactacctctggtttgacatcgagcctggctttcactcctgtgcaggtacaaacatttcattcgattcttgacaaaagtttgatcctgtgttccatttgcatcactgtctgactccaattggttatctatttgacagggaatagagttgtgcaatcctcagcaggctttaggattaggaagtgggactcaaagcacttacttctcagagtcaggaaccttctcgaagctgaagaagatctaaaatatggaagacagagatacaagtcttgaaaagccgagcactaaaagtgtaaaaatgaaacaaaggtggaaagaaactgctttctctatctcatgtctgttttaaggtttcttcggtcacttaagagacaaaaggcattgttttgatcactctttggaaacgttttataaattttatttttgtattagagccatacctaaagatccatcttcttattaccatcatacatgacacaagccattgcaggttttaaccactcttcgaacatagttagtaaaaacaagaaaagaaaaaacactatatttaattgaggttcaatcaagactaaaccaaatgattcacaccactcatagtctcagtgtggttgagagcacaatcaagacattattcttctgagaaaatgttggaacaaactcttttaacttagacctaaggtaatgttcgtttaactgaacgaccatcttgtctaatatctttgtgtttttaagcataagttccacgaataaagtcactctctttgaccctaaattcgaacgggatttattccaaaagaccccatcttttgatctccaacattgattcggattcaagccttgcaagtccaagtagttgtcaaaacacctaccctacacaacagaagagtaaacatggttcttggattattagaaggaaggtagttagaaggtaggccatgaaaaaaatcaaagaagtttgtggtaaatataccggcatgatgttgccatcacttggacgaactgtcaccgtctttaaatcaggtgagttttgtaaaagtctttctataccaggaataacatactgaaagatatctgtctcaagagtcaaagcttttgtcttgaacatcgggaaaggaagaccgcaaacctcggcaagagataaaatctaacacaaagatagatagtcaacaccaaaacgcatattgatgagtaccattagtccattagtaaacttatatagcatcggtaaacgttgagtgtgcaaccaacataagtgaagtaagtaagagagtacttgaagacattggagaatgcaagaatgagcccaaaacatacctgaagaatgttgcacccaaaaataagcttctctgcattctgcaacttctctagcattttaagaatgtcttgaagtaaataagcgtcgagggtctttagatgtgagtaaatgaaacagtccacttgagcttcatctaaagacgagacatcaactaaagcacatggtgactgataggttttcagtctgagacgatggatatgcggtgccacaatctgccttggcctcgtattgtcaatgttgcaggctatttctaatgttctcaagcgcagcgatttgctaagatcaagaaccgtaaggtagatgcagtgggacaatgttaagctttcgagaatcggacaaccagatagaatcttcgcaatacattcatcagagagctcacaaaaacgcagggacaacttcttcagggacgtccaagatacggaacatctaggaatcatattaaataactcaaaagctgagttgcttaatagaggaattgatgtagaagaaatcaggaagattataactatgaaaaaaagtactactgaatgatagattctccacgttgcgggacatggcgaacttgatccacttgtcgaagtggggaacagtgtgctggttgctggttttgagatgaaactttatcatcttgagagctgtgtagcgagttagggtttcgtttatcgaagcagcatgcagtgtatcactatcatcaaaggaaagagaaggtatatcggaccatacatgcctccatcgtttttacaagacggaagttgtgatcgagagtttggtcggaacaaataataggatttgttggaggatctcatcaggcaataagctgattaggtcaatattccggcgatgacgaccacgatcgttacagtggataggaagactggaagtggctgtggagctctctcgggccatcttactttattaacctaacttgtgatcttcttaattagggtttaaatcttaattttagccgcatattgttttctatatataataacattctttcaaaatacatgtcaaacaatttatagcaaatttaattaactattttttttaaaaagtcttccctaataagtgctcttagaacaataaatcggcatttaaaaaaaaaaattggcattttatttttttcgtttttttaaacttattatatggtgtagtcgggctatactggacttttgcaaaaatgtggtttttatattttatattgtattaggtttctgttaaaattaaatgagaattttaattaaaaagagaaattatttgttaaaaaaaatcaggatggggtcctaattattatatgttttgattttctatgagaaagttgcaccgtccattgtttcttgaaaactattatctgactaaaagaacagaaaatgtaaagaaaagacaaagagacacagagacgactctgttaaataactctatagcagagtctctcgagttaaatcaataaaataaagacctgaaaacatatatttcttcgaagcagtgtctaaaaccaatgtacaatttatgacaaaaggaacatgttattttagtcgcatataattacaaaataatcgcatgatttatctaagttggtctttattaactcttaacaaaaaaataatataagaaaacagagtcagaatttaaaaaccacttaattagtccttcaagaacaattatcaaaaccttaataatgttttcatccaataacatcctcgaagtctcctctaaatcattggatccaacgaaattcatgtttatctaaactaactcgaataaagaaacgattataataattgcacactatgaaaaatatcagaagcgtcatagaaattgtcggctacctccatgcacggaaccttcacgaaacagttggtccctcacacacttcatcgccacgctataccacgtgtcaattttacatacaccaaaacatatctactaatcatacctcttcacgtgtaacaaagtcccattcaacgtggcaattacagaccccaaaattatgaactaatcaaacctcttcacgtgtcgcaaacttgtagaacgttgaaaccccccactcacacgaagtgtatatatcctcttcacaacacaaacataaacattacttcaaacaaagacttgaaagaactatctttgttttcactcatatcttatctttattaaatgatccatacaccaaccgggtcgagtcgtcggattctgacctttccggcggtgaatccatgcgaatcgatctctttaaccactctcgtcgactcacttttacaactcgccggcgagattcttagcttcaaaccaaaacacttctctaccaacaaaagaagtgttaaagaaactctccgacatgttcaaactcttgtgatcttctttgaagagctccggattcaaatccgagtcgggtcaataccggcgggtcgttcggtaatcttgagcctttcagagcttcacgtcatcttccagaaactcaagttcctactagacgactgtacaagagatggagctaagctatatatgttaatgaactccggtcaagtctcggctcatttccgggatttgacccgatccatatccactagcctcgacacgtttccagtcaggtctgttgacttacctggagaagttaatgagctaatctatctagtaatgcgtcagactcgaaaatccgaagcaagacccgaccgagacgacaaacgagctatagactctgtttattggttctttaatctgtttgagaacagaattaatccgaattctgatgaaatactccgagttcttgatcacattggtgtaagaaaatggagagattgtgtcaaagagatcgattttttacgagaagagatctccgtggggaagaagagtaacatcgaaatcgagcttctcagcaacttaatggggttcatatgttactgcagatgtgttatacttcgaggcattgatgttgatgatgaagagaaagacaaggaagaagatgatttgatgatggttcgaagtttaaacgttgatgatcttcgttgtccgatttctctagagatcatgagtgatccagtggttttagaatcaggacacacttatgatcggagctctatcacaaagtggttcgcttccggtaacattacgtgccctaaaaccggtaaaactttggttagtactgtgttggtggataacttctctgtcaagcaagtgattcaaagctactccaagcaaaacggtgtagttatgggtcaaaaggggaagaagaaggtggatgtggcggagagtttagcggcggaagaagctggaaaactaacggcggagtttctcgccggagaattgatcaagggagacgaagaagagatggttaaagcattagtggagattcgaattctcaccaagacgagtactttttacagatcgtgtttagtggaagctggagttgttgaatcgttgatgaagattcttcgttcggatgatccgaggatccaagagaacgccatggctgggattatgaatttatcgaaagatatcgccggaaaaactcgaatcgtcggagaagacggtggtggattaaggctaatcgttgaggttttaaacgatggtgcgagaagagagagcagacaatacgcagcagctgctctgttttatctatcttctctcggagattacagcagattgatcggagaaatctctgatgcgattccgggattggtgagaatcgttaaaagttgcgattacggtgattcagcgaaacgcaacgcgttaatcgcgattcggagtttgttaatgaaccaacctgataatcactggcggatcctcgccgccggaattgttcctgttcttctagatttagtgaaatcggaggagattagcgacggagttacggcggactcgatggcgattttagcgaaaatggctgagtatcccgacgggatgatatcagtgctccgtcgtgggggattaaaactcgcggtgaagatattgggttcgtcggaggtttcgccggcgacgaaacagcattgtgttgctctgcttttgaatctgtgtcataacggcggaagtgacgtcgttgggtctctggctaagaatccgtctatcatggggtcgctttacacggcgtcaagtaacggagagttgggaggtgggaaaaaggcaagtgctctaattaaaatgatccacgagtttcaggagaggaaaaccggtccgggtgaaccggttctagaaagagaacggtttgtccacgcctggtgatgatttgatgatacacaataactctttgagctttttttttatcaaagagttaatataacttcattttttataggttaaggttgaaatactatattttacaatacttgtgtatattttagttctgggatttttaataacccaaagagctatactattgtaatcagtctcttgttttcaaaatgtaatgtaataaagcattaccgatttttgaactaaagtgaagaaaaaagagaacattaaactcaagtggtgcaaatatttattctgtgaactaaatgtatattttgtattttcttgtttcaatatcttcttttgcatttaaacatggcgattcttttttaatccaaagacaagaagacttggaaaaaaattgggatactaagcaacaaaggaagataaagatctttaaagaaaagtttcaggctttggattttaccgggactccagcttcaacccgcttgatctcaaagatgagcattctccacatcttcagcacaaacatctcagcttcttcgtctagaattgattgcaacagctcaagcatctgagacgcctgcacgtgttgttgagtgtttgacacgatgaaatctaccagagtggcttcctcttctccgagaaactccataattttctttgagatccatggtctcattctttcgtgcacttggtgcttttcaatgttaaaaaaggtgaaacatgtcagcaccaaaacaaactcacagtcaaggtaaaaaaaaacattgatctagtaaaagtgtaatgagatttatgagtagcttaccttgtcatacatagcccagtttatctcgtaagaaaataaatcttcctttgtctttgggattgtatctatcaattgtttcgcatccagaaacttagtatcaattatctttgcttttccagactctttggcgtctttggtgggaccactatgcccgtcacctcggtccctgactctatccctgtccctgtccctttccctttccctttccctgtcccggtggcttgccttatcatgagaacgtctgctcctttgtttttcggtttctatcgtctcttccttgggattggtactcgaaattcgttttgcaaattcagcggctaaagccaaatgaggtggtgtattccctgagccaccatgggccacagcctcttgttcctcggttgagtaatctataggaaccaaaggtttcatctttttagccttacgtgcttcatcttcatcctcctcatagaaaacagaaggcacagaagttcgctttccggatcccacaagcccaaatcctaatttctttgagggagcatgtgcctctgatccactattattatcgatagccatcgattcattaccagaaccattttcttcaaaatctgcaattggcaatgagagcattagaaagagagacagaggaaaatgagaaagacgataatgagaataagacagagagaatataaactccttacctgctgcatggtgctcattggcagattcaccgacagtttggagagttgccttgtgatcattttcaataggtgatgtctgaaccgtttcgcttccaatagctgcctgtcccgataggattcttaaggcatctaattgctgttgctgcaaattttgctcctcggcactcctcttcgcctcagcaacctcttcctcttctttcaatctatcagctaagtcatcctccttttctcttagttgtcgtcttcttctctcatctaatgcagccctatgccatcttcttcttgaatcatcatcgtcttcttcctcttcttcctcatagcggatttcctttttcctcttgcgctctttctctttctctttctccttctcgtactgtcgttccttctccttttctctttctcttcgttcccattgtcgaagacgagtctggtaagcacgctctgcatcctcaagtttcctcctttgctctctctctttccttgaccgttctctttcagcctccctctcgtatctatccatttcttgctccttctcacctctttctctgcttcttcggtcatttctcttactccaatcaggtgagcttgtgtcaggcctattgtgttctccagaagtctcaacatcatttgctgcggcatctacatgataaaaacatcctatcagaccaatatttcaaggaaaaatagaaatggcagccaaatcaaggacaaaaaagagagaagaagattagtggaggtaaaaacagaccactcctagctacgtcagtgttggagtcaccatccttagatttgaaagcaaattccatgcctgaaccatcagcaggtggtggtggtggaggaggcaaagggttggactttaacctttcttcaatagcagtttcaatcttttccatagcctctctgtctgcttccctttcttcatcagttaggacagcagaattcgcaatatcgatgttttctttaatcttcgattctccatccttccctgtctcattatcagcactctcaagcttgtcttgctcactctcaggaccttcagcttggttctctttggttccttgactttccttggctttctttgcagtctctattttcttctcaacatattttagcaaatactcctttgttgcttgattaacattcacctaccgaccatatagaagaaaaaaatgagaataaagctaagagaataccgtagaagcatacctagatattggttgacacagaagtgcatctattgaagaaacataaatatattttgaaatgagaagagaaatccacaattaccaaaagctcttgtccatctatagtacgttgggtcagcaggcgtattgcgcggagaatcccttcagctgattcaaattcatagaatccaaaacctttaggtttcttggtggtaggatcttccgcacgtaaacagcttttgacatggccacaaaactgcagaaaaaaaatgacaaaatcaattcttataaaatgtatagcaaaagagatggaagtaagtgcctcgaacataaaccttaaaagtagtagaagaggaacatacagatagaaagaagaaaacaaacctcaagaatagacatcataaagtcattttccacggtagctatcttgccaatgtaaattgtggtctggggcttttctgcaggtgttacaaaaggaagagaagccggtctaaccataggaggcattacaggacggagaccaggcattcctggaataaggggtcgtggtgctagttgaacagcaccgattgtaccaggcggccgcataatgaatccaggacgaaccattgttggatatggagaaggataccggagaagccctgcataaacaaaaacaagtctctacaaattcatcagtagatgtttacattggaataccctgaacaactgcattggcataaatcaagagtatcaagaagcagtaaataaaaatcattttgtattgttaccacaaactagagcaaattagatatgcacaccagaggcagtacaaataccacccagctgaacagagatcctgaaggacacattgagaagatagcaccaggatcgtagtcattattaccacattaagtagtcatacctcacagggcaacttgaaataggtaagaatctataatcatctgttgaatttgagattcagtaatattgaaactcccatcatttcatgcccatatagaacttataaaaactattattacccatcataatagctttatttcaaccattagcagcttgaccacagaagggaatagaaaaaagaaacatgtcgaagatgtaacggaaggtgtaatttgaaagaattgcaatacctcaaaatcaagaccaaggagcactcagtcgctacaaatgcttgctgctggcagttgattaacccatcaagttcaaagttttgttcttaaaactacagtaattctcaacttaacatataaattggggcaaatctttcaagaacctttaggtaagcggtttggttaaagatgtgttacactaactaaataaattaagagaataagaagaacaaaaagcgaatttgcgcataccaaaatgagggagtcgtagaagtgagtccctacccaaaatttgatgccttgcaaccattctcagggaactcaatcaagacgctgtaggagaaaacacccggtcatcggtgttcctgtttctagttttctccctaattcctctttcaataaaacttctttttactctaaacctttaatctaatccaactacatagacatatatagttccccttcactactttaagcatcacaaattcacattcaacatacacagaacgaaaaaaaacgccacgaaaataaactatatagcctaaagtgcatcataaacaaaaaaaagagtaagaacttataaaattaagagatagaagaacccaccatgaggaggcatggcaccaggaggagcaacaccatgaattccgggataaccattagccataggctggaaaggtctcataccaggctgcggttgatactgaggcatagatcctggaggaggaactccagagctagggttttgaaaattcgcaacgggagtgaactgcataccgggacggaatggtggtggcggcgggagattggtggggagaagcgagctaggaatctgagccggaggagcataaggcggaccaggtggaaccagaggagcgactggtggttgcgaatgttgttgaggcggcggtggtgttagtgaaggattgggatttggattgggaattgaaatcggagtagtggattctggtttctgtgaattgggatcccccgtggccggagaagaagattcgtcggccatgggagttttggttacaagctttggcaatgaagtaatgaatgacttcaccgaatctaaagattttgtgccctagaaatcagaaactccaattttaattactctttatctgtgtgtgtgtgtgtgtgtgtcaaagttacaatttctttcccttctttacgacaaaaatcttaagtaacttttgtttattgttacacgtgtcaataaattattggctcattattccattgtttcaaagtcaattttcattatacaagacaaataataggcagtcgggaaaatataattcatctatacttaataaagaaaattaatggtaatttgcttaattgaccaacaaactcttaatatattcaatttatttttatgatattattgtcttggtacttagtaatcattaatcaatatacttatttaagcaatcatccttgaaaacatgatgataaaataatatttttaatggatcaagatacttaaccagtttaatttataaaagaaagaaatttacttgttgatccactcaatttagccttgaaatctttggtggttgattagcctttgctttggaagtgacaaatctgattcaatttggggtgaagatggtgacgttggtgtggagtgaagtcggcggtgctgagctcctttgttaattctttcatatgtcatcttggaaggttgctagatcggaggttttgtccttctatcaccactttgaatattattttcatcgttgtaggcgatttggtgttcttagttgggctttacttctctttctcggctattcattctgtttttagtttgggactgagttcttggctaaagaattgtggtgtcgtttactgattttttgagaatggttgtggattgaagccttagttttaaggctttggttgggtctacaaatgtcctcgtgtaagaaatgagggtcctctttggcattttccccttcggatatcaagttttctccttgtacctttgctttctcgtcttctttggttgctggaaggtagtattagtttggttctttgctctactctatttgattatccgtcttcatttctgctgaggtagtggttgtgtgagctcggtttagcccttttctcgggctttctcttttgaaggcattctaatgatttggttttcttcaaggcttttgtttgtaacctttcttgtggtgaagagtttctagtagtgaattgctttggagtctttaattgttagtcatctccatgtcttagtgattgtcaagtttagtctcagtaatcttgttttgtactagttgataggtttttgtttactatgggtttgtccattttaatggttcatatataaaaataacactcttgtgacccaaaaaaaaaaacacatattctatcttaattgtttttttttaatgatatttaaaattttaatagtaaaccacacattttttctatatttagtgtttttacttttatctcaatttatttattctctcaatatatctttaaataacgtcagttatttttgttgtttactaaataattactactgtgtaacttaaactttaaatattagtgacgataaaaaagactttaaatattagtaacttatccttaacgttttactcaaacataattatacttaattctcattcatctttgtactattgagttttcccattataatctttatctatgcatcacaccatttatgtgttttgttgagatctatattttatagttatcttaacatagcaataggaaaaagagaaattttttgacaaatactaaaaaaacttatttggaaggtccccattttttataaatctgttatattatgaattatcttattatataataaataattaataattacgaatatataattaattttttgtgattcatgtatatagattcttttcggttaggaaattttctattttttgtttttaaatattttaacaaaaacttagatttgacacatgtcgatatctcatcaatgtagttgactcgtgcgtgatcacgttagttagcaactttaaaaaccctattttatataataagatgcaaacttgaataaaatggttctatttgagacttgtttttttgtacaaaattagaaagatccaaaattcaaactgatcaaaccgtacaaattagggtttttttgtcgtgtattacgtcattagaaaatattatttttaacaatgatgatcttatacatttgataagcaaatctaaactagggttttgaaatcctaaattaaagtaaatgtttcatgtacatgacacatacattttcaaaaaattagaaaaatccaaaactcaaaccgttctaatccaataaaattaagttttttttgtcgttagaaaatactatttctaatgatgatattacatttttcaagaaaattcaaactagggtttcatgacaatacacatgcatatctttaacactattggaaaaatctaaaacctcaaaccgatccaacaagataaaattaatttttttgtcgtgtctgttaaaaagtactattttcaatgatgatcttatatttttcaagtaaatccaaactagggtttcatgacaatatacatacatttcacaaaatcgaaaactcaaaccgctccaaccttataaaattaagtttttcttttgtcgtgtattaaatcgttagaaaatattatttttaatgataattttatatttttcacaagtaaatctgaactagtgttttaaaaatcctaaattaataatatttgagcaaaagtaaattcttgacaattacacatacccatacatttacacaagtaaataagttactcaaattgcaaaattaccaacatttacgaaataacaaaaaaaagggaaaaaatctctttcttttgtggattgcgaaaaagagtcaaacattttcacaagcaaataattgctcaagttacaaaattaccaaactttacgaaaacaaaaaatagaaaaaaatccttttgtttgtttgtttgtttgtgaggaagagactcttcaaaaaggggctgacagtgaagagattgtgagaacaaagacgacaaatgggcgattgagcgaagaagaaaccttcgttctctctcggaaatgacgaagaggaagaaggaagtaatagatgtcgattgctccgagaagaaagattttgtgattgattggtcttccgctatggataaggaagacgaagttcccgagctcgagattgttaataccaccaaacctactcctccgccaccgccaacgtttttctccgacgatcaaaccgattctccgaaactcctaaccgatcgtgacctcgacgagcagctagagcgtaaaaaagcgatcctgacattaggtccgggcttacccgacaagggtgagaaaattcgactcaaaatcgctgatctcgaagaggagaagcagcgtagagttttagaaggctcgaaaatggttcgcattctgattcaattgcatgcttagttcgtttgattttcttagatatgttactgttttaggttggggttttcaagtttatgctaaagtttggctttttttgagtacatttatgtgtatctttactggtcttacctcatagtccaagctagattcgagctcatttatgtgtatgatctatagtcacagaacatctatgtgttcgagctcatttatgtgtttgaatatgaatatgatgctacaaaagacttttttggcaggaggtggacagaagttctaaggtcgtgtcttcgactagctcaggtattcttggtggataatgttaaagttgtttgcttctaacatagtggttcatttttctgtatggtttttcgatttatctttcattttttggacttaagtttgatgagccatgtttcatgtaggttcagatgttttaccgcaaggaaatgcagtttcaaaagatacctctagagggaatgcagactcaaaagacacctctagacaagggaatgcagattcaaaagaagtctcacggtcaacattttctgcggttttcagtaaaccaaaagtatggagcatcgtttttttttttttgttcaacgtatggagcctctatattttgcaattttaaaactgttttggatgggtacttcttcatgatacgattttgtaatctgtgttcaacagacggattctcagtcaaagaaagcctttggtaaagaactagaagatctgggatgtgaaaggaggaaacacaaggctggtagaaagcctgtaacaaggctgagcaacgggtggcggttgttgccagatgtagggaaagctgagcacagtgcaaagcagtttgattctggacttaaagaatcaaaagggaataagaaatccaaggaaccttatggaaagaaaaggcccatggaatcttcgacttattctctgattgatgatgatgatgatgatgatgatgatgatgacaacgacaccagtggccatgaaactcctaggttcgtttccaactgtttctgctactagtttgttgttttctctaagggttctcaagtttaccactgctggttactgcaattttgttgtgacatgacaatctggtacataatagaatgagatgtattgtaattgctcaacttctttctctcatagggagtggtcttgggaaaaatctccatcacaaagttcaaggcgccgtaaggtattcttgcttactcccgctactgtatatcttgcaattgcagtttttacgtagtcattatagtccttaagaaatttacaccagcagaagcatgactcattttctaaaccttcttgttatctcccaacagaaaattttatgaattccttaaaaagacttcagttttcgaacgtttgattcctctctagatgaactgcaggatttatacttgccaggaaaacttcctacttgactatatcatttatttggcttctttaatattgtctttactccaactcatttgttatgttgtttttcttacttattgatgatattccctaaaaaaactatagaaatcagaggacacagtgataaatgtggatgaagaagaagctcagccttcaacagtggcggagcaagcggctgaactgcctgaagggtaaatgtgacctattttctctttagcctcattaagttacaactggctatatataaactaatagttgataaaacatgcagcttacaggaagatatatgctacccaacaaggtaaatctatctcaagactgatctaggctaacttcctgtaaatttgtaaccctcaaaagatttaatgcttggtgattcagggatgatcctcactttgttcaagtttgtcttaaagatcttgaatgccttgcacctcgagaatatctgacatcgccggttatgaatttctacatgaggtattttttggagtgatagacttgccatatatgtcatcttatattatgctagcgctatttgcatgttatttatataactattgtcctgttttcttttggtaggttcttgcagcagcagatatcatcatcgaatcaaatctctgctgattgtcacttctttaatacctatttctacaagaagctcagtgacgctgttacgtacaaggtgattagaaaaatgtgatcctttaaaaataattatctgttggcattcttgcgattcaaatttttatcattgttatttatgttaactggtctatttatcttgtcctttcaatgaaataggggaatgacaaggatgccttctttgtgaggttcaggcggtggtggaagggtattgatctatttcgtaaggcttatattttcataccaatacatgaagagtaagtatctttccttttagcactctactttcgattttttcgcaagagttctcaagaattcagattcttgtaccatgtttcagtctccactggagccttgtgatagtttgcatccctgataagaaagatgaatcggggttgactatacttcaccttgattctctaggacttcactcgagaaaatcaattgttgaaaatgtaaaaaggtgagatgctaggggctttacccgtgactttatgttctcacatgcttgacgttgtatgcatatggtttcagttcataaaaggaaaaattattacactggcttgaaaatgtacgacatttactagtttctatgtcaatttgttgtaggtttctaaaagacgaatggaattatttgaatcaagatgactattccttggatctgcctatctcagaaaaagtatggaaaaacctccctcgtaggatcagcgaagctgttgttcaggtcagtcttttaccttcttaatcccatgattcaaggaactttgtttatacggtttcttcggaaatatgattatattcagacactagaaccacaggaagttcaattcgtcttatgatattattctctttgtgcaaccaggttccgcagcagaaaaacgattttgattgtggtccgtttgtgctcttcttcattaaacggttcattgaagaggcgcctcaaaggctgaaaaggaaagacctgggaatggtgagtaatctcaaactcttttcctgataccgaatcacatatcttcttcttactcttgtctaaacttgtgtcctcaatgtatccagttcgacaagaagtggtttagacccgatgaagcctctgctctgagaatcaaaatccgaaacacgctcatcgagctattccgtgtcagtgaccagacagagtaaaccagtacagattatgcagcttcaaatcaagacatttctcaccgctctaacagagttcaagtttttgttcttgtatagacttggcagaagtattatttgggccaaaagttaaattaaaaaatggctacagactccataggttaatgttgtaatccaaaaaaaaaaaatacctttgaacttttaattgtagtttcacaaaatttcattgttaaagaatctcagaagaagcataaaaaattggcatctaataagagttacgttacaacaaggtggggattttgttttcttttcactaatccaacatttgacagatcaaactgatgcttttaaagcggtgcggaactgctcgggcacccgcatcactggtgcctgaaccgccccaatcataccaagctgcccacatgctgccatttgatcattgcctcggctaaaccgcatgagaacagtgcagcctccttcagccaaaacgttacgaaacttgatcatcttgtcttcctcggtctgtatgaactgagaaccactgtgtgggttgaattgaataaggttgatcttgcatggaatcccctgcacaagctccactagcctccttgcatcatccatgctgcacaattaaagagtttctagttcatgatggtttcagaattgaaccatttttaacagaggagacttaaattgagaaacagagagcttaatagcggtctctactgaattatcacttacctgtcattgactcctgcgagcattacatattcaaacaacactttgtacttatgccttgaactgagtccttctctgagcgtctcaaggagcaaagataacttgtatttcctgtttataggcataatccagtttctgacctgcacggttcaatgaggtcagatcatacctcatgaatgatgactggcttaaagagagcatgaaaaaacctcatcagttgttgcattcagactgactgccaaagcgcaatttgactcacggagaaaacgcttcagctgaggaacaaggccactagtcgagactgtgaccttgcggggactgaagtgaagtccattctcgtctaccattatgtttgcagctttgatgacattgtcaatgttgtgaaatggctctcccattccctacaaaacacatccagctccatgagaaactggagacaccagtataaacagaccttaaatgtgatctatgttgagttttttgtttgtctaacgaacatgcataccataaagacgacatttgtaattgacccaacttcatgggaaagcaatcgcctggcataaacagcctgctcaactatctcagcagtagtgagatttctcttcaagcccatcctgtgaaatcagtacaaacatacattaaacacaaatcaagacctgaaaaaagtggctcaagataatatatgcttacctgccagtgtagcagaactgacaattcatggcacaaccaacttggctcgaaacacaaactgttgtcctgcctcgatcacaaggtataacaacagtctcaatcacaagtccatcatccaacgtgaacagaatctgcaacatcctgcgagttatgaatcaatgagaagattccccaaaaactcataaagagaaataaccacttcccagtcattgactcatccacatcattagacgaaaaaataaaacgatctattcaccttcctagttccatctgaagccgaacgaatatccttaaaagataatgccccaaactcagcatgttcactaatcattctcttgagatctttgttcaaacctaaaagaatgaacacataaatgaaaaccaatcctcattgctaaatcacaaaaacttctgagcaaagacatatcagaagacaaaccttcaagttcatcaacattatttgcccatatattgtccttgtacaatctcttccacaacattaaagcctgtcctggtctaaacccatgagattgaacccattcctacaagttgaaaatatccccaattccacctcaaagatcataaaccaaatgaagaaaagattgagaattgcaaaagggacgtacttggagcgaagcataagtcatacccttcaagaccaccttctggttatcatctctcttcacagaaccttaaagatagataattactacattcctcagcaaactttaactcaaaatccgaagttgaaacagtggttaaacaaaagtagtcacctttagctgatgggtactcttctagtgaaggaagataagctgctgaagaagaagaagaagaagagaagcaagagaaggagaggcttctggattcgtgaaagagaattgaattggtaagacggtcgctgaggaggggagagggtaaagttagggttccggggaaagctgccgttgaagagagtagcgacggagtgacgacggcggcggaattggtgagagtgatgattccaagacgcctcattgtcgtcgacatacgaccaatcacaaaattgaatttttattatccctttaatatttagacacaaaattgctcttttttttttttttgtataacacccagctagttttcaattttcataaaagtacatgaaccatttttgtatatactcaaaatatacacattgcatttcgtacgtaatagaaatttaacttcgatatgggtgatattaaagctacttttgtagacttatcagaaaccattttttatttgtgaatctttctttactttttcatggtgtatattttttttgaagattcattatttgatggaattttctacttatcgttttcgttttgtaaatagaagcatttaacttaagattataaacagttattgagagttaagacattgtagaattttagttgagtatatcaagaaaatgtattttttgcttatgtttcaaatgtacaatgaaatctatttttgaagtctttgattacactttgatttatttatcattttgtgatatctccttttttcgcaaactaaatttggaatattgcagtatatttaagatagcaacaacaattttttttttgtgtaaacgcaacaataaaattatttaatcgtaggtaatgtctacatttagtactgtatatatattttttgttaggtcaattgagaatcatgtttgagagcaaattagcaatagtatcaatgtataaaagaaaattatgcctttggatagagaaatctaatcttagaagaattccaaatttggaactcgataacaaatccaccgaccaatcaccctacatctaaatatttctttacaaaatcaacgcaattgcataaccaaaaataacacttaaagatgccacagttttaaaacgattccaccaatctttcttttcaattctagtaacataaagattgtacagagacgatttgccccaaacaaacaaaaagattgaacaaagatgaatgagagaaatcaagaaactggataatgagaatacatgaaaattcccaaacaacgggttcaataacgtgacaccaaaaacagtaatcgagtgttcaaatccaggatcagaatatcagtgattcatttatagtaacctcgaatgtgctgggccaacatgtagtcaaatggttgtggatacagacgtcgaatcttgcagatcacgtaatcttgtttccacgtacttgcaaacctatactcttccatcgcccagattcgtctatctcttactcttctcttctccttttccaagaacttaaaaaccgatttcggtttccgatcagtttcacagaacttataaaccttctttaaccctagaatcttcccggtcgtcaccgacttgatcactctatcacgaccgatgattctccaacaaccgtattcacatccatcggttaaacctgaattcacactccgattaacgaagaagtatcgtccgaagtgtaggattataggatctctagtaacgaaaagcgtccacggattcttgcagtacacgtcttcgcttcggaggaagtggcgaggccaaacgtttacgttatcgatcatcatcttcaaataatttgcgacgattgcttcttcgattgattgttcacgtcttgacttcatcatcttcgttcttcagtgaaactaagatctcttagaagaagaagatttaaggaaaatgctgatgatgattgatgaagggagagaaacaagaaacggaagatgtaaaatatgaagatgatagtgtttcttgggaaagaaggtactctatatatagagaggcgcttcgtcatctgttggtaccgtttatatcaaattagtgaattgaccgatttgtcctttgtttttttctcttcgatatatacacttaacgaaattattctataatctttgcttattgaaataattagaccgatagttgtcaatatttgtatattttactttggtttaaagatgtaatattaagttcttaaataagaactaaattagatctatttaacaaaacgtgaagaatttgcatttttatttcgttctttccttttacaaaatgactatgttttctcttattgaagaaaatagtcagaaataaaatattaataaaaattatttattatacaagcatattttcttgcagaacatcatgtaactttttttaacacaaaaaaggtcatgtaaattttatttgtactattttttgtcgtcatactaatcaaaatcttctactctgcttactaattgtgagatattcacgtaaagtacaacaacaacatcaaaaatcaagataattagacgattttattgagaaaatcacatccccggaaatattggagttggttcttgactttcttaaataaaattaaaatcgcaaagtgaaatttaattttattgttgaaaaaaaaatattatttaattcctataaaccccttaagcatcgattgttaatcaaattaatttgtgttcttaacattttagcaaaattgttttatgttttttcggtaattgtggtttctagatagtttctagttaaatgatgagatatacatacatcaagatatgatatcttccatcctcgaacaaattggagttagttttgacattttattttcttctaacatattaaatccaactgattgttttttttttcttcttcttttctttttcaaatccagaagcaattataacaccaagaattaaacccctaacgaaaactctaagaaacacacataaataaaaagctaaagaagacgattttctattcacctaccaaaccaagaaaaatcatcaacatcatctagataatcataattaatatcttgttgaggtagttctgttgggggcgtaactggaatcccctctgccgcaggaggatgaaccggtgggaaattaaactgatagccgccaatgagaaaacggcgagaaggtctcttgcagattacgcaaagcttacacctcgaatgcggcggcaccgcgtcctcgtgactgtgaatcatccggtcgcaactatcgcatagaatctggttgtgtgtaggacaataaacaacagcatttgaattcgaagctacgcataactcacatctcattgcaaacatccatctctcgcaattgttatccccgtggcagctcctctcaaacatctctgctcttctttggtgaccacccacatgctgctgctgatgattattgttattgttatggtgaaccacatgaggcatatgtgcatgatcatggtgttgattattcatgttagcgaagacgacttgagtttgatggccattagtggcacaattgtaatggtgcgaataacatgattgacaaagaaccatcccgtcctcataacagaaaagtatagacggatacatcgagcagttatcgcaaagttggtaacgtacgtgttctgcatgtatgttattatgatggcgaaggttgtcacatgtaaggcagaagttaagagcttctgtaacacaatggatcacggctgttacatgtctacatgtgtgacaaacttgagccatgtttcctgaaaaatattcatataagattataacaaaattatcaacttcgcaaaacggaagagaagaaacacgaatttaaaataaaaaaaaacattcaacttacacgaaccaaggagagaaggaagccaaagttttgttttctctgtgaaacaatctgtgaagctcgtatttagatggagtttctaatttgtagatttttttttaacaaactgattatgtagaaggatatattttactaagttatatacttatctttaactataaattattctcaaaattcaacattacatttattaattgagaataagaaagaaaaaagataattatatgatatttgaaaaattgatccttgtttctcatttttttgttaagaataaagtttttttttttccttttatcggatcttaaagatcagtaagaataatgtcgtttcttaaattttgatgtagaaatcttttttttttgaagaaaaaaatatcccaactttatcaacataaccaaacgggggacaaacaggtaaattaatgagttttttttttttgtataactattttgctttagagtttagattgttagcttagtacttacatacttaagtttctgatcagtctttgttatgattttcacatgtaggtaggaagctgcgcttttgttctttttaatgtggaaatgcagccttaacaatggatggtatatgaatttgaagctgctcttttgtgtctcttttttgatgcggattagcatgcttttgtgtaaaaaacaactttgctaagagttactaactattcaagtgtttgtatggttctgtaatatggttttttgatacaatgctagcttgaacttgatgtcatgcttaggcctgggtacgaatttctttttagcatttaaaaacgggcaattcttgtattcagcatctgtgatttctcattattttgtcgtgtaaagttactaaactagtttaatttagaatttatagaaaaaaagaagtggctctcatgacaagtagtctaaattcagtagaacataagagttatttcatcacagtactaagaggaagaagagaagttgctctgcaattccttgatgcctttggaatcaagaaaagaagttttgcccttgagaaaatcagagtaccaatgagcagagagtctaggagatctcttgcgatgtggatcactgaaatttacagagtacaatccataaccataatcgtaccgccctataagctcgaataaatccataaatgaccatacaaaatagcctctagtgtctgatccattcctacacgtagcaatgtccttttccttaattacacgaacaagataagagaagaaaagatgcaataaaaaaactttacttaccttatggatttgagcacaccaccaatgtaagcattcatgtattccaccctatgtgtatccttgtgttgcgtcatcggtgtacctgtttgtatatgacattttaagtccaaatcaaaaacatgagggagagacgaataaattaatcatagaagagattgaccattctcaagaatgtagacaggaggattgtcatagctctgctttatatactctaggacagcttccatagtccacggagcaacaggatacttgtccaaacaaaaacaaaacaaacaatgaaagatagattagtagcacttatttgtttaaagacttataatgtcaaggaatataaggtgttttgtatctgaatttggtagccttaaaactcttacctctataactgaaaaattcccaaggtcttctaaccagtaaaacgaagaaaaaatgagtagtaacaaattataaagataaaagaggttttttttttgttatacaaaagaatgagtctgattcatacaagtcacatatgcgcccatgtctgagtagaagtccgggtttccagaaatagaaggtttgaatttgatgtttgtgacagaagccgcaaactaatgattgattcctatgaagtcagatgagcctttaacttgttctgattcttcctctgagaaaactggcagtcttgatccaatggttcttttcattgtatctggatagtctccaaatataagaggtccaaggaacctgagttttaaagagcagattttctttcttttcagcttaagatcttgcacatgttgcccaatttgaaaaaccttttagaactgtttgtgcctgactcaccaaccgaaatagaaatctttggctctttgagttgcaatggcatcatccttggagcttgtagaaggagtcaaccccattaaatataagccaaagcctatggaaccaccctgcttatcctgcacattgtatatagtatgttgcttcttatacattcaaaagagggttatgtataagcaagtataccttgtacttttgcttatatagtcttgaagcagaggcgtgcgcaagaagtaagttatggcctacaatatatgtttcagtagaagagttccctaacaagcagtttttgcccggtaaagaacaacgaccaggcggtgtatccccatcgttgtaacctccaatagtaaatacattagcctcattgatagtggtccagaatttgacatagttcccaaactctctgaaacaaacatctacataagcagtgaagtctttgctacaatgccaaataacaccaaatttagtttcacataatactgtcctagaaaatctgtaaaagagatttaattaatgttgttttttcttagcctacatcatcatattgttgacccatcctccatattcatcctcaagatactgaggatgatcgtagtgatacagtgtaacatgtggttcaatcccatgggttattaattcgctgatgaggttcttgtagaactgtagacccttttggttaacagagcctcttccatctaatgagataagagctaattataaagttgatcccttcaagtgaaacaaaaccggcataaatgtttaagaaggcttactaggtattagcctagaccaagatatagagaatctgaaggcatctaagttagtgtctaccatcagcttcacatcttcctacaaagtcacaatgaagtcaggcttgatgaataaactatataatgtagtagtagtcacaaggagagagtaaagcagaaaagagaaagaaccttatacttgtgatacccatcacatgttacatctccgttaccaatgttacctgaaaagttagaaacgaaaaaattgatcagaagcataaataattcaaaggcaacaactaatctctgtttctaaatatatctgttcaaatactgatgctaataacagtttatgttaaaatgaaagcttacgagagtaacaaagagtgtcccacacgctaggtttccttccatcttccgcagcagctccttcccacttgcagagatcaaacatttggttcaaaaattccaaaaaaaaaaaaagcttaggaattgattccaaacctgataagcagaagtgccagctccgaagaggaatccctcggggaaatcagatctgctgaaaacgtcgctgcatctcccggggaaagcaaaagatagaaaaatggtaaacagagcaaaaaactgttccatttctaatgctctttctcttgtactgctactagagataatatttgtgtgacgaagaaacaaagtatatggtccactgtatttatttaaagtgtgtaacacgtgttgaaataaataactctagcgtttttacaaaaaaaaagcctttagttttgagtttttcatacattattgggatttttttgcactgttttcagtccattttgaaataagaagcaattcggttatcaatatttgattgtaaaataaatgaaaacaaataatattcgaatgaatttattacgcttctcattatgacaacggattcatcagaatatattattgcaattcattactaggagtaaggagagaggttgctctgcaattccgtgatgccttgagaaccaagaaaagcggttttgcccttgagaaaatcagaataccaatgagcagagagtttgggagatcttttgcgatgaggatcactgaaattgacagagtacaatccataaccaacatcgtatccccccttaatctcgtataaatccataagtgaccatacaaagtagcctctcgtatctgatccattcctacatgtagtaatgttttttttctttattacactgacaagagaagtgacgaaaatatgcaataagaaactttactcacctaatggatttcagcacaccaccaatgtaagcttgtaagaactcaatccttggtgtgtccttttctttcaactgcgaatctcgatttatcggtcgacctattcgttgacattaacaagagaatttagctgactaaaacgagagagagatagagagagaatgagagagagagagagaccattctcaagaacgtagacaggaggattgccatagctctgctttacatactacaagacagcttctatagcccatggagcaacatcatacttatccaaaacaaaacaaaaaataactaagaacactcatttggtttaaaactttgtataagaatttggtagccgtagaaactcttacctcagaagatgaaaaattcgcaaagactgtccctcccaagcagtaaagcgaagacgagatggttagcgaagaaaaaatatcgagataaatagtaaagagctaatttttgttagtcaaaaagattgagtttgattcctacaactcaaaattacgttcatgtctgagtagaaatcagggtttcctgaaatagaaggtttcagtttgctgtttgtgatagaagctgcaagatagtgattgattcctatatagtcagatgagcctttcacttgttctgattcttcctccgagaaaacgggcattcttgatccgacgattcttttcattgtatccggatagtctccatatataagaggcccaagcatcctgagtttgaaagagtgtatttggtatttcttctcattttatgaggatatcttttggaacagtttgtgcttgactcaccagccgttgaagaaatcgttggctctttgagttgcaatggcatcatctttggagcttgtggaaggactaaaccctatcgtcaatatgctaaagcctatggaacctccctgcttatcctgcacattgtatgtactatttagtatgttattgttctcttgtcatcaactcacacattcaagaatagtgttatgcaaaactatatgtaccttgtaattttgcttatatagtcttgaaacagaggcgtgcgcaagcaacaaattatggcctacaatatatggttcagtggaagagttccctaataagcagttttggcctggtatggaacaacgaccaggcggtgaatccccatcgttgtaacctccaatagagaatatattgccctcgttgatcgtggtccagaatttgacatggtttccaaactctctgaagcaaacatctgcataagcagtaaagtcttcgctgcaatggtaaaaacaacaacaagttttgtttactatttcacatcatctttttctacataatctgtaaaaagaaagtacaatgccgctttttgttaacctacacgatcatgtggttgagccatccttcatattcgtcctcaagatattgaggatgatcaaagtggtgcagtgtaacatatggttcaattcctatagtaattagtttacttaaagtcaagttaataataataacaccgcgcagaatatcgagtggatatgacgagaggtcttaccatggtttactaattcttggataagattcttgtagaactgaagacccttttggttaacagggcctcttctatctaatgagataattaagaactgatcataaacttgatctaagattaatgagtaaaactgaagattaatgaagacttactaggtattagcctagaccaagagatggagaatctgaaagcatctaagttagtgtccaccatcaacttcacatcttcctgaatagtcacaataaactcaggcttgatgaacaaaaaactcataatgtagcaagagtaaattagcagagaagagaaagaaccttgtatttgtgatacccatcacatgttatatctccgttaccttggttattatctgcaatgttaatattaatatttgttcaaacactaacaataattaaatgttgaaaaacgaaagctcttacgtgagtgacaaaatctgtcccagacactaggtttccttccgtcttccgcaacagctccttcccactttcagatattaaaacctttgtttcagttctgttcgaagattcaagataataaattgattccaaacctgataagcagaagtggaagatccaaagacgaatccctcaggaaaatcacatctgctgaaaacgtcgctgcatttcccggagaaagcaaaagcaagaaaaatggtaatcagagcaaaagtcttttccattttttcacactttttctctcttttcgttccattattggcttgtcagaacttagaattaataaattacgagtctctcgctcactgtaccacctgcccctccagtgttatttctgtgaggatgaaaaagaaagatggtccacttttgaattaccacgtgttgaaatgaatattacgcttcccacaaatagaaatatcaaatatgcatagtagtgtactactatccatttttgttttggggtttgaaaaatatattatcctagatttagtaattagtactatatgaagtgtaaaaaatatctttgggcatctccatcaaggagaaacccaaaaagtttttcaaacaaacaaattagtattttactaaatttttattatatgattaaatttttattttaatgaaaaaattgaaccaattgagaggagagaaatgtaatgatggcttgtagagaatatctcatagtttctcacttgagaaactttctatactctctctcttctctttttattatttttattattttagtagtgagaaactctcttgagagactaccaatggagatggtcttagatttagttctgtatgaagtaagaaaaaatctatccgcagaaattggaatacgtaatgtaaatttgtaatgaagaccatatatatagatttgtaaaaaagaaaaaaaatttggaacctttggattaatccaagactcaaattggtcagctccatatataagttataaattgaacttgaatttggattggctatgttgttcaaaaaaaaaaaaaaaaaatttggattggctctcaggctgtgaactagctacttgctttctcaacacacttggaatcttggatgatttcgaaaatatttaggagtttcttgtttcctcacttttcacgtattttccatactttaaaatggataaattagcaccatgatattattttttcaggttctactattttggtttgaattttttgaatcgtttagagttagtattatatatatttttactagaactaatataatttgttgacaaaaagatgatatcttatccaaacaaattttgtgttatttccatacgcatttttagattaaataaattatgagaaatcatatttatttagatattttaagtttgatatcatataatgaaataccattatatttataaataacaaaatgaaaattcagataggtaagctagtaatttatgatagtaccgttattgtgttatatttgaatttacatccaaaaaaaataaaaaaaaaataaataaatattgagcatcgctcctaaattgctaaatgtttttaaaatgccctttcccgcgagagagatatgtcggtggaatgttggtgaaatgaataaataaagattggtccaagctgtgtgtgacaaaaggatggtccaatgcattcatgtaggaaaattggaacacttgttcaacaggtaaccacatctttcttcatttggtttattcgaaaactaatctttttattatggcaaattcattaaaaattggtcggctccacgagttataaattctaaaattttctaaattaaggctttgtcgatcgatataaacataccagctgcgggtccagatttagagtgtcatggtaccggatttggaagctaaataaactggaaattttgattgataagtagatggtgaagtatcagtttaacttacattttgaatatttagatttgttttggaaaattaaatgtattcgttattttttcttttcttttttctttttttttttcttcttcttttttagcttaaaacttattcattgtttttcctcattgttattcattgattaaagactctgaaaattgaaatgtatagttgaagatattttgttctaaaaaaaaaaaaagagtctagttattaactaaactcattttaaaagatagaaagtctagttattgatagatttaaccacttagacaatcctcatcggtaagatctacaaaaatggtctttgatgaataaaatgtattgtttttgttacaattttattattcaaataaaatttgaaataactaaattaaatcacaccaatagaattaatatatctggcaaaatgagtttgttagattaattcagagtctatgggcaaagtgagaaattttctctttttttttcatttctattttttttaattattttagttgtgaaagatcttccaataaaaatgctattaaatcttatctctccatcagtagttcgccttagcttctctctcgaatcgagaaagatagacttttttttttggtaaaaaagaaattgattacgtgcggggtttaatttttgtgtgatgtttgtcattactggtaatatcattgtttatattcgattagcgttattttgtgtttaatcacaaacctctcatctcacaaccacaaaccatggaaaataagaatattaactagtctctaaagcaattaatagagagaataagaaaactatattgttgaaatactagaaacaaaaaaaaaaaataaagacaaagagtaatttttttttttttttgatataccctatcagctaatgtgaccagtctcagtaagaacacatcgaagtgctacggagtatgacttccagagtaaaatctccttgttacctttggttgagtgggattaagaacttgataacgcataacactttatccttcttattattttcgtcaggcctatactcttctatgaaccaagcagttttcttcggatcttctccttcacaaacatttcttggttcctcattttccgaaaattgaaaaatcctcctgtaaccaagaaccttaccttttgacttgataactctatgaccttctacgatcctccagcaaccaccaccatcacattcatcggttttaccacaagtctttgtcctgttagcaaagatacaggttccgaactctttaaacttgtcatcttgaggatccacaagcgtcaacggatgcaaacggtacacatcgttggtaacgtagctaggccaagtgtttccatcataaccgattatcgtctccagataaaatgcaccctccgcttctgaatcgaagaaacagactccataagctggcaacaattgatttgcaggaagcggtgatctagtggagagacacgagaaatgcttggctagcaagaaactgatttcagcatcgaacataaaccgaatcttgcaaatcacatgatcttgcttgcagttcaagttattgttaagcctgtactcttccattacccaacttctcttgtattctctaggtttcttctttaggcagaacttgagaatcttcttgaaccctagaatcttcccagtctccttcgattttatcagtttatcacgaccaatgatcctccagcaaccagattgacatccatcggttctaccacaattctctgttcgtggtttaacgatcacgaatctagggctctgagaatgaaactcctcatttggattcttgttgaacacgtctacatcttcgatgaagtgatcaggccacgaatccccgttaacgatcatacgcttcagataacgtgagatgattacatcgtcttctgctttgatcagttcttctttgattagccaataagttgcttcgtcttctgctttcatcagttcgtctttgataagctcataagttgcttcgtcttcaactttcattggttcgtcctcataaagaaactaaatcgatcaagagagagagaaagattaaacgcaaaaatgagtgttgtttcttggagatgaagcgaagaagactcatgttcataaatgtgcttttaagttaatggcaaccgttatatctaagtttcgtattgattaatttacccttgttgatctctttttatttctcaactacccttcttccacggatattttttcactgtttatccaaaatttgtgaatggattaaaaaaaagaagggaaacacctcaataatgtaaccaaaaagtctacatagttgtcaaccagagtttccaagttatttagaccatataattgtctcaagtcaagcaccaacctttgataatgtttgtccttattcataaaacggtcggcgcatcttcatcatatcaagttagaatagcataagaatatacagaaatagatactccgatccacatgtccttcactttccacgtgagtaccacacagtacaatactccacatgtgaaattagtagtgtggacgtgtggtaaaacacggatttaggttatttactttgattgtctaatgtctaattgataagattcagattttttttttctttgaccaatagttccaaatctttgccccataatttactgatcactggtttcgtttggcgtaatgtggagaatcaagaccaactattgataatataatttttatctgttgggcatttttgatcctagtccatgacattctttgaatatccttaaaaacagaggaaaacatttgaagggagctaaaaagtcttattattgaatattgaaacataaagacctacaagaaaaatgtctcatattcatttgttctcttttgcttcttcttcgactttgttcttattcatcaactgggccaatctctctgcaagatttagcctagtcgcaggagacaccccattacttccaatgattgattaaagaactgccaacagcttattctcgaccatagcttgtccagttgtaggaatgatatcgtctttagaaaacgcaatctgcaaaacattttaattcacaacaaacatatagtagtgagaacgtgtagctatgcacacttttatgacattgttttaaaagccaatttcaagttttttttttgaaatttgaaagcgtttatataaaagcgtttatgctcattatgctcactttctccttggtatcctggtttggtgtctaaggtgcagcgacaatcttttccagtggctctacccaactcctcttctccttcacggttcaagacgacaccgcaactcttggtttatacatggcgacgacggtgtggcaacaacaagccttggcaaagttgatgacctaacctatctcttaattctctgtttcttcctggaaaaatatatgacggctatatgacggctatatgtaaacaacgatatacacacgagcacacacacgaaatcgcaaaacaacacaacaacgatgatctctgctaatcagataaaaacaaatgtcaatttttctgcccattgatcttcatttatagattattagggttgctgattcagaaacatgtagttggtttcagatcatatcaattctatacgtttaggctcaacttgtctctgatgtttttgattgctgctaatatggttgtttacatgcgattagcaaattgcagcgacgacaaaaaaagtctctcctctcactaccacaaaccacaagaaataagcatactagtctttaaaccatattgaacagagaaataagaaacacaaagactcatgaatctatagatgtgtgtatctagaatattcgtaagatactaagatgatcacaaaaaccaaagtaaagtatcctatctatcataagtcaacttgataacgcacaacactttattctgcttcacgtttttgctaagcctatactcttgtatagtccaagttaccgtcacttcttctccatcacaaagatatatttgtctcaccgtttcatagaactcaaataccttcttgaaaccaatgacctttccgaaatttgacttgatcagcttatcaccgtgcaggatcttccagtaaccaccatcgcatttatcagtttcaccacaagtcttgttagcgaagatgcaggttccgtaatcattaaacatccgatcttgaagatccacaagctccaatggatgcagacagtacacgttgttggtaacgtagctaggccactcgtttccttccgaagtcattatcgcgtccagataaaattcatcctcctcttgtgtattggataaataatatccataagatggcaacagctcattttcaagaaccgattctgatgtagtgtagaaatgcttgcttagcaagaaactaatttcagcttcaaacataaaccgaattttgcaaatcacatgatcttgcttccagttcaagttattggtaagcctatactcttccattacccaacttctcttgtagtctataggtttcctctttaggcaaaacttgagtatcttcttgaaccctagaatcttcccagtctcctccgactttatcagtttatcacgaccaatgatcctccagcaacccgaatcacatccatcggttttaccacaagcctctgttcgtggtttaacgatcacgaatctaggtctctcagaattgaacaccttatctggattcttggtgaacacgtttgcgtcttcgatgaagtgatctggccaagaatctccgttaacgaccatacccttcagataacgtgagattattacttcgtcttctgagtataacagttcgtgtttgattagatcataagctgcgtcgtcgtcctccataatgaaactaaatcgatcaaaaaaattatctagagaaagatcaatcgcaagaatgagtgtttgtttcttggagatgaagggaagaggaagagagactcgtgttaataagttagtggcgaccgttatatataatttttgtgttgaccaatttacccctgatgatatctctttatttcgcaattatgaactaccctttcctccgcggataatttttttgtaaactttttttcttcttttcttctggtgcttttgttaaaataaattactgtcagttatacgatagttttgtttcgttgacatatgtataagtaataatcttatttcttttttttgaatttcatgttaaattagattcaaaagaaaacgtttttacaacaagtgcagctttaatttagattacaatagcagagaaaagattaaactttgatgagttgagaacttagtgctttgacgcaaaccacttttggagaccactcgcataacgcccatcgcccatgagcctaattgctgataatcgatttcgaatctgcttgtctagccatccgactaaccgagctggtgggttaggatcatccccatgcattcttccattcctctctctccataatgcatagattacagtctgaaacacatacctttgtaaaaatccttctacccgctggttttggtggcaagagacgcgcattaggttcgtgtgccaatctgttgagtagctagtttgaaaaatgttcttagaagaggtgctccctagtttctacctcggtgtgacagagaaaacacgtgtctgttgctccgacattccacatcctcatacggtccccggtggagagacgatttagaaccgctagccacacacaaaaggattgcctaggcgtcgcgtgagtaaaccatactcctttgtgccaagtgatcgtgggagagatagttcttagatgatgccatgtatccttggtagagaaacgtggccgataagtgtcatttataccacgccaaagaatatgatctgcttcatctttacgattctgcatttttttatttaaagcctcttctatttgcatgagtaatccgtctctatgccttcgacgacgacgcattgtccacgcatccgccacagatttttgccaatctattcccaaatcaatagcacctcgctcacccacaagatcagataaacgacccaaatcagaccagttatcataccaaaatgatgtggtttgcccattcttgacttccgctcgacataaaggacttgcaactgcccgatatttgaggagtttcttccacatccaagagcctatgtgtgtttgacagaccagaaggacttctgtttgagaagattttcttctatccacttcacccaaagagagtttccatgagacactattctccatattagcttcaaacaacagacatcgttagcctcctttaaggatcttagacccaaaccaccttcatgcttaggcttacaaatctcttgccatgacacctttgctttcgttgttttcatttcctgcccagaccaaagaaatgcagaacaaattttatccacttcacgaatacaaccgcgaggaagtctaaacgctgccatccaaaagttacaaatactccagagtactgaacttattagattcaatctaccagcaaaagagagaaatcttgctgtccaagagccaattcgttgtcttatcttttcaaggagaggaaggtaatcagctgcagatagacgtttattaacaaggggaagtccaagataccttacaggtaatgttcccactgaaaacgggtatgtagaggtgatcgtttggtgagctgttgcagacgtgcccgctaaaaacagagtcgacttctccatacttattctgagtcctgaccacagagcaaagtcattgaaaactcggaccactccatcaattgaccgaattttaccatcagagagaaccatgatgtcatctgcaaaacttaggtgagtgagacctatatttttgcaaacttaggtcaatagaggcagtaaaataaaattttcttaattatgaaagcacctttattttcttgttcatgtttaacacactttatagctgttatacagatatttgtatccttaactaataaaattaaaaacacataataaaataatacaagtacatgactgtaatagtaggcgaaattctaaattattggcaatatttagaattactaatgaaatgcatgattagccaactcactgtttcttaacagctgatcaatatgaatatatatatatatatggtactaatttactacaactcactagtttacgttcacctgaaattggtatcatttacatatttcgggtgagccacggatctaaatcttaaagtcaagttaaaaaatcacggattgactcaacataacatacatgattgaacgtgtctgacccatcaaaacaaccctctatatatataagcccaaatttgcattgcaagtgttcgtgcttcttagatttgaggttgaaacgttgatgttaattatgacctgtttcactcttctcaatttacttttctcctactgaatcaaacacctcaataatgtaattaaaaagtccaaaaccaattaatgaagaacgcaacatcacagattctccgcacttaaagttaatttctgtcaaagattttccaagttattagaccatatatatagttgtcttaagtcaagcaccagcctttgttaatgtttgtcgcggatcacaaagcataatttttcttccctagctgtttgaaggaaaacttttcttcatcccatcagaagagaatttgaagaatagttttaaaagagtttttgggaaatatatgttttccgagtaacttccatctaaaccttatttataaaacaattggcgcatctttgatatatacaatagaacctagttcaactactgaccattaacttactgcacctttggtaaagtgaaaaagcactctttaccacacaaaaagggtgtatatcaaatgtaacttggaaagtcaatctgagaaagaagaagtcgtttgtttatcaaatgtttaggggatttagaaaaataataagataagtgactgatcaatacttctgggccaatagccgacggcgggagtgttttcgtaaatttggtcatgtgtttatgtcttatgtcataactttaaatgataaaataaactctgccaccaaaacgtagaaacgaagcaagatatgtagaaaaagagatgaaaattttaatatataattgatactctcaaatctcaatgcatcgattaacttttatttggaagtttggtctaatttgagtaatattaattcttatatatgcaggaacgtatgaaggtgggagggaaacacggcgaatctattacaataatgctaaacttagggcttgactggtttaacaattaaagtcaatacataatttactcatcaatttttgtgcttggtcgtgatgagtaacgttctctctaacagggagcataaagatcattcgatttgtaaagtaaaccattagaatatccgcagtatcataggaaaaaatcaataatattagattagaacatttcttcaactcaagaaatctttttggatccggttttgattaggttttatgtcaacctctattatattacttttttttgtcccttcattatgacttatgagacgtggtgaattgggagagcatgatacttgaaaccaaaagagagtcattatcaaaacggaccaaaatgcctaaacatgctcgacttcattgagctgactcggctcagtttaaaacgtattgattttgtcatgtgccgattataaaattccaattcagtttagtatcaacaagttttattacttaaaaaaaggagtttgcctcgttcattataactaaatattttctttaggaaaatacatgtcatttgattagcttcttttctattcctttttattagtcatagaaccaattctttgtaggttttcaaataatcttgtacgtacctttccgtctttctaacagccgtactttattattactaatcgttaaacgtatacataatagtgcgctacactattcgtatagtatccatacgaacgtggattttctagttaaaataatcagcaattttatctactagctagattgtttggtgatttcaattaaatctgatctagctagaagcaccaactacatggcctataaatatagactagattagataaaaaaaacttgctaatcagaatcggttttacactacgtacaaatcctaattttctagtctaaccaatcaaacaacttacaaaagttacggtttcaagttttctctttccatctctgtaaagtcagtcttacaataatatgacaaagagtgttaagaagatcccgatggtggctatctctcgattcatgcagcctccacagttccaggaccaggtgtttatcaacttccgaggagaggaaattcgctatagcttcctcagccacctcgctgccgcttttgaactacacggaataaacttcttcattgacaaagatgaacagaagggaaaagaccttaaacaccttttcaaaaggatcaagcagtcgcagattgcattagcaatcttttccgaaagatatgcggagtccccatggtgcttgaacgaactggcaaagatgaagaaacttgcaaagaagggcaaattaaatgtggttcctattttctacaaggtggaggtaaatgatgtgagacaccaagagggaaaatttggtagtaacttttggaagttggcaaagatttctagtggtgacgagatcaagaagtggaaggaagctttggagtttttctctaataagatgggcttgacgttatgtggcaagaggtactctacatgatctttctttttatctaagagtacgtacatatatgtcactacatgtacagattgttttcgtgacttgtgagtcaagaaataaaagcataacacgacactagcataaagtgatcagctgaaacaattccgtgatatttgcaaaagaaaaatagaagaataaagcttcaatcatagatttagaaaaataagaaaatggtttgtttgtttaatatggtttaagagtgtattttttagttttgatttatattcttcttagattttaaaatttttatttggagcgaattttaaattaaacgttactgaaaatgaacccaattaatagtcagttagtcaagttatatgcacctctgtaaaagttaaaatttagttttatatattgattttgttttgacttccttgtcaacttcatatcttaatatataagatatgatccaactttacaaattgtatttacaaagcggcatcatacattcatacaagaaaacaattaattaagagattcatttaggtgaatatgatctcagcgaacaaccatctaccataacgcttactttatgcattcattattaaccactgaattttcttcaattctcaccaagcattcatcgggataggtaaatcttcataccatgatcccaacacattaccaatcaacaatatagttgatgcatttgtgacaacgaacaaataaaaaagctcttcattttcaaaccaaaactgttctgattcgggattcaagccaaaacgaaaaccaagattggaccatacataagaatccactcttgaacctaaaagcacaattgtaatgttgtttaccggcgttacttgccttgaacatgacgagctcaaaaataaataagctttttaataaatcaacctccaatttttaaaatgcttctcaatatggatcatttctttttgtcttctgctatagtcaatttaatagatgttaatttattttacatcatataagtactaatttgcccgttgtatactaatttacccgttcaacaagacactaacaaaaattatattattggctgataagtccttgctattaataaaaaatggcaagtccaaatgatgcctaccacgtatttttttggaacaacttagttttttaaacattttctctcatcccatgatatgtgtttcgtgatttataggtgtttaaatctggattctgtttagtgtcaacagcttttaaattaaccttaaaagagtcatttatgaaaaatgttgtttacaaatgtgatatgatgtactttggtattatttttcattgctaagttatatattttaacatttgcacattaagaaattaaattcggatgaataatagttttttttattaatgtgacattacttttgagggatgtttattttaattattgattatcatccataaatataggctaaataggctaaaaatatagaattagcatgcatagcattgtttttttaaattattttcctaatcaagtattgttaatttccagcggaattcttttttcgccttgtagaattgactcttagctagtgtgtctaactagttggttttggtcattccttttcccagctcagaggcagattttgtcaaacaaattgttgcggaactggagagcgtacgaaggagaatcccaatagaagagaggaaggatcatactctctatctttcctcgagaaaaagaactagagaatgcatgtaatgagtggtctctatgaattttctcactgtgaaacgagcaaaacaagaaaattccgatgaaaaatcaattcagttcatcatacacaacaatgccgagatttggttaaaattatttgcaaactgcattagcatttctctaatagtaaatatactaaaactgtaattatgtgtttactatttgtaaattcaaacgtgtacataatggaccacacgcgtatgatgtaacgatttggtatattaacataagatctttgtatgcttcggaatttctgaatagccttaaaaagatctaatctaaattcattgttattcagggagttgagtctcaaattttttataaattcattaagcttctaaaaacattttaatgactagagcatctccaatggtgagagcccctcattggctctcaccattatttctaatataaattttgcaaatttaaaagttgagaaactcatgaagagctcttgaattttagcatctccaatggtagactctcatgttcttgaaaattaagatttttctttgaccaatagttccaaatctttgccctataatttattgatcactgatttcgtttggcgtataatgtggagaatcaagaccaactattgataatataattttatctgttcggcattttttgatcctagtccatgacattctttgactattcttagaaacagaggaaaacatttgatgggagcgaaaatgtcttattattgaatattgaaacataagacctacaagaaaaacgtctcatcatttgttctcttttgcttcttcttcgaccttgttcttattcatcgatcacctgagccaatctctctgcaagacttagcctagtcgcaggagacaccccattacttccaatgattgattaaagaactgcctctgccaacagcttattctcgaccacagcttgtccagttgtaggaatgatatcgtctttagaaaacggaatctgcaaaacattttaattcacaacaaacatatagtagtgagaacgtgtagctatgcacacttttatgttgcacacttttatgacattgttttaaaagccaatttcaagttttttttttgaaatttgaaagcgtttatataaatcagcaactagtcatttgtataagttgaaaccgcgcgcttctaaatcgagaaaggccctttttcccataataagaactgtttatcgtttattcttgcgcaagaagcaacgtgaataactcctcaagctaaactcgattgaaacactctcagttcatgtatgacccgaatcctcctcctaaaacaccaatttgaaacagcccttttttccttccttttcttccttctttgcttgtcttttgctctgccccatctccaaaattcttcattttcgttttgaacctaatctccattcgtagtggtgacgtctcgcctacatctcagctttctctcccacgcaaccaatcgctttctttcgctttagtggatcattatgctcactttttccttggcgtggtgtctcaggtgcagcgacaatctcctccggttgctctaccaaactcctcttctccttcacggtgacgacaccgcaactcttggtttgtacatggccacgacggtgtggcaacaacaagccttggcaacgttgatgacctaacctctctgtttcttcctgcaaaatgttgacggctatatgtacatatatacacgaggacactccgaaattgcaaatcaacacaacaacaacgaaaatcattttatgtaccaattagataacaaaaacatgtcaattttctttccattgatatttatttatagattattatagggttgctgattcagaaacatatagttggtttcagatcatatccattctctacgtttaggctcaatttgtctctgatgtttgtgattgctgctaatatggttgtttacatgcgattagcaaattgaagcgacgacaaaaaaagcctctcctctcacaaccacaaaccacaagaaacaagcatactagtctttaaaccatattgaacagagaaataagaaacacaaagactcatgaatctatagatgtgtgtatctagaatattcgtaagatactaagatgatcacaaaaaccaaagtaaagtatcctatttatcatcagtaaacttgataacgcacaacaatttattctgcttcacgtttttgctaagcctatactcttctatagtccaagttaccttcacttcttctccatcacaaaaatatctatgtatcaccgtttcatagaactcaaataccttcttgaaaccagtgaccatcccgaaatttgacttgatcagcttatcaccgtgcaggatcttccagtaaccaccatcgcatttatcagattcaccacaagtcccgttagcgaagatgcaggttccgtaactttgaaacatcacatcttgaagatccacaagctccaatggatgaagacagtacacgttgttggtaacgtagctaggccaatcgtttccttccgaagtcattatcgtcttcagataaaattcatcctcctcttgtgtattggataaatatccataagatggcaatagctcatgtcgaagaagtgattctgacgtagtgtagaaatgcttggctagcaagaaactaatttctgcttcaaacaaaagccgaatcttgcaaatcacatgatcttgcttccagttcaagttattggtaagcctatactcttccattacccaacttctcttgtattctataggtttccactttatgcaaaacttgagaatcttcttgaaccctagaatcttcccagtctcctccgactttatcagtttatcacgacccatggtcctccagcaaccagattcacatccatcggtcttaccacaagcctctgttcgtggtttaacgataacgaatctaggtctctcagaattgaacacctcatttggattcttggtgaacacgtttgcgtcttcgatgaagtgatctggccaagaatctccgttaacgaccataggcttcagataacgtgagattattacttcgtcttctgagtttaacagttcggatttgacttgatcataagctgcgtcgttatcttccataatgagataaaatcgatcaagaaaaagatctatagagagagaaagatcaaacgcaagatcgagtgttttgtttcttggagagcgaagaagaagtgagactcatgttgaaactttagtggggaccattatatctttacgtagtgaccaatttacccttgatgatgtctctttatttcgctaccacccttcgtccacggatattttgactttgctataatggataaaaaatttataaacttttttttttgtttttcctggtctgcttaaattagtatcagcttaaaatatatgatagttgtttcgttgacatatgtataaatataatgttaaaacggatcatattagaccatggcattttatatcctagtccatggcattctttgaatatttcttaaaacagaggaaaatattctttctctcttaagtctctggcaaccaaaaaggctacatgtgcatatacacgagaaatcaacacaacaacaatctctgcttagcagataaaaaaacatgtcaatttaattgatcttcatttaatttatagattgttcgggttgctgattcagaaacatgtaggttgttgtcgaatcatatgtacatgtttggttacataaggctcaatttgtctctgatgtttgtgattgctgctaatatcgattgtttacatgcgattagtgttattttgggtttaaaatattgcagcgacaaaaaagcctctcctctcacaatcacaaaccacatgaaagagagaaaaaagcacactagtctctaaatcatattgaacagagaaatataaacacaaagactatcgatatatgttttaaagagaatgtcctcaagatactaagatgatcataaaatccaaagaaaagattcttagttatcataagtaaacttgataacgcacaagaatttattctgcttcacgctaagcctatactcttctagagtccaagttaccttcacatcttctccaccacagaagtatctttctttctccgtttcatgaaacttaaacaccttcttgaaaccaataactatcccggactttgacttgatcagcctatcacggtgcaaaattttccagtaaccaccattaatgcatctatcggttttaccacaagtcttgttagcgaagatgcaggttccgtaatcattaaacatccgatcttgaagatcaacgagctccaatggatgcagacaatacacattgttggtaacgtagctaggccaatcgtttccttcagaagtcattatcgtcaccggataagatacatcctccaattgcttatctgatgaaaggaatccgtaagctggcaacagctcatttcgaggaagtgattctgatgtagtgtagaaatgcttggctagcaagaaactgatttcagcttcaaacataaaccgaatcttgcaaatcacatgatcttgcttccagttcaagttattggtaagcctatactcttccattacccaacttctcttgtatcctctaggtttcctctttaggcagaacttgagaatcttcttgaacccttgaatcttcacagtctccgtcgattttatcggtttatcacgacccatgatcctccagcaaccagtttcacatccatcggttttaccacaagcctctgttcgaggtttaactatcacgaagctagggctctcagcatcgaactccacatttggattcttgttgaacacgtctgcgtcttcgatgaagtgatcaggccatgagtctccgttgacgaccatacgcttcagataacgtgagattattgcatcgtcttctgcgtttaagagttcggctttgagtagatcaaaagctgcatcttcctccataatgaaactaaattgatcaagaaaaatatgggatctagagaaagaaagatcaaacgcaagaatgagtgtttgtttcttggagacgaagcgaataggaagagagtagagaataaatgtgcttttaagttagtagcgaccgttatttataattttcgtggtgaccaattgactcttgatgatctctctttatttcgcaactttatttccctctttaatggatgggttcaagaaactaaaggatgttacagtaagaccactaagacagaactgcagtaagatttgagagagaagtttagtttactcaaggttacagtctttttccactaattatttttgttatagcatgcaagtccttcttatcgctatgggcttggtagggctttctctagtcgttaaatatgtttcgcttgagtttatttctgagatatacatgcacattcaaatagacaatgtctcatagagtctatacatatagatagtcacgatttttatttcccatggaatattcagagttagctcctgttatctcgaggattctggtttgctgtttcttctggactaaccctttggtatcttgctctaaatggccaaatgttaccgagttgcatccaccttggacgccttctttcaggcatgtcttgtctaataggattgctcctttctcgagattcagcaacggtgttgacaagtggcaggtcacggcggcagatagggcaagaattgttaagcctaagccacgggactatacaatctttatggtaaatatgtttacatggtaattccgttgcgtccccaccaacaatgaattcttccatgcacactgtgcattgggacatgtcgttagttagatgttgtggtgttattttcacagatggtagggaattaatggtgggttctgacgcaggtggtggtccaggcctatcgtcttgtgttagttgttcaatcagctgctctaagcttgatgctccagtaaagtaatcatgtgagttcacatgccgtggtggtgcttgatttggtggcgcaattatgtttccgagtggactagtcggattattgggccggagaataacatatgttcttcttggtagaggtaaaccaccattgttaacattgtcaaggctgtgtcgtcttcgatgttgcggtcggggtcttgattcaggttccaagatgtttctggatcttgccctaagaaatgggtctgcaccaaacctacctatggttgcaggctcaaacatgagcgagagagcttcgagaagacgagcctcaggagaagcatcaaaaggcggagtagcatggttgaaagtaaaccgaggccgttgtctcgtttcaatctcaacgacaaattgcctcaaacatcgaggacaggcgatctctgatgggttagaggatgcaattctgaccatacgatcacaatggtagcaccagtagagaccaaaagtcctaaatgctccattgggtgcactatcggtccgtgttattggctgactcaatgacattgttggaaggaattgttatacacaagacatataaacatttacaacatttatagataacgttgagggttgcatgaggcaattgaaaagggcagattcttttcaaatataggtcttggtttctttgaggcaaagcttgagatggatgaagaagcaatgctcattttttctagttttctatgcttttaagattacctctagctaaaggctagaatcatttctcgaatccatttatttttctaaggcctggaccgttaacgaatattgggcatactgaattattatggtggttatgaaggatcattttcagttttagaattaacataaatagttttcttttagaattagtagtttcaaattagaagaattagtaattgatttttaattccatctttatgcactcaattgagcatttagaaattggaaaacgtgttgatatgaagaccctatattttactgccatagtctccattgattaatacatacatagttgggagactaatgagagaaaatattgtccaagagcaaaggcatatcaatatcacaaagcatagataaaaattggaacacgagttgaaatgaagaccatatctctctgccttttgcttttttagtccaagaataatttttttatcatagcacattcatcatcacatgccgtgtctttgttgcgcttaaccttttggttttcttgaacatcatctaattctatttagttttatctgaatttgtttttcttggtaactttttacttgccttgcttgatataaatagcttggtcttaaagaagagaatatagcgagcggcttacgaactagaaaatttgatctagggttttattaggtcaaaccgatcggtttcacttatatgttggtgtgttcctgatcgaaccgttcaatataacaaaggcttgaaagataatgaaagtctccgatcaggagagctctctgtattgcattcaatatatagccaaagttgttacaatatgttcagggatttccctagattcacggagaatatccacagtatttccaactaatatttgagaatattctatctgttaataaggctactgattggttaatgcctttaaagccaaatcaaacagaattacacaaacctcggcaattagggttcggttcgatcagtactgaataaatgccctaggcttcaaaccttagatatatagtcgtctatctttctccttgttataagcaaaataccaggagacatcatgaacggaggagaaaagttagaatctatcccgattgatctcattattgagatacattcaagattaccagcggagtcagtcgcaaggtttcgctgcgtgtcgaagctatgggggtctatgtttcgccgtccatatttcaccgagctgttcttgaccaggtcgcgtgctcgtccacgtctcttattcgtcctccaacacaaccgtaaatggagcttcagcgtcttctcttcgcctcaaaatcagaatatatatgagaagccgtcttttgtagtagctgatttccacatgaagttctctgtaagcacgttcccagattttcatagttgctctggtttgatccatttctctatgatgaaaggcgcatatacagtgccggtggtatgtaaccctcgcacgggacaatatgcggtcctacctaaactgacaaggacaaggtacgaaaattcgtatagctttgtagggtatgatccgattgagaagcaaatcaaggtactgttcatgtctgatccagatagtggtgatgaccatagaattctgacgttaggaacaactgaaaaaatgttggggaggaagatcgaatgtagcttaacccataatatattgtctaatgaaggggtatgcatcaatggagttttgtattacaaagcttcccgaattgttgaatcgtcatctgacgatgacacgtctgatgatgatgatgatgatcatgaacggtctgatgtgattgtttgctttgattttaggtgtgagaaattcgagtttattgtcatatgcttttatggccagttgataaattccgtccagttatcactaaaacaaaaatctcaccagaaacttgacttaatcatatagcaaactcaaacaagtttcggttagataaatcttctccaatagcaaaaatgcttgacttaagacaactatatgatctaataacttggaaacagaaattaaatttaaccggataatctgtggctttgtgtgttgcgtttttcattggttttggactttttggttacttattgtgtttgattctgttggagaagagaaaattcagaagagtgataataagattttaaagattattgtaaatttattgcgttatatatatatgcttctgagtggcaatatagagaaaggttcgtcggcgaagctggttctgtgcttctctaacattattatatgtttttttagcacatttttataccattctttgaatattcttaaaaacagaagaaaacattatttctctcttaaatctcttacacgagcacacacacaacatcgcagatcaacacaacaactacgatgctctcgtctcttgtaatcagattaaaaagcctctcctcataaccacaaaccacaagaaaagaaaaaaaagcatactagtctttaaaccatattgaacagagaaatgatcgataatgaaacacaaagactcatgaatcatgaccatgttcgagatgatcgatcatgaaaccaagagtagaagtccctagctagttatcctcggtaaacactttaccttatacttgataacgcacaccactttattcttgttcatttttctggtaagcctatactcttttagagtccaagttaccttcacttcttctccattaccaaaatgtctttctttctccgtttcataaaactgaaaaactttcttccaaccaatggtctgcccgtaccgtgacatgatcagcttctcacggtgcttaatcttccagtaaccttcattgcatttatcggttacaccacaagtcctgttagcgaagatgcagattccgttatcatgaaacttcccatcgtgaacattcacaagctccgatggatgcagacaatacacgttgttggtaacgtagctaggccaatcttttccttctgaaatcattatcgtcaccggataaaattcgtcctcctcttgtttatctggtgaacagaatccataagctggcaacagcacatttcgaggaagtgagtctgatgtagtgtagaaatgcttggctagcaagaaactaatttctgcttcaaacaaaagccgaatcttgcaaatcacatgatcttgcttccagttgaagttattggtaagcctatactcttccattaccaaacttctcttgtattctctaggtttccactttaggcagaacttgagtatcttcttgaaccctagaatcttaccagtctcctccgactttatcagcttatcacgaccaatgatcctccagcaacccgaatcacatccatcggttttaccacaagcctttgttcgtggtttaacgatcacgaagctagggatctcagcatggaacttcacatatggatccttgttgaacacgtctgcgtcttcgatgaagagatcaggccatgatactctgttaacgatcataggcttcagataacgtgagattattacttcgtcttctgcgttgagcagtgtgtccgccataacgaaactaaatcgaccaagaaacagaggaactagagagaaaaagaaacgcatactaagttgatcaaacttcaaacatattatatatgaacaaaatgggagagagtgacatattttgcagaaaataaaaaaaccggatgaagcaaatctcaaactaaaaaaaaaaatgtaccacaaaaggccaaaaatgacctaaaccttaatcaataatattccacgtcatatcattctcaaagatccaatggcaaacttcaatctgacccggaccagaacctaaagccaaaaacgctccatgactcggactccaagctgacgtatcaatgtgacagatggcaacaccatggttaatcttctctaaactcttcgggtcaagtagatccgtttcataaacacgtacccgaggaaccgagtgacaataatacagtaaatacgggtacaaactctggtgacacgaaactgctcttgttacatctccaccgttgattccattgacttttccaatgacgaccttcttctttgacccgacaacattttccgtcgtcctcaccactacgccgcgtccgagcaccgacgtagcgaaatctatcatatcctccgctgatccaacacaccgctttgtctcaccgtgactcgccggtctctcacactctgaaaccgccgacgagattatccccgccattgatgaattctcaccggcaccaaaaaccctccaaatctctccgatcgtagatgacgaaaacggtaaattcttaactatgtttcggggtaaaaatgtccttttaggcattttatctttaatatccggcatttgcatcaaagtcccttctttcaacatcgcttctctgaagaatttaccctcctcaacccacttattcaccgttttgccattagaactcacattattagaataacgcgcaaaaacgacgccgtctttagtgtaaaccttaaaactctgtccttggccgtaagttttgaagctgacgttacctccgacgttatcttggccgtaaccggtgaaattatcagagccaaggttaaaagatttaccgtaatttacgaaattgaccttctcgttgtttgagtttttagcgtaagaagagaaagaatcaactccgatgtttgattggtctctgtaatttttaaacccataaacggcgccgttacctccgtcaccgtatcctttaaattcgttaaccggaacattaccgttttctccgtagctcgtgaaactgtcgttagctccgttagcggattctccgtatttggtaaaacccgtattaactacgtttgacccggttccgtaacccgagaactcattcggagctccgtttccgtttttgctgtagcttgtgaatgattgatatccggtgttgccgttctcggagtaggtagtgaaggtttgtgatcttccgttggctttatcggagtaagaagtgaatcttccgtttggttcgtttgcgtctgtgttgtagttcgtgaattcgccggagcctcctgttgttccggtggcgtaagttgtgaagctttggtcagctacgtttacttctccggcgtaatttgtaaatccatcgtcgtgtccggcggagtttcggctgtaacgtcggaatgagtctacggcgatgttgtcaccgccggaatagtttttgaatgagtctgctccggagagacggtcggagccgtagtttgtgaagttcttgccgctgtaagcggcgaagttgacgtcatcgccgtgtttttccagggaatgagcggcgagctcagggaagcagaagagtttcgcggcggagcagaaatcagagtgatgcgtgttaagcgcgtgattagaagcgagtgaggcgaaacgcgtggagtccacggcggttagaggagaggcctttgagaggaaaaaagaaggttttggtgaatcgccattgatgtgattgttccaataacgaatcaaagaagcttttggtgtgaatggattctccgatggcgtgatgttgccggcggtttgtttagctccggcgaaatgcacctacaaaaaaacgcaagttgttatgtatctatcaaaatgttaatgaaactaaaagattgaatatttcgtacattagaagatgagaagatgcagaagaagcagaggaatagagttgcttcaatattgttcatcttcttggtgagagagatttgttggttgagaagaagaaataagatgaagagagagtaatgagatttcactatgatttcatgaagagagagtctatcgagacttcactatgaagtgagtcataattataaaattttagaactacagtttattttttatttttatcaactttattaggtactacaatatttgaacttgtatcactaaattttagtactaaattattttaacgattgaatatatctattataattataatttaattaaaaacatttcaaaatttatgaacatttggtgcaattgtgtataactccacgagaggtttttaacccaagcaggggcactatagaatacaagtttcgtagtttatagtatatttttgagaaacaaaaaactccaattaaacagattttaggtgttcaaataagatagaaaacgtaaactaaaaactagtttgaaaatactaaaattttcatattcttgattgggaatttaaataagtttcttaaagacaaaatccaaaaactcactcagaaaccactaccgtatcagcttcaggttataaatttgataatcaattttttttctataactttattaggtatctcgaaagaacagtaatcgaggttttactgttttaatcaactgataataggtcaaaagagtccaaaagaggattaagctttagctggtataaccaaccttacaaaaagtcaaaaaagagggaacatatcatttcatatcagttaaaatattataagaaagaatctgaaataactaaataaggctgcataaagtattaaagatgaatctctccctaattgttagtatcaaaaagatcaaaattatatgaaagagaaatataaagaaaaagaaaaagctgagagactgcttgttgttgaagaaagcgagaaagtaaatagaaaaaaaagaaagaaaatcagttcaaggttatgaaaactagtagcttttgattagttttagtttttgcgcttagtgttaattactaatgagagtttgaaacaagtggtattgatggacttggatccctgaaccctacgtataaagtataaactataaatcttggaaattgatatcatggtttgttaagagtgactaataataataggtgacttttataattctgtctcccaccaaaacaaagattcttaaaattattatattactttttcttcttctcaatttattcaatagtactattagtacataatcctacatcatgagcgctgtacttggacaatgtcaattaccaaaacaaataaattaggtaactatctcttgtacaactttgttttaaagtgattactcataaatttattaacgtttttaagtagaagaattagcgatctttagattggatgtatgcaagaaatggatcatcaaatcaaactcgacgaaatgtggtggtggtggctaaagtgcgaccaatgtaactttagtacattttatagtttattgcttccattaatggccatagaataccgcgttttagcacttggtgcgatgatgatgggctagctctccgatgtttgccgacgagaatattcatatatttacatattttagtaagaaaatagttttaaaagggaaaacagctttaaaatatccagataccatgtaatctatataatctttataaacaaaaacgttaatatttaaaaccattcatatgatagatttttattttttgaaattacttttgtaaacacttctccttctaattggacaatcaatcatagaattattttttaattaatgtgtggttgataaaaaaaaaactattcataagatatatctatgattgttcatgtacttcatactctgagtctctaaaacgtttctttcatattttcatacttatatatttgtaagcaaatgtatatatatgtattttagttgtaaactagttagaatgcttagttcttttctagtagtattgattacatctggagtatattatcacagtcatttagtaaagttaagcatgtgttaggtttacataaattgatttttaaacaaaagtaaaaggttatataagtagaaaatcattatttgggtggtgaggatcatattacatccaaatgaaagtaaagtatgaaaattgatgcaacaaaaacataatttacacatactattgggatgttacaatattgattaagatagtgttagtaacattcatttaaaacattcatttagtgcataattatgttacttataattgattaaaaaaaaataaaaaaaaataaaaaaacaaattatgtaaaagaaatgagatgttaatataataaaaaataatctcattaaaattttattattagcaataatataattcaacttttattagataaattgtttttatcatacttcaaaattttaaatgtgttagtgagttttagaatgaaagtaaatttaaatgcatggagaatagaagtataaaactaaatttattcaattctatatgtaaaatttttaagaagaagattaaatttaaagtaagactttggtctctaagagcaaattactatattttttatttatctacttaaagaaaaaataaaaattattaaatccaactaaaatttataatagatgtcgttagaactagcttcctacatggagaaatctttggtaaaatttagctagaatggatttggagtttataatggctttaaagattatgagaaatttgattgtttgtcaataggtttataggtttgatcactgacttgtgcttacttaatcagcaaactcactcacctcactttgatcgtgaactcaagaccaaacaggcttcttggttaatattctcacacggataaagaaaagaattcttacagtaaattttgacacatattaagacaagatttttttttttgtttaaattgtttcctccatgtatagttcattcaattctgtacactttggaacatagtttggtttcagtatttgtaggcccaacttggacaacaaatactcaaagcttgaacaaccagtgctctagtgaaaccgtcccgaagatagtgagaccgttttctgttttcttgtctcggagactcggacaataaaattaattcattctggctacttatcaaagaagtcttattatagtatgtgatttttttattattttttattattatttttattttattttgtgtgtttaaacttcttatctagaagaattaagcatccaactgatagactaaattatatcttcatcttccttaaaattcactgtgacgagggcttaaagtcttggcgaggctctttctatttaaagtttttttctggtttgtcattgatttccatttgtttacatcaaatcaaaccaacagagttaattataaggagaaaaatatatgttaattaatggaatggaatcactgtttatttcaatatctatccaaaattttgaaataagaaaaatcattcaacattaaattttatatccactggtcttaaacaaagttctgtcaatacaaccatacattctataatctaattgactacatactaattgatatatatatatatatatatatcgtgatcttattatgaagtgattgccggatgttataggaaagttgcaacgtctaaaacatctcaatttggaaatgacgaagagtattgatgagatatcttcaattcaaacttttcgtccgatgctagcacaatagaggagctgcattaacgattggaactactagaaatctgaaacataatatgtcctaagttcaagaatttataaacgcaccttataacttataacttttagataaaatctaaacttcaggaaaactgcggactatctaactacaaaaagaacaatgagacaaatattttatctgggaaacaaatatgcaaacataacatttttggaatgctctaaaaaaactaattattatttttgaatataaggacacaattctctttttgaaacataaacgactgacaagttgagattgagttgccgacgacttgactatgattaaacgagtgtatggggttagctatcatgttagttttttcagggtttattgaagacatttatttctaactttaatggggattaaatagttattaaggtttagatttcgtgattaaaattcaaatttcacgatttacaataccaattaacatttcgaatgaagaggacaaacaacatttgttcagaggttaaacaccatgaagtttagttactatctcacttttattctttcaactttaatttatttttcctttaatttttcttgtttttcttataattttacatatgttgtacttatatttttgcttataaatctctagttaatatttaaaatagtttatattgtcagaacctgatttgttatatttgttttactcagtatctcactagttattttttaaactataaatatgtttagtgcaaaagagatattaatattggtctaaattcataaataagaaattttcatttacccatatatatatacgaattacccaaaagacagattgaaagacaagagttttcatttatgtaacaactgtagattaaaattcacattactattagtctatatatactaatatattataactaagattgaaatgccttggatatctttccttataaataatgttaattattttaatcaacaataaggtaaaaaaaaattcaaaacaaatagagataagatctctgttggccaatcgagtgttcttctttctcgttctcacctaatcttacacctaaaatctcacgtaatctctgaactctcttggtacttaggactatgattcatttcgtagcttagtttgtgtggaagttagggttttcgttagaagtcatggttagaacctctatcaaaagcataggctcggggatagataggttaagcgctttaccagagcatttgttgtgtcgtatactctctgaactctccaccaaggattcggttcgcacgagtgttttgtctaagcattggagaaatctttggttacatgttcctgttttggaattggaaaccagtgattttccagataatctggtctttagggagttcattgatagatttgtcggatttgacaaagagatagacttaaagagtttcgatatattttatgatgttaatgtcctctggtatgatgattttctgtggatgatcgatgatgtggttaagcgtagagtttgtgatctaatggttaccaataacccgtatgttgttaatgaaaagttagttaaaatgcctatatccctttattcatgtgcaacattggtgaatttaaacctctcttttgttgccatgaataatctaccgtcagaatcggtttgtttacctcgtgtcaagaccttatatttacatggggttaaacttgatggcgattccattctggggactctcgtatcaagttgttcggttctcgaagatttaaccgtggttacgcatcctggtgactatgagaaggtcgtatgttttcgctctcaatcagtaaaaagcttcacaatagagtctcagtgtgagtataaagaccccaatgttgagattgattgtcctaggcttgagtatatgtgtattagggaataccaatctgaaagctttgtagtacacagtattggtccctatgcaaaggtagacgtcgatattttctttgaagttgagtatgaagatccactggcgatatctatgatcagaaattttctcaccgggatatccaaagtccgtgaaatgaccatctcaagtcgaacgttagaggtacatttaaatgttttattccatagcatatatgtttatacagtttcttgaatacattctttctttcttgctacatatatacacaggtcatccgtggctatcactccatggtgaaagcattacctcaattttccaacttgtctagcttggatgctttgttagtcgaatcatattgggaactcttaccagtctttcttggttgttgcatcaatctaaattcactcgtcgtggtgagtttaatttcatttgcatatgctcatgtaattacattgggatttatatcccaagaaaatattacaattttttttgttttgttatatcaataggaacttgatggcctttccgagatagaggagtttaaagtttcaccactgcttcaagattccctatctgctcgtgggtttgttcagcagaagacaccagtttcagtcacaaagacatcaagtgaaaggaaaatagcagcatattttgtgaagaaaagtggctaaaagtgagcaataacatattattatctggggttcaacccgttatctaccaataatccattttatgtaagactttataattttttggtggacatgactttatggttcctggttatatggatatttgtaaggtaaatttccgtttttggttgacaagactttatggttcctaggtatacagttattttttgaaatcgtagtcgtaatactctttcttggttcccttgttccatctacggtaaactctgcaaccctagctctctatgcctagtgaacccttttccttgctcaatactctttcctgtctaattgagtctagccttctttttctgacttgattaaaatcacacgacttaagtttatgcgaactctttattttttataaagttaagttaacaaccctggtgattttagaattggtgaggaagatatgattagcaaattacaagattcttttttatgtgatatatatgtacttatgattcccaaaaaaggatgtgcttacgaccagctttttgccacatatggataaatctttggcaatatatatggctcgattggattttgagtttaatggcctttcatagattatgctaaaattggagtattttcaataggtttgatcactgacttaactgggtgctttacaaagagttatggtaaggcatactgtttatcaaaaaaaataaaattgtaaggcatacaacttcatacaagatatgaagatatcatatcgaggtagaaacaggatcgcgagtactatacaaagaattattagagaattcaacagatatatgttcaagataatacaaagtacgatagtgttaaaaataccttcaagtcttcaaccatttatacatcatgcgacagattattattatacaattccttagaagtataattaaaacaaaataaatagttgtattttagtgaaactagccatattgaattttgatccgttaattacagttctataacaatacgaaaattaaataattgtcaataattacaaaaatgatcaagatcaatggattacaaggattcaatgggaggacaaagccactaaagttactgttttatatttagctgtgctgcaatcatatgtcgatgaaactttaactttcattactaaaaattttcatctttactgggtttccacactaaatttgtttcttctttgcttgtctattccctcaaactaaatcatcatggtttgggtgggtcaaagattgcaacggctcttctctgtctatgcttaacccttaattagtgtacgctttgatgtcctttgagatggttcttacttcttagctattttgcttgtatacagttgttgaagctggtagaaaaaaacgaaagaaagagatctctattggcacttcttggcgggaaaataacaaatgcaaacatggaaatttgggtttgcctgatctagaaatacaaaacgaagatgtttttgtttgtttgttttttttcggaactttaaacaggaaaaaattgtatagatcatgaatcttacaatggtatatataatagaatattttgtttcatgaagcgatatgtgttttgttcctcgattatcatgtcttgctatggttcttatctatacactaatgaatgtttcttctctactaagtagtaattaagtgctatacgggagggtcgtttcgattattcgatatatagttatttcttttttcttagatacttattttgatttctatgatgcaaatagtagtataaatatgcattaatgcaattatcttcgctttcttcctttctaagacgaattgcttagcttctcgttattgtctttgagttgtttctctctctctctctctattttgcagcaacgtgaggctgtgtctttccatgagcaagtggtgaatcaattttctcagaggttatgtgtttggagaagttatattcacaacatctccaaaaatatgtatttaagaccatttcagggatatcaaattggtcaaaatttagaaaattgaaacttcaagaaactacattttaatatatatactttctctttaaccacgtaaccatttcctattcccattattcttataaaaatcgttccacatttctgtatgtccgttaatgattttatgcaatctaaaaaaaactatactattttatattgtgagttgttgttttattcaattaccaataatgtactatttagttgtttttaaaaaatggctaaatatgttaggcacaaaattaaagataccttctactatcatatttgccaaacacatatttcctttccttatcctctttaaaccattactcaaacacaccttattttgttcttatatattttgaatatccaaatttagtttttttcaaatatctctattgattattaccatatatgatttgttgaaatttatgtacatttaatgctttgatttttttaaatgcactttacatttctatataaaacattacatatatatatatatacatatattaaaatgtagtcatttgaaatattatacataaaattatttataagattggaaagcataaaattaaatattataaatgatcattcataaaattaaatagcataagatttacctagactagcaggcaattttacctagttttggttaaaacttacaatgtatctctctttcataaaaagtgtaattttgacacatttcacacattaaaaatgagttaaacatacaaatatacccttatttaatatacccctaattataccataatgatttaaatagaaaatttcttttagctttagacaagaggaaaatctgaaaactagttaaaatgtaaacgatattattttgtgaattgtgaaacggatagaattgaacaagagttgagaaaaaaaaacggatacaatttgagcttttattcttgaaagacaaagagttaacaaaaaaaaaatcaatcatgagtatttcaagtattcttttatattaacagtaaattaaatacatatcattatttcgattgacaataaagttcattaaatgtaattaaaaaaaaatcacaacgtttcgttttgtggtcaataaaatattgaagaaatttgaaagggcgctcacgacacgtttcgtatagcctctttttatttttcaacttattataaaaactgtcaaagaggaagaaaatctagcgagaagatctctggtcgtcaaattgaaggttcttcttcttcctctctatctctactaggtaatctctaacctaatctctgaactctctttcatactttggattatgtttgattaattaataataaattaatagtgtagctttgtccgaaatatagggtttccgggagaagtcatggctagaaccgaagtctcagggaaagataggttaagcgatttaccgtgtcatttgctatgtcgcatcctctctaatctctctaccaaggaatcggttcgtactagcgttttgtcccctcgttggagtaatctctggtcgcttgtttctgttttggatttggatttccaagattttaaaggtgaacacgacatgggagaattcatagatagctttatggaatatcacgaagagttaggcttgaagttgaagagcttcaatatgttttatgatgctaatgagcacttgcatgagccatttgtgaggaggctaaataaagtggttaggcgtggagtttgtgatctgaatattcagaatatggtggatgttgatgtagcattagttaggatgcctccctcgctttattcatgtgctactttagtgaatttgattctctactgtgttgtctttgatcatccaagatcaaaatcggtttctttacctagtgtgaagaaaatgtattttgagggggtcaagtttgatggtgattctgttctggagactctcatatcgcatagtccggttcttgaggagttaaccgtgattccgcatccggaggattatttggaagtcatatgtgttcgttctcaatcactggagagctttagacttgagtctaagcgttttgagtgtgacaatcccaaagttgaaatcgattctccaagccttgagtttatgagtatctgtgataagaaacctgaaagccttaaaatacatagaattggtccttttgcggaggtaaccgttgatgttgagtttgatgttgaggatgatgatccattggagatatctaagatacgtaagtttctcgtcgggttatccacatttcacgaactgaccatctctgctcgaactctagaggtacacatatgattggtggattaaatataacattaagcttgtacaattttgtatatggtgttgacttactttttttttggctatacacagtccatccatgactactccaaggtgggaccattgcctccattctctaacttgtttggcttggatgcttcgttagtcgaatcttcttgggaagttttaccagcctttcttagttgctgcatgaatctagattcgctcgtcatagtgagtttcatttatttgtctatatttcacgtagttacattgagattcatatcccaagaaaacttatcaaaagttttatgttactaggaacttgactgtgttccagagatggaggagattaaactctcaccagtgcctcaatgtgtcttatcctctctcgactttcttcagttgaaggcaccatcgacaccaagtaaaatgaaacttgcgacatattttaggaagaagtgtacacgcttgacgaaaatgcttttaagtgggcagtaacatcatcaagaaaatgaaaaggattccaaagatatgctgaaaggtgtcaagttgttatgtgtataatgtcgtctctcctaaatcaagtttacctatcaacagttaattatcaaataatctattgtaagactttttagattttcttgttagacatggctttatgttttctagtttttttttatggatgttctttagtaaatttctatctcttaaaacaaaattgaaattctatgttgcaactatatgtaggattgattataaatttttatattctttcattgattcttactcgtaaactatattgcaatgagtaaacttaaaagtgaagtatcttggacttcatccatgttgttacgggttggattcaacgtcaaagtttcgttgaaagtttgttgctatagttttctatatatatatcacatgcattgtaattaggttgctatagtgtacaatacatgtaaaatatacaaaactatagcaacaaagttttagatacttaattgcttcctttaatctcaaaccatttggttgaatctatcaagtacacaggacatatgctcattcaaattgggtaactaagagcacccccaacgctggactctatgaaaatcccttaaaaacatacaaataataatattttaatcttattagggcttctgtataatttgaccaataataaaaacacatgtatataattttctcgagactgtcccttaaataaagaattttagggcctctctctcttcttacacttaccttttaattatttttcattctttttatcattagaaattttgttaagggaccaccgttggtggtcctctaatcacgcatggagtctagacgaaataagaaacgcattaataagacatatattattttttggtgaaagtataatgtagacaaaaaaaaaagataaagcttttgttttcttagacataacccaaagaacataccatatatatagcagaattagattaaaaacagtcagatcagaaaacaaaacaatctgaatagctaattgcacaaaaagctagggttttgttaaggattttccgagtttaataccgggaactgatcctcgtgaattgtcgagatagcgcttaatgttttgtaaatatttaatattaaccccaaatattcgattttgaccaatttataccccatcgagatatttctactgctgactttttagtgttttgtatttgacctcgtttgatggacgaaccggaatataattgtgttggttggtcaaccatttgtttttagcattttctggtctttaattaatcgctaagtaatctaattctggattaagaagaaaaaaaaacttcaaaagagacgcttttatacaacgctttgagcattacttggccctctcaaaagaatacacagaccagtcttcgtgtgctcgtaattggcgattctcaaattcgatctccgtacaaacaatggccgaaacctcgaagcaagtcaacggcgacgatgcccaggatcttcactcgcttctttcttctccggcgagggatttcctcgttcgtaatgacggcgaacaggtaaaatagtttttgacgtgattttgagtttatggtcttcgatcgcaacttcttctgatcttcgataacgatcctgtgattgtctcgcgattctttgaaccgactcttctggtttacagaatatagatagcttcgtgtagttgattgatttgctatagatgactttaatcgattgctttcaagtgttaagattcattcagtgcttggtcctttattgatttggcttgtgtctatttcacatggcttatgttgtttgggtagagtttaattttttatgcatttttatgatgtttaggtgaaagttgacagcttgttagggaagaagattggattgtatttttcagctgcttggtgtggaccgtgtcagcggtttactccacagctggtggaagtctacaacgagctctcttcgaaagttggttttgagattgtgtttgtgtcaggtgatgaggatgaagagtcatttggagattatttcagaaagatgccctggctcgctgttccgtttactgattcggaaacccgtgaccgtttggatgagttgtttaaggttaggggaatacctaacctagtgatggttgatgatcatggtaaacttgtgaatgagaatggtgttggggtcatacgaagctatggagctgatgcttatcctttcacaccagagaaaatgaaggagatcaaagaggatgaagatagagctcggagaggacagaccttaagatctgtcttggtgactccttcacgagactttgtgatttcgcctgacggaaacaaggtgcacattaatagcttgtgagatcagattctttttcgtcaataggaagattatatctatacaagactcttgcattagttagttattacggacctgtttctcttttgttgacttaatgagaccgatcaattgcatattcattaggtacccgtatcagagcttgagggaaaaaccattggccttctcttctctgtggcctcttacaggaaatgcacagagcttactccaaagcttgttgagttttatacgaagctgaaggagaataaggaggattttgagattgtgttgatatctcttgaagatgatgaggagtcttttaatcaagacttcaagaccaagccatggctagcattgccgttcaacgacaaaagtggatcaaaattggctcggcatttcatgctgtcaacactaccgacactggtcattctcggccctgatggaaaaacccgtcactcgaatgtcgctgaagctattgatgactatggagttcttgcgtatcctttcactccagagaagtttcaagaactcaaggagctagaaaaggcaaaggtagaggctcaaacgctcgagtcacttcttgtctcaggtgatctcaactacgttctcggaaaagatggggcaaaggtatagctctcgataccctcttcattttctaaacactgttcttcaaggctgatctgaaccaacctgtaaaaatttggctttctttgttaggtgcttgtttcggatctggtggggaagactattcttatgtacttctcagctcactggtgtcctccttgtcgcgcttttacaccaaagcttgttgaagtatacaagcagataaaggagcggaatgaagcgtttgaattgatcttcatctccagtgaccgtgaccaggaatcattcgatgagtactattcgcaaatgccgtggctggctcttccatttggtgatcctaggaaagcatccttggcaaaaacctttaaggttggtgggatcccaatgctagcagctctgggaccaactgggcaaaccgtaacaaaagaagcaagggaccttgtcgtagcccatggagccgatgcttacccttttactgaggaacgtttgaaggagattgaagctaagtacgatgagatagcaaaagattggcctaagaaggtgaaacatgttctccatgaagaacatgagctagaactaactcgtgttcaggtttacacatgcgataagtgtgaggaagaagggacaatatggtcttaccattgcgacgaatgcgactttgatcttcacgccaagtgtgctttaaacgaggacacaaaagaaaacggcgatgaggctgtgaaagttggtggcgacgagtccaaagatggttgggtttgtgaaggaaacgtatgcaccaaggcctgataggtagcttcaggcacagttatgtcactatgtgtatgcaaagctatttcctttctttgtataattgctaagagtgagaatgtgtggttacaatctgatatctgattaagaccttggagataaactctgttaatctaaagtaataataaaagaatcttcttatttaactttgatcttgtatcaacaaattttatattccaacaggagttgtatgaaacaatacattggcacactctatgtatatatcaagagatacagagagagagcattctgctctcagatgaaattttcgtcttcctggttccagtggctaacacctatgcagaggaagctaaaggtggcgattctcatgatctccagtggctttggattccctcattcgtaatgggcagcaagcaaggaagaataaccagctgctaaattatgaaaaaatcagatcaaaagaaaaacattttaagcttgaaatgtagaactgtttgagatggatctaagatcacgtgggattttggatccagtaaactaaagtgatacttaccagtgattctctgttttatcataggacgaccacgttcatgaatttcctcttggcgaatgcaagccaccatttatttggtgtcccgttggctctatatgctacactcagtaacctcccacttgtctcctctcgaacctgcttaagatagttcctgaaaagctctgacatttgaagccaaacagaacacaaggctaaggaccaagtaactgaaagaaaaatcaataagagttgtttagacatgtatatatacctgcttcgtcctgggactgcggaagcgaaaagagacctgggaaaggaaagccagtttctccaggaacaggaatatcttctaaacccaagttgataatcgctttagttccaacagccaatgttctacagccttcaagcctctttaacgccacatttatataaaacgtcaagtaaataaggagcttatcagcaggacttttgatatcaaagtttgtgaagaagacattagcacgaaagaaggtgattgcctcgtctactatatcagttttatctgcatataaaaccaacaatttacaaaagctttcgatcgcacaattgaaaaaaatcacatgttttgattaattaccttgttctgaaacaggtgcaggaccttttatatgactcttgagaggaagcaatggacaaccacatgcctttgttactccttcttcatccacaaaactcgagtgataaacctgatcagagcatttaatcacaaggattaaggaaacaaaatgagcatcgcagagttaaatactccatggaaccaaatcaaagtgaaacaagctcaataaataaaaaaaatctcatcgaagatctaatctaatttcattagttacaaaatgaaatgcgattaatgctaattgaaagataagaaaatggtgatccgtaccattttgtgccgaatttgaacaatgaagcgatatcaggaaggagaagaatcgaatcgaaggtagatctgctgcaattaagatcttggatatataagaatcagaatttaggtgaacgattgattctatagatgaagaaagaaaaagtttttacctaaacgagatcagatcaatttcaacttctttagcgtctacgaaagaggaaagactgcgtaaagttcacacggtgaagaatccttcgtgatgttgcggcggtcggagattgtcttattgggaagcttaatcgccggctgaagaagaaattgaaatggaaaatcgacgaagtaggaaaaaggaatgaagaacagaagaagaagaagacagagaggtatggatgacacgtgtaagactccatgaatgtggtacattgcttcgtaccgggagtaaccaatgttaaatccggcttagctttgatttttgagtttctcggtttttttatttgaaatttggtttcttatcgaccactggaattaggtacatcaaaaaccaaataatgatgtggttcattcttcggttcagtttcgggttacatcaaagtggtttgaccggattaaacattgatcttcaatcaacaacaacaacaaaatgtccatataagtgtcaagtttctgttatttctgctgaatggataaaaacttgttacataagcaatatacaaaacttagtaaacaaaggctaaacagaaatgcacaaatacttgcaatgcaccggactaaaccgagatttaaagaagctctagtgagatttaataagtgtgtttgattctttgtgtgatatatagtacaagttacattggtcatacatgaatattaatacgtgaatcatcttacataaatgtgtctaacattcaacaaactagtaatgagcagctcttgactcaaacagttgattaaacatatttctacactgaattgataataatacaactggtgataactaaactaaattgatgctacattctatggtctcgctttcgtttaaatttgaagttactgggatgtgccgaaagttatgacctgaacagttgagaattgctctttgcacagtgtgatgatgcggttttaaatcgttatggctctggtcattgtagctcgtgaaagcgcctaatgctccaagaaacccttcatgtcgtaaaaacattgcctttgcctcacctctcgacctgaaatgagaaggaaaaatgagaaagttcgataaagattttgtggacatacatgagtttaagatatggagggatttgattaagtagtttcggttttggatttaccaaaagtgaacagcaacggagattgtgtccatggtgtactcaagcccacggatgaaaaatccaccaaagaaaatacgcttaagaccgaatctgagagcattcaaataagcaatctggagggagagtagaaaacgttacaattcgatcagaatatcatcagcttcaaattatgttttaaaatggcattaaaatgttcagaggaactgacctgaccgatgttatttgatatcattcttagaagggaccttgccacatcttctggctggtaatcttcaagttctttaccatcagaaatcgctttcccaaagctggaagcgatagctgttgaggagagaccaatctatcaaaaaagaatgaacaaaaggttatattaacatatgaatctaatctaaaagtcttcagacatgtttaagcaaaaccaggatcaatcaattacctttgaataatctgttccaccgtagatatcccccacaagcatgtcaattactctgttatttccatggtggcttaactctagcagctcatcaaaactgaaattaagaaatattagttgttactcaggcaaggaggaaacttacattaatagacttaactaagaagtcacctcttgcattttgttaaaagcttcccaagacctaaaaatgtgcctccgccaaggcttgttccacttatcctctcatattttccatctccatcgacctatataagaacgagtttgagtaagcaacatcgctggtgtagtagcaaacaaaaacagagagatcagagaaaccaaaaccagaatgaaccttgatcatgctaacgccagaaccgatgttgactagtagatatggatacaaatcattatggtcgatctcgacaaacttcttttggccatctaagtaggtaaaagcttcccttgggacagtctgcaatcatgcaataatctattgttaatttaaaatggcagaaataagaagtttatcaaaaactattctgccacagatgcttttaatgcaatgaagaaactatcggttaaaaaacctcagggagcacagctcatttaatcaaaattgcaaatgatcaccatcttcaaatttataatgtcctaaatgttaatgtagctatattttcagtcttatagacgttagtctgcaacaacactcaggccaagatcactatcagggaaacataatacaacttcactcataaagaattagcaaaaagtgttgacaaagatgagtgatagcaacgtgtagcctagactattcagagtacatatatatcctcatgtgggttatgtttgaggaaaaatgaatagaagatgatgataggatagaaaaaaaaatcaaacctttagtagaaaattaacaccaccaacaagagaacacatctcatcttccttatcgaaaagaataccaagtttctccttaaagagatcagcaaacttaaatgccccaccacctgtggcctttggaataatataccataccataatcaacttacaaacaaaaatcccacttcaacattcttcattacaaagctttatccaaactataaccgatgctagcttttaccttaacataaagtttatcatgaccttcgccattcggttgctgtacacctgaatagttacctctgtcagtgaaatatcaaaagaactcaacttttctcgaaatcagtaagctaatgactcatacattactactgcaaatagacataatacttctgagtacatatgaatccgattatgaatcagaggttaggatcataaaaatcaaaactttaccggaatgatgaaggatattgaatcgaataaactccaaacaatcatcaatctttctagtctcaaacttagcgaaacaaagccttcctttcacaacagagcaaccattacgagactcttcgctataatctccatttgcagagaaatacacaagcttgatcagagtccctacgaaaccagaaaaaaaaaaaccccaattccggttaattcgagacaaacccagaaccgaaaaattctaaaactgaatgaaacaaagccaagtttggatttttaaattacctccgatgtcgagagccaaatgagagatttgagtcggatccatggcgggttttttgtttgggtttttgcaaaattctcttttttcaacgttaaatagaaataaatttcaacgatcaactactttggatctaaaccatctatctacttcttctctctttctccatggctgacttgttgttgttgttttttcttcttcatggagcgatgtttggctgtattgattgcgtcaataatttttcttttaaaaagaaagagagacgaattttgctgacctgtcatttagtcttctccggattggatagaaaatagtattttttttttttctgtgcgttaaactaaaatgtaagaaactgaaaagtaatctaaaggtgttttgttttgaccaaaaaaaatagaatttgaaatacaaacgctctcccagaatagaaataatttcgatgccaaaaaataaaataataataacaacttttttcaaatctatatataaaacttagaggtgttttcgttgtatagaaaaatatttcattttctgtactactaattttctgtttaaacaaacaaaaaaagacttttaaagaaaaataaaaaatttacttgtgtagtttaattgaatggaaaattctacgcctattcaacaaatcgaatcaaatatgagcagtaaatgctttcattgacttcaaatcaagttccaccgcattgctgataaccttgtcgtattaagagatatggaagtgcttctcctacgtcttgtcgtattcaagacatggaagtgttttgtcgaccacttgtaataacagttactgacataaaccatacattcactcgcgtttctgaccttgttgataggcccacgaagaacattggttgggatggtcggggcatttgatgataacatgtgacggactagttcacagtatatatgggaaaaactcaatttctgagttcaaaaatataaaaatcataatcgtgggcctaagagttagggttaggttggttaaacccacgaatcgtgtttgagttgtttatgcctcccctccccccattgttaaataattgcctactttcaagttttaagctctttcgttcttgtatgcatgcattctttgttaaccatttttttcaatcaaactgtttacaaaatgacatgaagcattctttgttatcattttgcccccatatcttccaatgaatccagttatgcttgttagcacacataaccttgaatttgataaatttaactcaacaaaacaacaaaacttgaatttcataatgtgacactattgattcttgcgcattgtgtcagcaccttagagcatcctcagtggtaatttctaatcataaatctcttaaacaaaattaaagtgtaagtatagataaatattatttttaattatgggtctcttaaatttggtgaaactaaaaccaattatctcttaattaagagacaatttacttaggtttcatcaaatttaagagacttatgtaatatttaaatcatataaaatttttattatttgttaagaaacttgtttagaaacccctattgagggtgctcttattgtttatttttttctttctttgtattcaattttttatgattactatctctcccttatactgttactagaaaaaaaaaaaaaaaaaaaaagagagataagaagaagaagaaaatatttagtgtgaataaaacagacaatgattaacaatttaaatattcatgtgatttagttaggtagacggcattaatgtataatctagacttacaacaaaattaaaaaatatattaaaatttgtagtctatttcaagcattagattatatattctttctcattctttttctaaatcatagttactaattgaagcagtagcctataatgtgttgaaaccagtaacgtgtctaattttttaagaaattaattaagtaaagttactgcaagaaattgaaacatcagattgtcaaatcataactcttttaaagaaaacattactttattatacaagattgaacatataagcataaatacaaatagattatttgtaatttgaaataagtatttctttgcagttggcaaatagtaatttaacaaaaacgaaacaaaattcaccacaccaaacaaatacaaaaaatgagaatatatcaaaaacacaccaacttgattcaaacatacattcttgtggtacttgcgtttccgatttctcaagcggcagaaggtgcagcaggagagtaggaaagtggtgcttcggttaccgaagctataattgttgattccaaaacggttgcttccaaatctgcagggcttttcggtttaaaatcaagagactcgtcattgtagatatcccaccatttcttaattaacattttgacgtcttctctgtccatgttaggttcttctcctgtgtacctccatggcttggatccctttcattttagtttcaccaataataatcaatagatgttaaaatgcaagagaaagcattggcagaactatcctcatgtaaatgcattcccatataggacaatactttaatttctgtttaaagaaggtttaatttggaataaaattaatttatattgatgtatatatatagattttatagtaatagagatactaaatttcccccaaaactaacaattttatatgctcagcagaataaaagtcatataccatatattatataccatttttttttttttttggtcatataccatatattatattccaattaatttcccatctttggagcttaagaaaaagtacttacaggtggacagtagtgaacaactttgacactctccaagtcaaccttccccggatggcgccaaagcacagacaaaatcaggttgtataccggagataccggtttaaagaccttcccaaagaacatattgagaaaatcctggcaaccaaaatccaacaaaaaaaaaaaccaaaatatgtcatacatcaaaaacgattcagaacatctgaacattatatagatcaaaaccctaaagattaattgaataattgatgtatatatatgtcactcacttgctccgcaaatggtgtaggaggtgtgacctggagggtctgaaggagactctcatacgtcaaaggattaggctcaaatacaaacataccggcattgaagtatggagagggaggagcagattccatctcggcgggccacacgaccttctcaggacaatattgacaatagccgatcgagtagagaggagtgtaactccatattttctcacagaaacaactcaacacgccatgtaaatagccatcttgcatatcaaagaggtcatcgatattgccaaagacttgaatatctgcgtccaagtagatcatcttgttgtactcttcaaactacaaagtttataagtccaaaatatattagatatatacaaaagatttcacatagtactctttctatttcacttaaaaagtcatttcagaaattctagcgaacccatcaccaatacatcatatatttgtttctattagaatttagatcatatgcatagatcttgaactttgttcaaaaatctgaatttgtttcaaaaatatattaattatgaaataactaagggagtataactttataatctaaattcaaaagcaaatatttgtgtttgcgtttaaatatgaaaatattttcagttcaaaaatatataaagaaatttcttataaaatactttttgtaaattgtagaagctatgacgagaaatgaaaatttacataaaatttataactaaaacactatgaactaaaattcacttgaaaataaacatacttttgaatatgtttatataaacattatttaaagataataaacggaggctctcgttttcatgaagtctatatatatacacacttacattccaaattcgcagttttgagtagttaataatgtaataagcccttgcgtatgcatcttggctatctggaggatgaacaggctcgatctcacgcacaatgcatccttgagacctcaagatctctctatgttcttcaggcacatcaggtaacatagcaacaacaagaggatacgcacttttgaccttccgcaaaccctttgctaatcccaccactcccttcacgtagtctccatttcctgccaaaaacgtcacgtaggctctctccttaggagccttctcggatgcattgatcatgtccacatgagtttcaggggtcattttgcgccaaaggaaaatgaagaggtgggttttcaaattaaaagaggaggatacttctgatgaagaatgagaatatgccaacttggttacttgggctcttggctttgaaaaagtttatttgaaaactaccactaacgttttgcttaaataagcgtagaaagagataggtaaatcctggaaattttaactacggtttattaacattgtaacttttatgtaacataatgaattaatctttcattattatattctgatttctcataagttaaacgatataaaggttatgtttcatttttttcttatgcattatatacacttacatatttttttattagaactcgaatgcattaaacataattcatattataacccaaattgtgacatgttagagcaccaatggactatgagtttatatataataccggtgttgttgaaaggaaaggaacccttctttgtgtttgtcttaatcgtgggatgatgtaattacgagattttgttttttatctcggtgagaaggacttttaattatactaagtggtacttgcgttccatgaagcgttggactaaatattataagaatcacaccgtgttgaaaatcacttttgtagatttaacagttctgtttttaaaaacgatttaaacgagacagataatttattaactatgtgatatgattgtttttttttctagtttccaataattattttacaaaatatgagtattatttttcgaaaacatcataccggtgttccaaaacttccacgcgtctgttttttttattagcatgagattcatccgtctatttaatttacttaactcttcaacaacggaccaaccaaggcatgtttcacaaaaaatagtgataaatgtttataacctagtcaatgatcaataaggtatcggtattttataaaagtaaaatgatacaaataaaaattacaaacacatgataaatattttataggaaatttaaagattacagtttaaccagtaccggtcgttatgaataggtcatcatcgtatataaaaataaaatactaggctcttagctagcttaagtatttaaagttatatctatacctaaatgaatttgtaatctattttcctattcatagatttacaagtcgaatacaagtcgtccgagtttattggactagcgtactcgtatatttttctattacacgttcttctgaacttccatacgaccatgttctatacaaaataaacaaagttagagcatttgaacaaacatacatataaaaacacatttccaaattctcgatattaattatttaacaatattaagactttgactggtaagaaaataacaactccgtcaaataaaaatggagaaaataacaactaaaaccttactagtgaagctgtatataaagaaattgggaaaaagtcacgaggacattttgtgtgaatgaattagaactcatttctaagacttcctcgatctcatacctggctgaaaactagaagtcagcaaacgacgaagacaaaagaatagtgtggcgcacgaatggaaaggcttagcgtctttttaataatgatcatgacttccacaacctcctttctgtaacacatatactttgttagtgaaccaatgagaaattttcagtaagtcgtgaatattttccagtaagcccatttatggtttctacagttattatatggttgattgattggtctgattgatcggggttccatattatttgtttatgctactataagattagctgcttactgctgtaagaaaaaagaaaaggattatctattttagtatttacctcttcaatatttcttcattagttttttaattggaatagaccaacaagaatttagattcatgaaaatgtacttcaaaatatgatttctctatattagttagattttcattggctatatatttgacagcggaatgccatcagtttatggcctagctagtaattcattatggggttcaaaacaaaataccaaactatttcctccatatttttgtttcttggcttttttttcttctccatttatgaaaatatactatatcaaattactataaaaaaaattcagtaaataattcattatataacttttaagactacaattaaagtgttaaacagaaatctaaattgatttagtcagatttgagcttacattaaataattatttctaagaaatatgtctaataaaaaaatagtaattttatatcaaaataattatgaatcatattttgcccaaaatcatttttctagtggatatccttgtatctattttgacactcactggactacttgtagaagagtgacacagtgcttgaggatttggaattcaaaattttagctatacgcgggacaatttcgaaagcggagaatctctgccatggaaaacaatgctccggttccgaagcttcttctacaagtaagtcaccgatcatcttcaccactctctgatcgatctttctccgtttttcatagatttttctattttttctgttctgagaaattcaaattctgtagttaatctcatctgctttccaaagatgccgtttagcagaagatctctgtagattatcagttcttcttgaccaatccaccgaaagagatcctccgattacttgtatttcgagtaatttcactctcttttgtttttgattctgcgtcgccctcgatgaaaatcgaatctgtcttcgctaaattggtcacattatctgtctatttgatgctgtgtatagttgccgatacgggaattggatgcaatttggaggaatttcagaatttgaggtgcccaagagaattcaatggagcgaagatttggggtcagttacattactagcatcttcagtattcgattattgaatgttaactatgaaattttagttttatttagaattgtacaaattgagctgaatttgttcgcttctctgttatctttgtaatacgttaatgcgattctgactgtggataatgatgtgttgcagatgggttactctc

SEQ ID NO: 101 - DNA, 120787 bp, Arabidopsis thaliana
gaattcaatggagcgaagatttggggtcagttacattactagcatcttcagtattcgattattgaatgttaactatgaaattttagttttatttagaattgtacaaattgagctgaatttgttcgcttctctgttatctttgtaatacgttaatgcgattctgactgtggataatgatgtgttgcagatgggttactctccgtcaaaacgacttgtaagttttgctatattgacctcaaatcttgcttatggttttaaatgctttagcctttttcctggttttgcttgtaagtccaatggagaaacatatcttgttttcctctctgggttatatgattgattgttagttgtctacattaagttcgagtcaccgaaactaagtaacttgttattgttcttcctccactgtggtgatggaagtgcaggctttactgacgatgaggtatactattatcatataaatctggatgagtatatagcgaacaaaagactgaaaagacaaccttctcaggctaagaatggtgcaaagtttaggtgtgcaagttcctcaatttatatcttatttcactgatttctaagccactgtgagtgcccttgacttgattatatattcggattgtgttgttttcagtgggactgaagtatccctgagtgtttttggaagtatggatgttctcgtggcaccgataattggcttctttcaaaaggtcttcccttctcttctgcaaccttgttgctcttgtaactacttatttcaattggattcaagtacagaacacaacgttacaaaaacactgctaaccacttgttatagaaccaagataaagagccaaaatattacatctttaagggaagaagaaccgtactgaattccaatggaatgaaagtttatgtttgaaggtcgctcattagttaaccagtgtttaagctactgctttaatttggtcaagcaatgaatctgtatcatgaataaccgaagcttgtttagtggtttatatttagcatatcttttaaattggtattgttggccttctggccctatcatttgagtgtagtcaattttgtcaacttagttccctcatgattgcttaagttacactgtaatgatatttgtatcctgttttcttgcagatcattgttctacagatacttgtaagttcaagtgactccctttggtgatttacaattttgtctagaaaattggtttccctatacatggtaatttagaaagagaaccaaacaaatcatggaattacaaagctgattcttttcttcctctcagaatgtcacattggatctgatggttaaacaagggacttctcctggtaatcaaactcaatacgtctttgcagtgaacgctgacaaaactccatgctttactgcctccaatcttgaacggttgaagtctggtcttgaggactatgttttaaggcatgctaactgtttggatacgatgtgtgactattgcttctctgataggtatataaaatgtaacaccattcttgtttctggtactcttacgacttaacttacttcggcttatataaaatgtaacaccattcttgtttccagttccactagttaagtctgacaaatcttggtatatttactttcagagagcatctaaaagttggaagtggaacagtatgccaggaagacaaacataagagagttggagggacgatggaagtggttattgtgataagtgacttgctagagtcaactcagcattgcagcagatcatgcaacggcaaaacagaggtttgttaaactcactctaatacaaaagctcatattgagatgtgatgtatgattggctgatcttaactaatggatttccccaggttctatactttgacaatttcttaccttcccctgttccacatttggcattgagcgcattgaaaaagattgactggaaaaaatatggtttgatcctggcgaatgtgaatgatcaagacggacatgtgtttctcgagtgggacaatttcccttcatatgttcaaatacaaatcgccctccattggtatcacaatcaatatccaacaaggcagaagaatgggcctggtataagtcttctgaagaagggaataaaaaatgctttggacaatttgaaggctaaacatgagggttttcttctaagctcacattctcgtaaggtgctctctcggttattctcctttgttgtttgtgtcaatctcttaaatttatacaggtttgaccaagattttgttgttgttgtttatctttcttagatttgcagctatgtccctgaccttgcaagatcaatagcaggcctaatattctcctctactgacttagacttccaaggagattgcctatctgttcttggatttcagacacaagaagttgagcgtgacacagtcgagaactatatccagagaaagatcgtgacggttataggaatgaatgagaggaaaccccagaaagaccaagaagctgctccttttctgttttttgatggcgagtctgagacgtcgttctttgaagatgaggaagtagaaggtgagtattactctagctccctggaatgatacatctgcttctgacaagtagatagtaaaattgtgaaaatatatgttacgcatttgcatatgttattgcttacaaattctcatcgttttggatagacttgtttataaaagccttacatgatcaaatctgtaagaatctgcaagtttgttgtgttcttgagctagtttgtccaaagccagtaacacaattttgcatcacttacttctctatttgtttttcaatcacattcagatcgagaaaattccacgcatgaatatgatgctacagcaactaaagcttatacacagttcaaatgtctggcgactatgctgcaggaatagtcaatagggcactttctgattctaggcttaacattagtagtatatttgttctgtacagcttcacagtgatatgtttctgatccgtacataaatatagcaatacaaacacttcatttccttagtactttaacacttacacactttagcaatactatttgaaaacctctcgggtcgagaaaaaactcaccaaggtttctattttctggttaatactatttcaaactatgtatacatatatcaaaagaaaacagatagaggaacacaccaagtcttgtgacttccctgcaagatatctcaagcagcagaaggagcaggaaagtaggtcatttctggttcaagaacggaagctaggatgcttgattttgtaacggtttcttccgcatctgcagggattttcgatttgaaatcgagagattcatcattatagacatcccaccatttatcaactaacatcttgatgtcttctctgtccatgttagcttcttctcctgtgtatctccatggcttggatccctatcaacagaaaaaaggaatcaaatttcagcaacaagcttaaggggctcagggtttcaaagcaaagacagaactacttacagctgcacagtagtgaacaactttgactttctccagctccacgttctccgggtgacgccaaagcatagccaaaaccagattgtataccaaagggatcggtttgtacactttctcaaagaacatattgagaaaatcctgtccaatcaaagttacaaaatccaaaaatttattaaaaatcaggtcttgatttggattttggagcatttcaaaaccaatgaactaatatgttactcacttgttctgcaaacggtgaaggtggtgtgatctccagggtctgaaggagactctcataagtcaaaggactaggctcaaacacaaacataccggcgttgaaatacagaggaggaggtggagattccatatcttctggccacgtgaccttctccgggcactgttgacaatacccaattgaatactgcagcgagtggctccatgttttctcacagaaacagtccatcacggcatagaaatatgcatcagacaaatcaaagaggtgatcgatattgtcaaagacttgaatatctgcgtcaaggtatatcatcttgctgtactcttcaaactgcaacacgtttcaaaggtcagaaaccacaaagatcttttaaccataacatatcttaagttagataattgtaaagaacgtaacttacgttccaaatacgaagttttgagtagttgagaacgtaataagccatggcaaactcaacttggttgtctggaggataaacaggttcgatctcacgcacgacacagccttgagacctcaagatctctctatgttcctcaggcacatcaggtaacatagcaacaacaagaggatacgcacttttgaccttacgcaaaccctttgctagtcccaccactcccttcacgtagtctccatttcctgccaaaaacgtcacataagctctccttggaggtgcttgatgcgccttttcggataaatacatcgggtttacggaaatctcaggggccattttgagcaaagaaaaagtattggggtaggttatagaagataactgaaaagttttcttgagtgtttgagaagtaaaagaacagtttgatggacttgtaaactttttagttactttggtctttggcttgtgagtagtttctacgaaggctaccacaacgtttgattaaataggcgtagcgcgaagggtaaatccggaacaaattaattatgaataacttttcttttttcgatattgttcttctattaattgcatttttatataagttttacttttcagatatgaaaatttaaacctttggcttttttccatgggtgatgtaactaacgaaatgaaaagtcaaatatagctttagagaagttcttgatgtatctagagaagattgcaaagatttatttttatttatagttcatgaattttaaactttttaaaactgatagtataacttgaattcatgttcacaatttattttttcttttgtgtatatatgttccgtagatttcgattatggaccgtatttggttgacaataacaaaatgtagaagaaaatttaatagttaaagtgaaaacaaaacggtagaattaaaaaatatcaagacaaatttttgtttgttcagtagataaatttaaatcgttttcatagattataaaaatattttaacgaaaaggcagattcaaaagggttagtaatataataagattggacgaagttcctcgtggaaggtcgttaaggctccaaggatgtggcatgtgtgtagaagaacttggcagttggcaattatgttttcagacgttagaacaattaataattacatgaataaattattaaacgggtattaatgtgcacttaaatgataattgataatcctttatttaaaaattattttgaatcctttttttttctgtttatccaacttctgtttgttaaaagttaaaactaatgttgtaagtttagaaaatacagtataactagagatttttgatggttagctatttgatgagaacgagaaagtagaacgacacaagtacaaaagagtaaaatggtaattcactactgtaaattgctttatcaaatttaatttatttcacataaaaaagaaaatataaataagtagctatttatttcttttttttgtatgaatgttaaatttgttcagcataaaatatggttacattatacacatctttcatccttatgtgttgagtttgaatttgaaaaaaattagagaatataaaatgaagtaaaaaatagagtctaaagactatttgtatgtgattttggaatatctagttgaaaacatttctcgcaacatatcctcttagcttgtcgttgttctgtatcttcagagtgcaatggtttaaagaagagaagccgcataaagttgtttgttctccatgtcatcttctgttcttttctctctctatatatcgtgtatactgtttgaaacacacatactataagaggaattgacgggtgcgacttaagaaagtacatgaaatcaatgagagtacctagctgaataaagagacatgtcggtattttatgtcacttcatttgatgaattgatgaagaaaacatttgtaacaaaggttgataactcggctgcaattatgtcttggagttcagacaatcgattgatcgagtcatcgagagtagcagctaatatgcctaaattaataaagcttagttatgatgaattttggtacgacatttcctagttaaaaaaagaaaatacaaatgaaaacatttgtagcttctatgagtttttagtttatgcgacttttgccaaaagattgtataaaatagaacgaaaatgtgtactttagatcgaacacaaacaaaagcgtaggtattagagtttttttatcaggtgaccttttatgtcttttttaattaacaaatgaaaacaatgtgcccatattccacaattatattgttatttacataaatgctctttcatgtcggttggctctcctaattttataattgcaaacgtatagtagtctgccatgtagcttttttagattttactttttctaacataaaaatattactttttcaaccattttactagattatctcaaatgagcaaatttttaaagatattatttatatatgtaacataatacagtttattataaacattttgttttaatatttgtattacaaaaaagataaaaatatgaaaaaagtttctgttaaactatatttttttgaagtatgtgaaaaatgttaactattcagtaggagtcgtaacaatctgtgtaaaatattttttttcgcttatcgttattaatcatatacttcatgcatttttatataataataataataaatataacagtagaatatacgatttatccaaattctattcgtcacatgattgaatcttaaacttttgatattttttgtttgttaatcgagaaaattattattaattcactaaacatcacaatttattagaatctatgtaattcgacatatttatttgaaataccatatctcgttaaccgataaccatgttttattgaaatgtgattactggtttttgattagaatttaaatttaatttgatctaatccgaatactctaaaatttaatttgatttgatttgtttcggaaaggtctttgaaattttttgaggtttttgtcaattttaaaaatttccaaatcttgtagaccattgttgaattttagataactgttaagcaactaaccgattcgagaaatttttagttaccacccaacaataacacattatatatttttactaaaaccactttccaagtatataagcgattttatcccagagagaccgttggaatattttatagttatatgaaagaaattgaaacaaaaattatataatttattttcttgtgtaaaaaagcttcgagagactcctttgctcacaacaccaattacattgtcttactaaattagtgcctgatttcggtcatgagctagatattcataagggaattttaaattgaaaaaatctctttaaaatggtaaaataattggaactttgttttctacctatcgacatcctttaattaatttatattataacgaaagataataaataatttagaccctacacattggcatcacgtattacacgcgtttagggtatatttggtatgactagttttaccatttttattggtctctataaaaaaatgaaaaggacaattacattttcattttcttaaggagaccggcaaaatttcataacaagtggcaaatggtataatcttcataacctatacttataaatcgaaaacgtttagaaaagaaagaaaaaatcgcatatatttgctattttaagcgtttgtagtaaacaatcatgattaacattacaatgggagactcgaaatatgattaagatgcatatgagaacaatcttgccaaagttaaatcttaagaaaaccaattatctttgaaagcaaacttggtttaggggaagggaaaaatataataaaatgtttcacatccggaaagagccaaacgatcaaagatagcagaaacggtttgagagagaataagttgaaaacagtctaagaatattagctcattacagttgtctattatatctagagtagtaaaatgataagtttcttaatatcacaatcctaaaacaaataaccataagcaaaaacaaataaaaaagaaggttatataacaaggaacaaagataatgcttctctctaaatccgatatcgcaaaattcaagcctgccatcaagaaaacatagaacaacatcaaaatatgaccacaaaatgactacaaaactttggttatattattatcatagtgtggattaggagatagagaaaaaggtctatctatgactgtttcaaaaccgatatgttaataaacctttgttcccatatttataattttagaatgtgcttactttgttagcaatgttgttggagagccagtccaggccttcgtacagtccctcaccggtggtggcgcacgtgatctgtatgtacctgaagagatcaatcggagagtgttggttctctggtttgtgagctagactaatagcaaaggaaagcaacaaaggtcgatagatcatgatgcttaccagtgacgctgccggagagagtggagtccaagcttatcagttatttcagcagcattcattgcgtttggaagatcctgtttgttggcaaacacaagcagtactgcatcacgaagctcatcctgcaaggtagaaacattgataaggccagccaagtatataggagccttagatgatcatgctaatcagactcagacaagtctgtttagaacagcggtaacagcggtcaacatggtctgctactaggaaacagaaagtactcagtagaggttattattactagtacatgctaccataagcaatcatgcaactgatgaatgatgatagagcagaggaaatgagatgatgtagcaattatttgtgtttagaagaagagaactgaccaatggtggggatggtggtgacaatctcaccaagcttgagcttgtacaaaatggtggtcttaccagcagcatcaagacccaccataaggatgcgcatctccttcttggcgaaaagcctgctgaaaagctttgcaaatgaaagccccatttttgtgatattgcagagaagacatttcactcaagatttagcatgaaaactatacgaaacaaaatacaaatagatcaaagtcaaccaaaatatgagcatcccaaaatgtattgaagaacaatgatcaccaaagtgagaaaaccaatcaaaaagaagatcccgatgatgttgtattcggaatctcttcacggcacgtatattcatattccataagatcgtaagaagctaataaaaatgatctaaataatacctttcgaacttgataccaagggatctgaacgagagagaagcttcaaaatcaacgtgacaacgaggtttctaatgaaaatttgctctcgaaaggtaatgtatttttttcactaccacccacctctgattattacattgtcttaacttttacaaagaaagttcttggccaattcgtaaataaagaaggtaatggggcaaattcgcaaatacccaaagtgttggaacaattagcaaatagttagagttgtgagtaatttcgcaaatatatgaatgaagataaaacgtatctagtttcaacgttaacgttatttacagataatgttatcaccgcagatgtcgcagatgtaaaagcatagaacagtaatcaaacatttcagtgttattaacgtgagaaaagtataatgcatctacaattttcggctaaactggaggagttaacatggttgtgttgttaaaccctgtgggttcaacgccagtattgagcccatctgtgtatggtttcaaccatttgcgggaacagcgcacttacgctttcattaatcaggtcttgaaagaaatggatgcatgcttcatcatccatgtcaagcctaaacttttcttggagctgaataaaaagacaccatttacgagaataataaggagcaagcaaaagccaatccggttaggagaagaatggtgggtttcatttggttaggtgaaagtgaaagaaacttactttgagaatgcccttttctgggtctgaagctatatcgggaatagttgaacccgccatgagatgaaacagattcaaaataaggttgctcgatttccggagaatgttgtaggcttcgcaacagtaggatttgaaccttgtgtagtattggctgcaacacagaatacaaagtagccaacattttcaagtcttatatgctgcaactctcagagcaaaatattcatggaattatatcattttaaggtacctttctgctccgcccatggcttccaccatttctttgcagagtttcataggtggagggaatggtttaggatctctaccgagaataaaagcaaaatcaacgtggaacagacgaccatcatctgtaaggaggaggttgtccaggtgtctacatatcaaaatcaggccatcatcacaatttacagcaaattgaaaaaaattctcaaaaaccttaacgagatcatgttttgcaccatacctgtctccaatgccaagtatatatgtgatcacagaatagcccgcacaactttttataaatgtatcaagacaagtggctgttatcccgaaaggtgcatgctcatcaggatgaaacttctgcagataacttgttatgcttcggtgctctgagagaatctaaacatgcaaaggcacatatcacaggataacgagattagctactctcaaaattataagagagggtcaaaattacttaggcatgggggcaatgggtttaagcactgatactgtacctgagccaaagaacgggacggtatgaattccaacatcccttcgtcatgtccagttgctaacaccttataaggcgttaggcatagatcaagattttccagcttaagtagtctatccatgagccaaaccatttgaacaacctatcgagtaatgaaaaaaaatcacaacataaacaaaaattacagataatatgatgtaatgaaccgaatataccagttggtcttgccggagatcatctcccttcttaaatataagtttgcaacttcctccttcttctggtgttcggaaagtaaggcgcagaggatgcaatgcacttttaaagagtgatgattctcctgccacaatcccctttatgagaacattaggggtaagcggtgatcgaataggctgaaagaaaaacaaaatccaaaagttaatacacaagggttagagaaacttgactcagacattcttggataacatcacatttaaaggcattagttaccagttaaaaccatagtgaaagtacctcttcgaagtaggtaagttcgctaagcagtccacctaaaagctgcctgagcttctcaatttttttctgggtgtttccacgtacattcctcacttctcgtgtaatggaacataactgagcagtcagttctgtttggcgcaccaaactttgccacaattgatatccatcttcgccgttaacaccaggcggcagctgccatcaaagcaaatatcagtctagatcagctaaacagatctcacttgacgtagaaagcagctcaattccttcagcagtttgcttatcattcttggacaaacactaactaaaagtaaggactatcgtattatcttcactgcatcatacattagcttttcaagagacaaaacccgaacaatctgacactgttaacaatgtatatcccaggttcaaaaggtttgcaatctgactattacaaagaaaacagaggcaggaggaagattgatctatgtatttaactcagtgaaaagaaaacagggaaagaaaagggagtatatagtaattaggtccacaccttgattatattctcctcgagtaactcatatgtactgtaaaatctcttggcatagacatggtcatgaagttccacagcaacataccaccgaagaaaactggccaactcaatattctgtaatgctaaaaaatttgaaagaaatgtaacggaagtcaagcaatgtaacaagtacataaaccagttttacatagaaaactcaacatgatttcatgtctagatgttcagcacatacccctctggacaaggaattgagaaaggcaagatctatcagagcgttcaaaacgaagagcctgaaccagttgaagcaagtaacactgaagctcttcatcatcagctctttccaggacactcacagcataagctcgaacctatcagtaagtgtagtgaagaatgagcctacatttaaatataccaagatgacagccaagcagatcgagtggcgaattagaagagcagaagaaaagtaaattggacactcgtagtacctcttcactctcaaatagaggagacaatagctccaaagcatcacatacatctatcatttcccatttgtacatcagttgaattgcttgctttgcttcctgccaacacgggaagcttatgcaacatgaataataagaaccatgaaaatagatctacaagtaaaagttgtacacttacctgaacatcactccactccacacaacgaagaaactttgttagagctctcttttcagacattagagagaaacgaaacttccaaagaagttgtctttcatctccactcaatgtccttgttggcggatatttcaaaactctttgaatggatctaaaaatgaaaaaaaaaaagaaaaaaaaaaagaagacatcatctaaccatgagactatatgcgactatatatcataattatatatatgatcatgaagtgaactgtttccctgaagaatgccacacaactccaattcaacccaaaaacaaaaattcattccaacagagtcccacacttacttccgctcgatattacttggctttagatccctgtcgataatgccacgatccaagctccttgccagctttagttgcttgttctctgaaggattagtctttcccagttctgtatcccagacagtaacaaattcatttgttgaacctattggggcagttatgaacaaattggctccagactccttgaaatcaaaagcagagagacataaatccactggtgatttcaatattgcaagacacacatggagacaatttgaatatataagaaggtcacagacagatctaactgcagtagatactgcacctgaaatacaacccgatgttcaaaactacagaaatcaatgaccacaaacagatgtgagcttccatgtttggtgctttcttgctccttaatcgtatccaaggatttcaacataagtcgatccagccaatctatgctttgaatctgccccctctcatacttattcatgagcttctctaaacgctctagctctccacgctcatgccgtggaacctacgagtacagaaaaataacagataacccaagaaaaagtaggtcggcatcaagaacgatatttcggattatataggaagagttgagatgtatcagaaacctttccaggagtagaggttggaaatgaaccatccgcttctttcccctgccagagccttagcttctgcttccctgatttcatttgcatcttgctgttaaaaagaaggactgttgccccaccaatcagtccctcagttttgccacacgaaacatcccatacctgatatgagcataaacttttcgataagcagaaaaaggagagaggtaccataaaagaagcaataaggtcagagagtttttgtttactgtaatcgcaagttgtgaatgggcagtcaagtcccggtatttagaactgagagtgatgagttcgttccagcagtatggtggtcctgtagttttcaatctggaattaagaatagagctagatgaaacacaaagcacttctacaagagtcatcaacatcatcaaaacacaacaacactacagggaataaagaaacataagagagagaaaccttgttctcatgggaaggccaaaaggagctccatcaatgtacaatgcacactcaatgtaaagctctggttttttctcctctgcgatggagacaactcctgaaaacacacataaatcaaaccaatttgcactaaaaattagaacataatcaattcaagcttctttcaatcagtaactgtgggagatcaaaaatatttgagtacccgaatcagacgatttcttgacggggaggtttccatcaagcttctcgatacgaaaagtgaccggcgaattgatatcgcaggagaggaagaaacgaaactcgttcgcacccatgtatgaaatttagacgatcaaaattagggctttttcatttgaggaagagtgaaatcaattggatttagagaatcggaaacttgaaattcgaattcgtaaaatatgtgtgtttttgagtcgtcgagaggagtacttgaccggagatcatcagctttaatttgtccccaagtctgaacgcagacgactctgggaaaattttacttttacttctaccaaaaaaacaaattacttttactttaacataattaaagaaaataatataaactttgatttgcatcataatataccttttagaatttattttaaaccttaaaaaaaaaacacagaaataacaaccaaaatcttataaaatccctaaaattaaaatgttagtcttattttgtgacaaacaataaaatgttatttgtagtagactgtaaatccaaaagtttatagattttttttcttttcttttgttgagctaatgttaaaattgggtatgtcatgtactttagattttagtaaaattgtttggttgattgaatttaaatacacaatatttttcattacaataataaaattattcaaacattactaatctaaaaaataaatctctatgaaaattgtgttactctgttgtttgatagagtaatctttgttatttttgaactaagaacataatagaaaatagatttatatgtgatttgttatacaaaagtccgtcataagaaaaaatctgcatcatgggaagaatttaacaatttgaaagcagtttcttttctacataatatcatcgagctgagaaattcttacatcatattacaaatttattatctacaaaatctctcaagtctctcttgctgctgaaaatatgtgttagtaagaaatgaatttacctttaactactacaagagtacaagaccattaacttctcttttacgttccttctcttccactcttgtttttaaattaagacaaagtaagaaacagagaaaagcagagcataaagccataaacaataagatctcgaatcttgagatcaacaaaaaacgctctgttaggtacgccttttgttacaaacttacaagttcaaacggtacctcatattaccaaacgtcaccgtaggaaaattcagccaattaaagccagttaaatattgatatacacataattaaggatttaatggagactttttagtttcaactatgagctataatctatattgtaataatggacttaattagtttttttaagattccaacaacatgcacgttactcacatccttttatctcaaacgtttacttctaatatatatctttgcatatctctttagaacaatctcatcacttacccttaaaacatctcttttctgtctctatctctcccactcttgtcttgtctcaagaagaaaatggttaagaagaaagttgccactaaaaaaaactctccttctctcgcaattgccaaaaagaagtcccgtagcaacaaagatgttgtttctgttgaagcaccgattatatcttcatataacgatcggataaggccgttgcttgacactgtggacagacttaggaacctcaatgtcatgagagaagggatccatcttcccaccattgtcgtggttggagaccagtcctcagggaagtcaagtgttcttgaatccttggcaggaatcagtttacctcgtggccaaggaatctgcactagggttcctcttgtcatgaggcttcagcgaagctctagccctgaacctgagatttggcttgagtataacgacaaagtggttcctacggacgaggaacacatcgctgaagctattcgtgctgcaacagatgtgattgctggtatgttctctttctctctctctaagtgttaagtgtattttgctgctaacctgacagagacatttatctgaccacaagtgcctagaggtgttatatgagctactagtttggtctttacccatctgatttttttacaagttttgctatttgatgaaactgatacaaagttatgagtttgaggttaacaagtattgactatgattaactactaataaaattcatgtgctgcaggatctggtaaaggggtctcagatgctccattgaccctccatgtgaagaaggctggtgttccagaccttacgatggtcgatcttcccggtataactcgagttccagtgaatggacagccggaaaatatttatgagcagatctctgggatgattatggagtacattgagcctcaagaatcaataatcctcaatgttctgtcagctacggtcgacttcaccacatgcgaatccattcgcatgtctagaaaagttgacaaaaccggtcaacggacactagctgttgtgacaaaggcagacatggctcctgaaggtctcttgcagaaagtaactgcagatgatgtgagtattgttcttggttacgtgtgcgtcagaaaccgcattggagaagagacatatgaagaagcaaggatgcaagaagagttacttttcaggacccatccagtgctaagtttaattgatgaagacatagtgggaatccctgtgttagctcagaagctaatgcttatccaatcaagcatgattgctagatgtttgcctaaaattgtaagcaagatcaaccagaagttggacactgctgttctagagttgaacaaactgccaatggtaatggcttctaccggggaagcattgatggcattgatggacatcattggttctgccaaagagtccctcttaaggattctagtccaaggagacttctctgaatacccagatgatcagaacatgcattgtactgctcgcttggctgatatgttaagccaattctctgatagtctgcaagcaaagccaaaagaagtggccgagttcttgatggatgagatcaagatccttgacgaatgcaagtgtgttggactgcccaatttcatccccaggtcagccttcttggctatactttcacaacatgttgatggtatacaagacaagccagttgagttcatcaacaagatatgggactacattgaagatgttctctcatccgtcactgctaagcgttctgacaatttcccacagattcaatcttccatcaaacgagccggtcgtaatctcatctccaagatcaaagaacaatctgtgaatcgagtgatggagatcgttgagatggagaagctgactgattacacatgtaaccctgagtacatgacgtcttggactcagaagacaagtgcacaagagagcttcatcgatgctgttgtgaaaaatgagaacatacctgactacttctctgtgactggatttggaaatgtgaagatttcgcatctacgaaagtatcacgctcatttactgattccggctttcgacatgaagatgaggatcacatcttactggaagatcgtcctgcggagaatcgtagacaaccttgcactgtatcttcagctatctgtgaagtctctcgtcaacactcgatttcagaaggagattgtggcggaaatggttgatccaagagatggtggaggagttgaaaagatgttggaggagtctccgttggtggcgagcaaaagggagaagcttcagaatagtatcaagctcttgaaggagtctaaggatgctgtggccgccattgttgatcaaaattgttaagcgattgcttctttcacaagctttggtgaaatcgggtcaggttaagagatcgtccttgatttatttgtttcggtgaagtcgggtcgagttattagggctcctagatgggctatttgtggacttgggccttttatgttttttgaactttcggattttcttgttttcaatctcagtttggaattagttctcagttttaacagccaacactttccattttttttctcctaaagaactttaataggcttttatatgcattagggaaacctaaacattgactagctctagcgcaaaattacctcaatagattagcggaaatattcacaaaatggcagcaaaatcctacttaacttcttaaaacccatctgggattgatattagagattaagctatttcagttaatctcatgtggaaaaaagttagagtttgatacttagttctatgaaacttgtaaatcacgaccattggaaacttaaagcatgcttgcaattgaatcatctgctaacaaccattggaaattatcaagtgttgagcccaatgaacgaaaattatcaagttacgcctttagtcaaaattccaaacttcaccacaaaagaattcagccaattggaaccaataaaatattcaaatacacatcttaagagagacgttttagtttcaactacgagctagatataggtgcaattactgacttaattagcttttttcaattccaacatgcacgctacttgcatcctttcatgcaatttacttgcttcgtaaattcttcgtatacacaaagcccttctaatatctctatatatatctttgcatatctctaagaagaatctcacttacccatagaacttctcttttctgtcttttatatcttctactcttgtcttatctctaaaagaacacaaatgggaggtagtaagaagcatgttgtcactagaacctcttctccttctcttgcaattgtccaggcgaatcctcatgacaacagagaagttgttcccatcgaagcaccgattatatcttcatataacgataggattaggccgttgcttgacacggttgaccgtctaaggaacctcaatgtgatgagagaaggcattcagcttcccaccattgtcgtggttggagaccagtcctcggggaagtcaagtgtcctcgactcgttggcaggaatcagtctacctcgtggccaaggaatctgcactagggttcctcttgtcatgcgacttcagcgaagctctagccctgtacctgagatatggcttgagtacagtgacaagattgttcccacggatgaggagcacatcgctgaagctatctgtgctgcaacagatgtgattgctggtaagttcactctctatcttggtattaagtgtgtttagctgcaagagagattactgagagtgcgacctttaatctaaaacatgaatatttgaacgaagttggtttacttaccatagaattccttggagttagatgtgtacatatacctaaatgacagtgcctagtgatgtgttttatatactctgaaactcctagttggatcttaatggtctggttttttttcatgctgttaattatactttagctgttcacgttacttactgttgaaacttcatagtgttacttactaccattgatgtccctaaaataagatgtctacatgaacctgaatacaagtacctagatttgaaatatgattatggaaaacctagtgtagtctgataactttagtgctctttatactactagttttgctatttgaaggaactaaaagtgttgtgtgtgatgctaaccagttttgaacttttgactacctatactgcaggatctggcaaaggggtctcagacgctccattgaccctccatgttaagaaggctggggtcccatatcttaccatggtcgatcttcccggtataactcgaggccagtgaatggacaaccggagaatatttacgaacagatttctgggatgatcatgaagtacatcgagccacaagaatcaataatcctcaatgttctgtcagctacagtcgacttcaccacctgtgaatccatccgtatgtgaacggactctggccgttgtcaccaaggcagacatggctcccgaaggtctcctacagaaagtaactgcggatgatgtgagtattggtctaggttacgtctgtgtcagaaaccgcattggagaagagcgtatgaacaagctagaatgcaagaagagttgctcttcaggactcacccgatgctgagcttgattgatgaagacatcgtgggaatccctgttatagctcagaagctaatgcttatccaagcaacgatgatttcccgctgtttgcctgaaatcgttcgcaagatcaatcacaagatggaaactgctgtcctggagttgaacaagctaccgatggttatggcttctaccggagaagcattgatggcattgatggacatcattggttctgccaaggagtccctcttcagaatccttgtccaaggagacttctctgaattcccggatgaccagaacatgcactgtactgctcgtttggctgacatgttaagccaattctccgataatctgcaagagaagccaaaggaagtgaccgagttcttgatgaatgagatcaagatccttgacgaatgcaagtgtgttggactgcccaatttcatccccaggtcagccttcttggctatactatcacaacacgaagatgccatacatgtcaagcccgtggagttcatcaagaagatatgggactacattgaagttgttctctcatccgtcattgccaagtattctgaaaacttcccacagatccaatctgccatcaaacgtgctggtcgaaatctaatcaccaagatcaaggaacactctgtggagcgagtgttggagattgttgaaatggagaagctgactgattacacatgtaaccctgagtacatgacgtcttggactcagatgactgctgaacaacaaaacttcatttatgctgtgttgtccgatgggaaaaagcctgagcacttctcgttgactggatttggtggaattgtgaagatctctcacctacggaagtatcatgctcatctcctgcagcaagccttcgatatgaagatgaggatagcatcttactggacgatagtcttacgaaggattgtggacagtcttgctctgtatcttcagctgtcagtgaagaatctcgtgaattattagtttcagaaggagattgtggcggagatggtggatccaagagctggcggaggtcttcagaggatgctagaggagtcgccgtcggtggcgagcaagagagagaagctgaagaacagtatcaagcttccgaaggagtccaaggatgcagtggcggccattgtcgatcagagttctgggtacggagatcgttgatcgttggtttctctcgtgatgtcgggtttatggattgatttgcttcggttagttcgggtcaggtatttttgggcttttgatgggtttcttttttggagttgggccttttgtgtttttctttgaactttcggattttctcgtttatgtttttcatattttgtgtgtggtaccgattaagctattaagcttaataacgttatgttggcgtctgtttgaatgaatttcataagttataagtttcttaagaagatttttattgcaattattattttcataccatctactatatcatatagcctatatgaaactatctcttcgttttatcttcactcggattattgttttgaatttattccatttaaatgaaagaatttgactattttaattttttaattcagtagcaaagtcgcaaagaaacatattttgagatttaaaatccacagtaactaactagaccaaagaaccatttggcacagattcactcaattacgatatttatctcaaatcaaaaacaaaaagttaaagtcgaatttctttataggaaatgtggaataaaaccaataacttcgtatgatggttttgctcggtggaagaagaaaatagacagtaaaagaaagtccgtacataactcaagcaaagttaaacctttacaagagtttcgttggtctgaataatcaaatgtaataaatttttgagtctctggctggaatcaggttgcctcgaggacaaaggacttgcacaagggttcctcttgtgatgcgattacagagaactccttgccctgagcctgaaatctggcttgagtacgattacagaagagttgatactgatgagtgatgaggagcatatcgccgaagctatttcttctgcagctgaggccattgctggtacgttcttactttctcttatctgttactagatgtttatttatatattttaaacctgcaaagacagattcttagaatgagtctctccacacactagagacgactttacgtgttgcctaagtaatcgatttttttaatactgtatcgttgagacttgagtgtagcatgtttgagactaaaaaaatggattgttgggaattgttgttatgatgagtaatcttaaatatatattcatgttttcaggatctggtaaaggtgtatcatacactcccttaactctccatgtcaagaaggctgatgttcctgatcttacattggttgatctccctgagataactcgagttcccgtgaatggacagactcaaaacatccatgcgaaaaatctccaaggtgattatgaagtacatcaagccacatgaatccatcatcctcaatgttctgccagcgacagttgatttcacaacttgtgaacaaaacaggggaacggactctggctgtggtcacaaaggttgacatggctactgaagggctcgtgaagaaagttactgcagatgaggtgagtatcggaattggttatgtatgtgttagaaaccggataggggaggaaatctttgaagaagctcgtatggaagaagagttagtgtttagtaatcatccactgctttccatgataaacaaagatatccctagcagctgcaaaaccaagtaaaccgcccctgaggagatcgaaacggggactaatatccaaaccgaaaatacttgcagtaaagggttcttgttctctgtttcttaaagtaattatgctatttgcttcaagttaaaaatagaagagaattggtcctccttatgtttaggttctagatgtttcggttcaacaacatgaataaagttgttagagataaatacagagaatgggcttgaaaaaaaagaaacaaagtatgaacacttgttaggttttaagcgattgccaaggatgttgtggcagccattgttgatcaggattctgggtacggagatcgttaatcgattgcttctttcacaagctttggtgaagaaagatcgtgtttttaggtcttgcctaaatgtttatttttcaaagttcggaacttttgtgatctctttgttgttgttttcttatacgcttgacattatatagtgttctagttttataaattaaaaaaagaaaagttttttattgcattctctaatttgatgaaatattaaagttaaattaaaatattttaccaatttaaattgtactcgacaaaaaaaaaacttgttctcgaaactatggagaataacgaggtaatgggatgaaatttcatatcacaaacttgcaatctatcgtggttcaaactacaaagtccttgacggctaaaaaatcaaagatagaaaatagtaatttaacagttaaatttatctcttgtactccgtaaaagttacaaacctcagatgtcaacatttacatctatctcttgttcttaaaacaatgaagaactttcaaacttctacatttaaccaaaaaaaaaactttcaaacttcttctttgtaaaagttaaaacaccaaaggtcaccacaagccaatctataaatgtcaccaccaacatgagtctcttcactcactaaaaacttttcttctctgcatctaatcctttatttcctctctcactctcttttgtttatactcgtgcaaaaatgggaggcagtaagatgtccaatgactatgaaattgatgtcgaagctgggatgtcttctctttctatagtcaacacacccattgaagcaccaattgtatcatcttacaatgaccggatccggccattgcttgacactgtcgacagattgagaaacctgaatgtgatgagagaagggatccagcttcccaccattgtggtggttggagaccagtcttcagggaagtcgagtgttcttgagtcgttggcaggaatcaatttgcctcgtggacaaggaatctgcactagggttcctctagtcatgaggcttcagcgaagctccagccctgaaccagagatttggctggaatacagtgacaaagttgttcccacagatgaagaacacgtcgctgaagctatttgtgctgcaacagatgtgattgctggtaagttttctctctctccttctcagtgtagtgttaagtgtgttttgctgcaaaagtgatacataaatcaaatagaatgcgacctttaatcctaaacattggaccttagaaaggagatatttatttaccttaagaagtctctcaataaaagtgcctagaggttttattcgattctggatcctagtttggtcattacatttatggttttattcatgcagttaattatactagtttgaaacacaatgaaacttcttactgttattacctaccatagaagtcattagttagatgtgtaatatatacctgaatacaagttgtctaaaagtgtttaatgtttctggatctcctagactggtctttactcatctgatatttttaatgctgcttaccctacttttgctatatgatggaactttagagtgttgtgtgtttgatactaaccagttttgtctacctgtgctgcaggaactggtgaaggagtttcagacactcccctgaccctcagtgttaagaagaacaatgtcccagatcttacgatggtcgatcttcccggtataactcgagttccagtgaatggacaaccggagaatatttacgaacagatttctaggatgatcatgaagtacatcgagcctcaagaatcaataatcctcaatgttctgtcagctacggtcgacttcaccacatgcgaatccattcgcatgtcaagacaagttgacaaaactggtgaacggactctggctgttgtgacaaaggctgacatggctcctgaaggtctcctgcagaaagtaactgcagatgatgtgagtatcggactaggttacatctgtgttagaaaccgtataggagaagagacatatgaagaagctagggtgcaggaagatttactcttcaggactcatccactgctaagtttgattgatggtgacattgtcggcatcttgtgaacattcaattacatgaggagatcgtggcggaattggtgaattcaagtagtggaggagtagttgagaagatgctggaggagtatccgtcggtggcgagcaagagggagaagcttaagaacagtatcaagcttctgaaggagtccaaggatgttgtggcggccattgttgatcagagctcttgatatggagatcgttgatctattgcttcacataagtcgggtcgggtcgtgttttagatttgggccttttaagatttgggcttttgtgtgttttgaattttcggattttctttgtttatgttttcaatcttcttgtgtggttggtaataatgtaacgctaagctaagctagtaaagctttacgttaatgtggctttcccgttttataaagtctcttaaattctaaataaatacttcattcaaactttcataagctaggaaagatttaaattgaagtttaaaatatgttttctgaaaacatggagaatcatgagatagtgggatgaaagttttgatcacaaacccgatctatggtggttcaaagtccttaatggttttaacttcttaacttttaacagatttgaacaaaaaaaaaaaaaaaaactttgaacagaagttaaaccatgtccaatttttgttgcatctttaaaatcttaagaactacgatatttgttttttttaaacagggctttatcaataaatttagtatattaacctggtccagtctttatttattttttgtttaaatgtaaagatttcattagtttaacttttagttagaacctggctcaatcattaagaaataaatgattaattatatatcataaattatatataatacatatgtttatactttatagacattagtcggttacagcagactaagatcgaatatttctcaatctgtatccggacctgatgaatactttaataagctcaaatgtttatgcaagatatctaaaataaaactatattattataattcgaatttgttgggattcaccatttctgaacacctctggtaatagatacagtcggatctaaatggtaaaatattagaagaattagaagaaaaagatgagtggaattggtacgataatgaaacatttaatgaagctaaacttagttaattcattccaaacggtaaagacgacataacgattagcttagtttgttacaacaaagagattaaaaacataaaataggccggaaaattcaaaagttcaaaaactacacaaggcccaagcccaacttcaacaacagagaaagaaacatacccgacctgacttcaccaaaaaactcgacgaatgaagcaatcgcttaacgatcagcgtatacagagttctgatcaacaatggccgccacaacgtccttggattccttcagaagcttgagactattcttcagcttctccctcttgctcgccaccgacggtgattcctccagcatcctatctattcctccgccagctcttggatccaccatctccgccacaatctccttctgaaactgactgttgaccagattcttcacagagaattgaaggtagagagcaaggttatcgacaacccttcgcaatacgatcgtccagtaagatgtgatcctcatcttcatatcaaacgcttgttgcagcaaatgagcgtgatactttcgcagatgcgagatcttcacatccccgaatccaggtaaagcaaaattctcaggtttattctcatcgtgcaacacagaattgatgaagttttgctgtgaggttgtcttctgagtccaagaagtcatgtaatctgggttacatgtgtaatcggtaagcttctccatctcaacgatctcaattactcagttcacggaacgttccttagtcctgctcattagattacgaccagcccttttgatggaggattgaatctggggaaagttgtcagaatatgtcgtaatgactgatgacagaacgacttcaatgtagtcccatatctccttgatgaactcaactggcttgtcttgtatcccatccacatgttgtgaaaggattgctaagaaagaagatcttggtataaaattaggcaatccgatacatttgcgctcttctaagactttgatttcatccatcaagaactcttctgtcacggcttgaggctgtgcctgcagattgtctgagaatcggtttaacatttcagccaagcgagctgtgcaatgcatcttttgatcgttagggtattcagagaaatctccatggacaaggattcttagtagagactccttggcagaaccaatgatatccattagagacattaatgcttccccagtagaagccatgactattgggagcttgttaaactccaggacactgatttccatcttcacatttatcttcctttcgatttccggcaaacacctagatatcatcattccctggatctgcgtcagcttctgagctaagacggggatacccacaatctcatcattgatcattgaaagcatcgggtgggtcctgaaaagtaactcttcttgcattcgagcttcttcataggtttcctcccctatccggtttctaacacagacataaccaagtccgatactcacatcatctgcagttactttctggagaagcccttcaggagccatgtcagcctttgtgactacagccagagtccgctcaccggttttgtccacctgtttagacattctgatggattcacaagtagtgaaatcaactgtcgctgacagaacattgagtatgattgattcttgtggctcaatatacttcataaccatcctggaaatctgttcataaatattttcaggctgtccgttcacaggaacacgggttattccagggagatcaaccatagtaatatctggaacaccagccttcttcacatggagcgtaaggggtgtgtctgaaacccctttgccagatcctgcaacacagtattcacaagtactaatcaaaatcaagacttcaactggttagtctcaacacttgaatactgtgaaatttcagctgatagcagaactagtgtaacaggatgaaagaaaatcagatcactaaggacccactaggaattacagaatcctattaacactagcactagtattcatataagagcacatgtagtttcagggcatattatatagtagttagctcgttttgaatgtgggatatctcaaataaaggtgtcgttttcattttcagaatcctattaacacctctagcactagtattcaataataaatgcacatttagtttcaggaactttttctataccagtagctagctcgttctaaatttggcatatttcaaataaaggtgtcgttttcattttcagaggcttggaagcttaaaccaaacatatttaacagtatggaaggaatagaggcaaaacataccagctatcacgtctgtagctgcacaaatagtttgagcaatgtgttcctcatctgtaggaacaattttgtcaccgtactccagccagatctcaggttcagggcttcgacttctctggagcctcatgacaagaggaactctagtgcagattccttgcccacgtggcaaactgattcctgccaacgactcgaggacactcgacttccccgaggactggtctccaaccacaacaatggtaggaagctgaatcccttcttgcatcacattcaagttcctgagcttgtccacagtgtcaagcaacggcctgatgtggtcattgtaagatgatacaattggtgcttctgtgggaacaacatctttgtgggggtgaggattcgcctggacaattgccagagaaggagtggtactagtgacatcatgcttgttactacgtcccattttgttgcttgaggagacaatacaagagtagaatagaatgagatagagaatagaagtaagtgagataagcgtagttgagatttatcaaagagatatgcaaatatatatactgagatatttgaagggctttgtgtttatgagcactatactacagaagcagacgtttgacatgaaatgacgtaagtaaaaagcatattggaactgaacaaagctaattaattaagttcatgattacacctattacctatagatattagctcatagttgaatataaaaaagcctctctcaaatcctttaatataatgaatgtgtgagatatcaatattttactattttcaggtagacaagacatttggaattataacctaagttgtagctcacagaaggaatctcatagatgttactgacatacatattcgcttcataattagaactaaacaaactccctctcatcagcctgaattttgattacattcaattctttttttttcagttttttgtttggtaaaaaacttcagtttacaacaattcatattttgtataaatctatattataagtaaatgtaaatttgtttatctgtatcatgagtatctgtcagcactcagcagcactctacttcccaacgagttgctctgctcatttcgttccgtcatttcaatcactcttcaccacatgcaaatgtcaccactgcaaatgtatgtgattgattgataattatcgttttggtttagagattaaagtaacttcttgtcctggaatgaattttcaatgggaggcaaggcttttgtgatctcttgaactctggatttttccttctgtttggtaatgctgagttttttttaatgttgaacgtttcccgttttattttcataaaatcgttaattcatagtttggtaaacaaataaaaaaaatggaaaaaaaaaaagaaaaaaaaaagagacttggattggaatgagaacaaatgctctaatgaaaacacctgaacagagctagaaatgtgtttaaggtcgccggtgaaatttagagaagtccggtggtcggcggtgcatataagcagttctcccttcagtagcttcttcggttccatagaataagagtgtcgcatcaccaccgagtccctgcagcaagaaaagtttgtaaatccgttaaaaaactgtgtgctagtgggttgcataagaactgaacctatccaaattgtgattttgtgacttagattgcaaatttgactaataggattttgttcctttagaacggaaaaagactaagcaagttgattgaaggaggtacctgaaggccggcatggccatcatcaactgcattaagtgctgccttaagtactcggattgcagttggactgttccgtaagatttctctgcaccatttcacagtttctttctccaaatcctctagctggaacagaaaaataggtctcagtgaaggaacaaaacaattaccaacaaatagactgatttttttgtgtatctgtgacaacactatggggtttactggtaaaatttaccggtacaactgtattgataagtcccattttctctgcttcagaagctgtgtagaacctcgtcataaaccacatttctcgtgcctttttaggaccaacctgtatacattcatacactttgattagcctatgtttgttagattttggatattgcattgcagtaatagtgagttcaattaccagacgagacatgatggaacttccataaccagcatcaaaacttccaacctgcagacatcaagtcaatccacataatcagtggggattagtaataactctagtacttacttcacttacacagtcaattcaaggctgaaacagaagctagagggaaaaccttaggacccgtttgaccaaaaatcgcattatcagctgcaattgttagatcgcagaccatgtgcaaaatgtgtcctcctccaacagcataaccagctacctgactcagtccaaaatcaaacagatcaacctcaggaactagctaatccaggattagtacaaagatgcatacagtaaacgagcagttgtttgaaggtacttaccattgcaataactggctttggcaatctgcggatttgaacctgagtagaaacagaagaaggaaggtggaaaatacatgagcccgataaggatgaggaaacccaaactttttattgtcttgtccatcaaggacatacctgaagatcaagaacattaaggcggccaacgtcattgggatcagcatacccgtcttgtgttctcaaagcctgatcaccaccactgcaaaatgcttttgttccctaaaccatcaatatcactattcagaacaatcgtttcacaaacaaattaaaaacaaaaaaataggaatacaatcgaactctttgtcaacagtcatcaactcaaatgtaggatttgatcttggcacttatgagactcaacacaaagctcatagctagacacactgacttaagtaaaataacctaaatccatatttttcttcctagactccatcttcaatgttcatacacatacgcaaattaactctgatatagttcttctattacattttaatgcttcatagcatttaactagcagatatcaattcaaataccaagagctttaccttgccggtgagtatgatgactcctacagagctatcatctctagcatcattaaacgcacgcataagctccttcacagtctgaggccggaacgcatttcttctctctggccggtttatagtaatctacataaaccccagaaaccaaaaactatgcaattcaaaacccacttcaccaaatacataactctctcaggaatatcatcaaacactttacaagcacaaacctttgcaatgccttcatcaagggctttctcataaataatatcaacaaactccttgttatctccttcaccaaagaaatcagtttttttccaaacgacttcgtgggtcggaacttcaccgtgaaccttatggaatctatcatccatcgacgaagcactacagagttccactgagtcagcacgagctggactgaatccgatagggatgagatgattggtgacgacggagagtcgtcggctcgccgagccaagctcattggaatccgccattggataggatgacgagagatagagaaagatgatgaagactaccaaagattctagagcatgggctttgacaatggtggtgataatacatttttcaattgaaaaaagacaacaaaattaattaaaaatttcctaaaagaaggttcaagctttgcagaatcagaggaagtggacagaattgcttcgcgctctgtctctttccataaaaacgtttttgacgatgagataagataaggcaaaacgcaagaaaacgtgcgtttcaattgtagttatttccataaatacccttttatgcgcataatactcaaaatcaatcaaaagtttaagatttgactgtaatacgcccagcttcttcgttatatgaaaagagttgtttcattcctcttgaagttattttccattcaaaataacctctgatgtatctactaaataaactctgtttacagttattaatgttaaccacacacaaaaaaaatccttttgtcccaaaaacttgaatatattgcaatgaaattatcaaattaacctagaggatttacacttagaaaaagcaacggagaaagtaatggctgctatcaagaacctataactatagctaaccgtctatgaattctctaactctgaagctacgcaacaacctgccgtgttcttgtaagccaatacaagtgatctatgctaccacttctcatctcatctctgacttatcgctttcttttctggcttcttttctttgtaaaggcagcaatagatgcaggaatgcctatggttgttcggcctttcttacaaccccatttcactggcaaatcattgactatattgctgatatcatttgttccgcttaatcgcaccaactgctttatctgatcaaacatctgcagcgtcaatgccatcgacagatccaaagctatcgagtcatccataggtttcatcttaatgtttctcagtttctctttgaaggaacgcaaggacattgagtcaccatatccttcgcggttttcacacattgtatttacctttatgatgtgtttgcatagatttccttgcaaagaccaagtgcaatcacagaaagcaaactccgaacctgggttccacacgactcgtgttacatcgctatctctctgagactgaaccttcgctagaaggatattgttttcgtctagtgtaacagcagagtcaggaatctccatcgctcggtaccatgatgttgaagcaatgtattcttctttaacattctggaaagaatcactttcatcagcataccgatcaagccaataactagaatgaagttcagtcgtcagcttgtgtaccaaccaatctactctctgaagggcaccgaggtgtgtatcgtcaaacaattttactttcagctttatatggtaagcttctatcgcaccacatgcttcttggcttgcaagcggaagacttttcatagttgaaagccacattcctgcaataattgaagaagatatgaggcactaagaccgagtacatgtgaacttgattgcggtgttcccaaaggttctatataataaggatgagaaggtgaaaagttaaggccctaacctattttaggcaaccaagtggatgtgaaatactgcatgaacgcggtttgatcaacaaaatcctgcgttaacttttctaaagcctttgttgtatctactccatcccaaatactgtacacgagttctcctagacatttgaataaatctctttgaacctcaatgctatcgcacttcttcacaacatttcgaagccatgatctacgaacacgccagagagagaaaaggatggggcaacaaaatgtgtccctggaaacacaaaaaatgaatccagtcagttcacaatagactgtttatcctattttcgaagctttctacaaagttgaagaaccatcattcatgccttatgggatcagtctccgttgcagcatcgtcaatgataaagccattgattttgaaaccaggctcaacactctgggcgcgttggagtagtattttcatccacttctcaacatcagatttcaaatagctacgcgagataatccaagcgacagggagagcatgatgtcttgaatcaaatacaagaagcgtgcacagaggatactgccacaatgtttaggagatcaggataaagcacataaatttcacaaaagcagagacagacataagaacaagatccattttaccttaagtctttttatcccaaaagtcgaatcagctgcaacaagactacaatgcccaaaacgcacaagctgctgcaactgccactccgtttgaatccccaacataaactgatccgtctccgaagattcctgataaaagaagatggatttcttgttgcgctcagcccaaatcttgatactagcttgatcatctaaatccagctcatgagtggaacgtttgataatcatcccaagtttatgaacatactgagaggcaagactatcaacagttgcatcagaaccacaatacctctgaatcccttcaatatgtttctccaaaacgttttcttcaggaatcccaagatagatcatagacatagtttgctgctgaatctcattacatatataaggaatcttcttagcaccaggaccaatcgcatctctatcaagaggtccatgacaaacgaacccagctttgttgacatgtcgtctctcattgtatataagaagcgcaagtgaaggacgagcatagagtcgtttaaccacaaaatgacatgtacatcctctcatagattgaggtctcgcagctcgatttctagtgttgagacgatatttcctactgggtaacacaccaccaccttctccatagttctcaggaccaaatgaacaccaataccttcaataagaagtaaaacaaatgaaaaccacaagtgaaaaatgagatctttgagtactttgaaactgaaatggaaacttacagtctatattccaaatactcgtcgctcttgtactctttgagactgcctcgagagcgttttcttcctctttcgatgtggaatcgtgtagggcactctgcgtttgagcattctccgatgatgaattcgtcgactcttgcgtatggaactaatgctacttggtcgtgatgctctgatgttccgaatttggtccaggtcaaatcagcccatgaaaagtcttctacttgtgggttttgcactggaatctcttctaatgattcgactatttccatctctgttttgagtgagctgtgcgactgcacaggtcccagaaattaggttttttttaagagaggaattgaatttggaagaagaagatgaatattggagaggaaatgagaaatgttattacaaacaagtccacgtattattatttattttaacagtcgcccttatatttctaatttgttaattttgtcctaaatatttaaaatgagcctcggggaaccattgtttttgctttttcgtccccagcaaaatggctatatgtttgataaaaaaaaaaagacatgagtataaggatgaaaataaaacagatctttcatatgttaatcattttttggtgattacttcaatatactgtacaaaatgtatctgattttgtggaaaaaaaattcagaatgatacgaaaaaagtaaacaatatgtggaactacgtatgggcttgattactggggcagatcttttgattcggcccatacattatgcagtgcaaatcctaacacctgagccatgaactacatacgtttgccaagttgggaaaattcatttgaaaaccctaacacctgagccatgagcgacgatgaagagccaccgctgaagaagaataagctgccagtagaagaaccaaccttgattccttcacttccagaggagttgatattgagtatcttagcccgcgtctcgagattgtcttatcgatctctctccttagtctgcaagcgcttccactcgctccttacttcaggagagatttaccggttccggtcactatcaggttataccgagaattgtctctatgtgtgcttacgtttctctcatactggccgtagccatcgctggttcatgcttcgtgagaagaacaagtcaagtgggtatgttttggcaccaatcccaatttcccattctccttctttgcacgcgtcgagtatcgtggcggttggttctaaaatctacaaaattggcggagtcatggatggatctagtgtttcaatcctagactgctggtctcacaggtggctcgaagctccaagcatgcagatggaacgggaccgcccatcagccaatttaattgatggaaagatatacgtaacaggaggctgtcacagaggctcctacaatccatcaaagtggatggaggttttcgatctaaaaaccgaaacttgggagcctgtattgtgccgttcagatagattgacgttcgagagttatcatgaacgaactaataacttattggttgatggaaagctatacattttttgggctgataagggtgtggtttacaatcccaaggatgatacatgggatagtttagaagtaccggagatggatatgtgtttgacattgttttattgttgtgtgatagagaacgtgctttatgattttttttacgaagaacttgatatcaaatggtatgacactaaggcaagaacttggagaagtttgttgaatggtatgagagaactgcataagtttgttcgtcatgccagtgttacgttggcggattatggtgggaaaatggtaatgttttgggataagtttgtggcttctggtgatggtcttggctttcataaaacgatgatgtggtgtgcgatgattgcacttgaaagaagtgatagtggagagatttgggggaaggtcgagtggtttggtccagtgcttccaaatcaaattcccctggaatatgcatttgagtatgtcggttctgtcaaagtttgatgaatgccataagagtcacacttaaatgtggtgaatctttagtgtgagtcatgcgggtgttatatcatattgttggaggattgtctttcttgtttcaagttttctgcaaaaacatcatttcatttgtaacgctttgatggtttctttttttgttttgtagtgctaaaggctgtcatgattcaaccatatgttgtgattatgatacatttcatcaaatttattgttaatttcatgatcgaagtaaagaaagcctgtaatgaaactaaaaacttcgttcacatgtctttaaaacattaattaacgacatgattcatcttttggggaaaaaaaagaaaataaaaagagctcagtacaaggcttatataacatccgaaagttcagatgtgttcaatggacccaaccattgcagaaacctaaatcctcacagctcaatgcaccagccgggaatcgaacccgggtctgtaccgtggcagggtactattctaccactagaccactggtgctacttgcctatgttgtttattttagttcatcttgtaatttgtaaaatagccctagcgaacgttgttttgagtcttttgactttgctacaacgatttattttagtttagctcattcttatacaatatagctattcaaaagacttaaaaggtgattgtggtgtcaattagcattgtctttagcaatgttggtgcaaattcaactctcttttattaattccaataataaatccaaaaaatatctaccgacgtaaatgaattgaaacaaaaacaaaagatagtataaaacaaaaacatcaggtcctgcacaaatctcttccacataaactcctaaagcactgacttcattacatgcctctccaaaaaatcccgtataaaagaaaaaaataatgcaattcctatatagacaaatcggtctgtaaaaaaaaatacttgatttaattcaggttggataaagaagatccaaaaccaacaatacttgcatatatactgtatatgatgagttaaaggaatgcattatagttcatagaaattacactagttaatcaattaatagtgattagtgcatcataaacctctaatccaaacactgacaagatttagtcgcgcggtaacaaatttctagttgcaccttcttacttacaatttctgttttcaagaaacataaaccaaaacaatttggaccattatgatatatgtgaaacaatcaaactatatgttatacaaacaatatacatatactgcttcaacaaagcaattaggcagttcttgtttttgatttctctcttaagagtctgtcttaattactttagagaaggaaaaaaaaagcactttctaatcttctaaacagtccacaacactttcacacaaacgggacaaatcaatagagtccgtatgaagtactaatattattttttcctaatgattttgcattcccctgtaggtcataaacatatatcatgatctgaatggactccatttcgcgctggctttccgatctgtaagcaatcaatcggtggaacggttgcggaattgagctctccaaatgttttccaacaaaatggatcgtacatgtggtattgtagttgcactggttttagctctatgcctgataattgcacgtctatgcaagggaaactgtcactgcaagcaaaatgcacaggcttcacggtgtaagtgcctcgtatcttctcatatgtgactccttctacggacactgctgaagtatggttcatgcatttgctgtgatcacagtagaattgatcgatcactatcggtagctgaacctctgtgagttgaatatttgagaaaagtattcctttcactgaccctatacctccctgtattcacattgaagctgttaagtttcatgagcttccaaaccaaatcactcattcgttttttttatgaaagtgttaatcattacctgccaagtcttgatccggacaccggtcattgtgttgtgcataacgacatctcggactgttatgttggagacacaggctttggtactgtctttaccaaggctaccaatgctgattccatgccctggtccacaattcacattgtgaacatacacattggagcaaccggtttgaatcgaaatacaatcgtctcctggaaaaacagagggaaatcaacgatattaagacccgatatttacgagttttataacgattttttcgattacaattagttcgtaccgcaagctagtgtggtggtgtgaatcatgacatctctggtgttctgaagatgaatcccatctgtgtttggactgtctccgggagaagacacattcacgtcatgaactaaaaccttgacacagttatcaaatttgaggtgacattgaggactgttctgtatagttatacccgtcacagtcacatcgatactgccataaaacctcagcgcctataccgtaaaacgcaagctaaggtaagcaaaagaattcactgagttgtaaaaacatgtagcgactactaaatcatttatatttctcaccgttggtttaatacttggcattctccaattaagttcacttcttatctgtcatgtgacaaaaatacaaaaacagagtttggtgttagataaagaaacttgagtagattttatagaatgagatgatgaagaagttttttaccggcattggaggacgttcttggaccgagttgttcaacgggacaatgagcttaaagtcatcgtcgataggataatcggaaaggtaatcttgttgccaccaaacagtgcctcttccatcaataacaccattaccttgtattgtaattccgctaagcttcgtgaactcaatccaccacattaaccctcctccccacgattcagtatcggtaggagctacaatcatcccctccagctgcaagcaataaatatctcacatctttcaatccaaaaggttcatttttgttttaaaatcttgcaaatgtcataaattttctcacttggaatacaatgtttgcttgacaataaggacccgagaatgaaatcgggccaacgaggaagatgtagtcaggcggtatgatcatcgttgaggcctcgactttgcaggcagatgcccatgcagcttcaaacgcctgcagaattgttaccactcgtcattgtttggtttaagactaaaacacaattacggaggaaaaaaacagagaatatggtccactcttaaatcgggtatttttgttgttatttctctctatgctcgtttgttagtttattggggaatttaattaaaacattgagaggaaaaaagaaaaaagttatgactttacagaacagagagaaaactttttttatgctctgtttcttgttctgtctcgtgttaccttctcaactgtaattcacattatggttattttttagaaacaattctcatgaaagcgagattaaaattcttgattagtcaagaacaactagattgaattttgtaacggattatgaatcttttgagtctgtacctgagtgtcatcactcattccatcacccttagctccaaaatcaagcacattgaattgttgagagtcctcaactggctgcagcggaagaggtgttggtggtggttggacatgtggtggtggtggttgttgaacttgtggtggctgtgacacaacaggtgaaccgtcgttggattttggcggctgagttttcatcttcggttttggttttgacttatgggacatgtggtggtggttgttctcatggctttttggtttcttgctggacaaggaatcagacaaagaggaggagctcctatggtggtgtctccaatgtcttcctcttctggcaatgcaggtctctagagttgcagaccagaccaggattgtcactaaagtcatcattgtgatgcttctcagcgttaaactctctctcgttatcatgtctttttgttgttttttctttactaaacaaaaaatgttctctttgtaatggtttgagacaaaagcagaagaagaagaagagagtttggtttatttgttgttgttatagaatgaataaaaagataaaggaatttgtgggggtttatataaggaatcggtccaagaatatagaacgactcacgggagcctaaaatggaattttatgacgaaagtttttttaaaaatattgttttctcataaacttagaaatattgcactagatatatacgatagtaatttagaaaatgacaatggaacttctttgcccaagaaacaaaatggaataatcttgtacggttttactgatatgtggttctttctgtaacatgttattttctatgatccactaaaatattagtatgtttttaatgattcactaaaatatgaggcttgtattcatcccaatttttggccttcttttgttatcttggaaaagtaacttatgaaattttcagtttcaacatagaaatcatgagatatataatgggaatcatttctagtaatacaaaattctgatctattgtcatttaccaaattaagccataaacttaaaaatcctaagcgttgacagtactgtaagcttaaaaccccaaggttactactatcgtattattacatatccacattaaattttgttttgtgtgattactgatttggatccaattttttaataagtttcattataatatagcacgtaatcttagtatcctaatcattattattcagtaaaactattattgaaaacaaccctctatgaactttttttacagtgtttttttcttaactgcagtaaactgtcctggaatatattccctacacaaactaaaatacaagttgatgccaaaattcaggactgtctatttcgggtaagaagtgatacatattggacaagtaatttgagtatctaaaattatcatcgaactatacccttcaagaatggttcgtataattctgagtactggatagggttcataaaaatagtttgggtacgtagttccttctaatcactatccaactcttattaattggaataatcgttggagttgtgttttgatattttcagatatttcaagcaacctttaaataattattagagattttggacagtttaggcttaaagtccatgcatttatccgaggaaacaagttatactaatcctaacgagtaatttcaacaatctaattaactcaaaagttggtgttattcaggattaaccaatagaatcagtttttcggacgcaaaataaacacatatctacatattaatagttgttatcataaatgtgatagtgtaacgccccgattttgaactttccgtatgtagcgaattggccgtcgtatgagattagacccatgagtcgaaaaatgacatggaacccattaaaagttgcggtcaggattttacaaatagcattggagatgattaggtttctctttatctgtttttttggagattattagtttataaattaggatatataatttcaggggatatgtgtgcgccacgtgtatactaaaggttggttgagactcatccactatggttggctgaaacatacactagagcaagccaagacaaacataccacaaagaggcacctgttcagacaaacacatatacctttcctgttgcaaaacctcatctagtaacatacaaatacatatatactcacttatatatgacaataatataggcatatgatgcaccatagagtggggctacgtgaaaatgaggtggtttttttttaatgtatacatatagggataaacatttttgtatagatgtgtttgttgatgtgccatcgtggtgatcagataagtgtcttatggtctctatatttactataggatattgaattatcacgaattcgtttcatcatgtgtaaattatcttcatttacaagtgtgttgagtgacttttttgagttaaatatacaccttatcattatttttgaatcataaatttaattcataatataagaactttgaacagaatggttataaagttagtttttttttttagtacggaccaataaactttaaaatatttacatgttacaaaccagttgcggttttctagcactctataatcagaccaacaattacagaatttttgcaatttatcagtgatgaaaaatgtaagaaatctatacgtgcaatttgccatttgcatcgatagatttttttttttcatttaaagaaatgtttttcgttgatgaaaatattgtatctaatgtttaactagattaagaatattattgatttaaaccttttaatatgttaacttaaaggaaaaaaaactgcatgtttccattcaatttgctttcatcgtaaaatgtgtctattaagaccctattagttgatattcaatgaatccaaagttattttcttttaatgatgagctcaccttgacagtttcttaagaggtaattttgtcgtatttagtttcttccaagagaaacattgcacacctgcatatatatgtaatatatatgtgtgtgtgcatgtaaaaatggatgagacatgtgattgggtctatatttttgtcaatgggcagttgattataacatctcttttagtgatcacatgcaccacttcacgggctttgctattgtctccacaactcctccaacttttcttttaaaaacttttcttatcttctttctttgtcttatatgaaaatgcatatttaacagttcttcttttctttttttttcttgtcgcacttaataattcattagttatgatgtgaagaaatcaaccttctaaataagttgtattaaatcgcaagtcacgatttctctctatctctatttctcgcacttgcacgctgtcgaatgctgagaagtgattggaagaaacaatttttacaagtttctcacttctcgtgagtacatttcgatatatatgatcttgtatcctagaatctctacttaaatagcttagttctcttatattgaaggttggctatgttacataacaagttgtctagtgattacggagttcgctcgtttctgctcctaggcatggtaggcaaatgccaatggtccaatattagttttgaaaaatcttaagaaaaaaggcccaaagttttcatttttttctttgactaagagagtttaatttttgtttggttttgctatatgtctcaccgtctcagtatatattgagatgggcgggagattgcttttcgcaaggttggttgcgagtttgaaatccacatgtcacttcatgattgatgaatatatgataactgaaaattaccatcaacacacacataatcaaaaaatatttggttgatatttgacaaaaagagagtataaatcaaataatatatctattatatatgcacaagagataaaaaaaaaaatttagctatttatacccgtatacttattaaagaaaaaggttggcttagtagtttgttctatatttaatttgtgagaatctgtattataattttgtagttaattagctcttcaaaatataagatcatatatccagaagttgataattatatgataaagattatgactggcgaatcatgatatggaaagagatgaaagtaatttctcacatctctattatacagaataatgttttcaaaaaattatacttttatttgtgggactagaaaatttcctcccttgcattccaaccaaatagaaaagtaatttatgattcaatgttgcaaattgtaaaagaaattctattatactgataacattttagagtatacattctataataaatttagatgtaaccataaatttaaataaatgtatggaagcacattaaatatgatacagaaacgtttctggtgacaaaagacgacacaaacgctattgatagaaacgatcaccagttatatcatatgattaaacactatactaataattaagaagaatataaaaaattgaactttagtccatgtgtgtgaatatgagtgaggggagagatcccatgggcattatgacaaatttgtgtgtgtctgtatatgtacacaaatcaagatgctttcataactttctaatgttcttgtcataaaatgttcctttctcattaaattcataaaatgtcactgttcattgctacacgagacgtattagtaattaagtataagaaacaataacccttttcatttcatttattcttgaaggatcttgaagaatcgggagtttttgtcataaaaccatttactatccctgtttttttcttcaataataccaccacaatctgcatatgtttgataaatttattggttagctatatttttaataaatatataggttagttttgtcgtgcaaccatttagtacgtagcactggcttttcttgaaacagagaagtatttccaccaccacaatgcatatgttcaaaattcaatgaaattccaagtagattgtttttagctagatgtagatatgagacacggattttactgtgagctatatttaattagtgatgatcgtttctatcaatagcgtttgtgttttctttcatagctagattatattgattggttatcttcattttttgtgtggaattaattgaattttcgttccacactcctaattggtggtttcattgaaagttgataaaaaagataataattggataatatataaaggaatacaatattattacaagccctcctttgacttcagagctcgactctttgtggtattgggcaatcttcttgatcatgtgaaaaatatatgtggaccgtacctctttcttgatacgccaaaagaagtaatctgttatatatgccaatatgtgttacctgtcttcgaggttttcatataaattccaacatttatagtaatatattctatctatgcgtatatgataaactacacgtaactgcatgtgtgcacatttgttgatatacacggtgtatactttattatcgtttataccaaaaagaaaaaaaaaaaacaatcatcacttcaccgtttattgttttgctctaaattaattaatagttttctatgtattttttaacagaatctttatttcacaactttcaaaaagatgtatagtttgtgataaaaataatgtattataacttaatttataacagttttttgtttaggtattataatagtttggatattaaaatttacaaacttaattaatagttggagtctttttatttatttattatcattcattttaaaacatcaaattataaagtaataaaactataactttaacaacaaaaaaaagtaataaaactatacgaatacgagacatagaaacgataatctgcagatttttttctttttcatgtggctattatttttctgactttctgggagactttatttaattgtcttttgttttctcgtatggttttacaaaattaagtacactgcgttcttatatttctatatgccgtcttttaactaagacattctcgtgattatttatttatttgttgtgtttcgtttttattctaactttcccgtgagacgtgaagtgaagtccattgtctattcgttggttggagaatgaccatgcgtccatgcccttaatttgttccatcttcactttctgtataatcagtttattttggtttgataaatgtcctgatccagccaaatcattgatgtccaattcctggtaaaagatctaataagttcaacattggagcatgattaagactaatatttaaaaataactgtgtcatacaatatatatatgaaggatgtattaatatatgtgcatgtacatttctttgatacatgtaattgattaggttaatcatatacatccaatttgacggagataaaaaatcataaaacatgccatcccattatagtataggcacccataaattatactagctattttattgattttatatttgattgtatatatgatttcaactatattaatattacttcttatatctgatatcaaagatatattctcatatttatttcagtcatactagcaatattccactatatccttaaaccaacaaggttagtggtgctacacaaaaaattttgaggatacatttttcaatacaatgttatttttataggatcttgaaagtcctttgccgaagacgccgaaaagagattagtgagctaccaaatagatatggtttatatcactctgaaccaaaaacaaaaaatcgcattagaggaaaatatatgaacagaaacaatttgaaaatttacaaaaatagtttatttttgaaggctggtaatttattgctagtctaaatttttatattgaaaactatggaagtatgttttacctactgtgacggtaggtaggaaaaacgaatggtggtaagctttgaaatgtgtcagcaatgatagattgggtttgctggttgctagatgtagcaaaaaattggtgagtcggcgcagtagaacaatcctgtacaaatatagtttaaaaattgaaacaagtatatatagactatatagaggaacaccttttgtatgaataatttgcttagaaggctgataagttaaaactattcaaaaataatctaccttgcttgtatagaaaactatagaactttactttacctattgtaattggttataaatcgtgtcacatgaactaaatgttatcaataacttcatatcagtctccaatgagtcaaagttaataacatcattgttgatatgcttcgaatcttaccataattcacttttcctcatatacatgtaaaacataattacttagtcttctatacaagaagtttatattagttttgaattaccaaccttcaaaagcaaactattgaacaattgtctctattcatttattctcctctaatgacactttttgatttcttgtagattgatcctcctttaagaggttaatttttgttaccaaattttgtattgaccaatatgtcttttgcgattttgtgttagacttgtacaaattgacaattttgatacttttggttttttgaacgattttgatattctttgtatattctttagttttttaatgtttagttagaataattagaagatgacacatatatatatatataaaacaacaatatatacatttcgttaagatttttaatgttttatattagtactatataagtaatattgagatccaagtaatatataataatttgttgagaaaattaataaaatgtaaaaagcttaagaaaaattactagcttgtggattctttagaggatgtgaaaagattagaatgaactaggcttctcggccatgaaggtaattcataaagcaacaacagatcacgaggaatcaaattgcaatcaacaatgtccacaatcttcaacttggtcaataccgtcaactcattaccatcaaagttattagagcacacataaagcctaatatattatcatttgagcagcccatctaaacccgctaatgattttgctataaaacctaataacataggctgaataggcttctcaaatgataatattttggggttttatgtgttctctaatataaatctggatctcaccttctaatgattttcttaaatgcacatgggatccaacttcagtggtttgggatggattcaagaattggagaaaggtccatatcgagaaacaattatgtcctacaaacacaagcataacctctttgttgggccatcttgtgtgttggaaatctgaattacctaacacaaacgccgtcaacgggcttgcactaaatccgacatggcccatgtttcaacatatccatggtggcacccgtcactttaacaattgaggatacaatcgctcaccatgcttgtgattaatttgagacctttcacaactgttgtaagttcgaatgtttccttttagctacagcatactgtagtggctaaacgtttaggtagatacaacgaaggctaaagagagaaacaaatgtttggtgactgatttctagcgcgcgataactagccccaacgacaatgcggctccaagcaaggcgtggagtctcacacagtaatacttggccatgaatatcttcccattatcctgcattaaaagaatagattagcaaaactttgagtattacaaatttcaattctaaatatcttaccttgtggtgcttttcaacgtagcttgaaaccaaattcccaactggtaatgtcaggaagcacatcaactgaaacaccaacaacaaaaaggaggttttaatatatgttcttatatttcagtcatgttctcaaatctgttaacttacggtgcaaggtagtggcaaaatcctggttaaaccaagaacaagaagcattgaatatagtaaacgaatagtccatctcacaacaaaagctcctttttcagtccctaaccgaacctgtgtcaaccaaaaaaaaactctaatcataaacacaatcaccatattcatattaaaccttgttgagtttttttcacatttgtaccagaggtgaatatttccccacagctaaatctccatccacctatagaatgtaaatgtagtcagtactgtgtttgtcatttcaggactcattagaccactttttcattaaccaacctgatgaaagtggctgcagaaaaggataagagatgtagtaaaaccaacaaggacagatgatgaaaggaccctaccgcttagcggaagatgcctcatctcgctgccaaaaccgattaacaagcttccattattaacacctcatggaaacacgaatggattaggcttaaaacaaaattttgatattaccttgagctaccaagaagtagataaaaagcagtagtagcaaatggaccaaatgctgcaaagcatagaggctctcctaatccttggtaacttaaccgaaatggcggacactagtcacaaagtattactctaagttagaaatctcctagattagtatcaaattgtcatctaggaagtaacgttcacctggtatacgtagccacagagtattgctgaggctagcaatagtattgcacggatattacttgcatttaacgatgtccaaactagaccagaaacaccaagcgctagcgatgtgattgcagcggctaaggttcctgtccggcttttccaagtaaaacacagtttattaggatggaactcaaaaacataaacttcaaagttgcaaactctatcctttgataatactttaccttccaaccagatttactactgattccattttgttcttatcagctccggtatcaaaatcataaacatcattgctgcaaacataaaaccatgtttggaaagagtaaatacatgaaagagtaaatacagtcaacgaaaatgttaaaaggaatcaatcaattaatcaccttaggttgagccaagtaatgataagaattgatgagagcaatagagtaacataacgtctagctaagaacaaacccgtctctaaataggccgctgaagcgccaacctgtgtgacatttgaacagtgaatattccctagcagataaaggcaatggaggacatagaaaggtttcttgaggaaacatacggtaagaggaactaaagcgacagagtacattggtagtttgattgctctccatatcaattttgctctgggaatctcctcttcttggtaaacctttgctgcatctccataactcttacaaaagattggcctaactctaaggtttcttcttggtttagcattcagattctctcgtgcattcgaaccaaacaccggtaatctagtgattacatctcctctgctgggaagctaagctaagtaattttagtgacagtacaaagtagattattgtcaaagaacaaagctttggatgaagtgctaagcctaccttgtgaattttccgtttcacaaacaaatcagttgaatttttgggcacaaacccatactttatgtcacagagagaaacaaaattcaccattttcaggtttctgcataaaacaaaagaaagaatttcagttaacagaggaagaacactacttccgagttaaagtccgagattctggaaccctataactaaaatctttgttctggcatgaatcagagacaatggaaaatgagtaagatgaagtaaaaaaagtatgaagtttggaactttaccttttttaacacgaatctttcgaagagagttagcgacggaagtggagtcagatcaaaaccacgacgtgatcataacaaaattcacttgaggaaaaatatttcaacttggctcgtctacaacgagattttcatgaacccacgaatctggaatcttaatttggagaagataacgcacacagaagtacagaacaaactcattgaaccttatacaaaaactgagagaaaagtgcccgaattatgccaataaacaggcaaaattgagtgaccagaatcagaatcagaggatttgtgaaggaatctatgcaatgcaaatgttgggatttcgttattcagacaagaatttgaatgttgggttttgcggaagagacgtgaatgatgaagtggataacagaagctccctcgttggaagataaaatcacgtgaggttcacgtgtctttgaccaattttaaatacaagtagaaaggtgggcctttaaggcccattactttcgagcctttgagggtttggttggtacaaactactacaagtaaactagatttgcatgatttacaaattaaacaatgttgacataatttataattaaaccaaattaatattaatgccaaaaattaatattcagatggggaaattaactgcgtcttttttatttttgcaaacgtaatatgatgtatattaatatcaactttattagtatttttctaacggaaatattgatcaaaatcctttacattaaaaaaatattgttttagtacataaataaccttacttgggaaacaagttttgcagcaaaaatattaagaagaaaaaaatcagccaaaacaagtttaataatttcttctaacaatgtaatccacagcttgacatatcgcacacgacacggaactcaattattatctcgtgttcaaagaacggctgcttaataactacgaaatagcagaatcatgctatataggtttaatggcaaaagcaaagaaagactcgaccaagttttcattcatcaccaccatcacatacaaatatgttcatccaccatttacttttcaagagtatgaagacaactcagaagaagaagacctgaacgctagaagttttcaaagactggcaaacaggacaaacaccagtaaacacatcacaatctttacacaaactcaagtgcctacatggcacgagcaagaccgaaacattctttacgttacacaacttacatctcatcccagtacttggcatccccgggatgttcaagtaattgtaagaagctgcttcgtcatcaatctcactatccccaaacccttctttcatttgatgatgatcagcaactcctcctcctactgcattgttgtcgtttccatgtgacatcacttgttgcaaatttacctttaaggcattaaccacagattcattgtattttgctttgtaatgccagttctgagcttccactgccacttgttttatcttatccacgagttcccggttcttcttgttcatgctttcaatctcatggtctttctcttgaagcttcttactcacatccttctctaaggccgtgacaaaggacgtgacatgtctctgtttaatatctctcacacctttcgccatttgatctgcctgttccaagagagaacaatttcaacgacatgggatatgtaagcaaaaacatacgctttgtagataaaattaatacccggaatttgataaactgatcaagctcgtcgttctgtctattgaggtccaatctgatattgtcaccgagtgactgatagactggagttgttatgcttccatttgctgaagttacagaagagttgcgctcatcatcatcataagatagtctcagaccagttgacactaagttctgctttgggacttcatcttgaacaacagtattattgttgttgtagttataattcaaagagatctgcagcttctgctgtctctgcataatattgttgttttcagtttcccttccgcgtgtgctattaagccgcatcataggagcaaggttatcattagcaaagtagtttacaggatcaatagtacaaccagctctcactgcaaccacatacaaaggaacaagcttttagctctataaagttctaacaacattcaaaccaaatgaataacaaaattcagaaacttactcgtcccaagcaagtgaagctgattcaacgatgtgtttgattgataccgaaactggctgtcgttcattagaacctgcggcacagggttatcattgttgcctcccaacatcttctctagagcttaaccgttttatgtgtatatatatacccgtaaagaactgaaacagaaaaattacagtaagaaacctgtagacatacgaaactaattagttgtaagatatgaaagctcaaatatcttcagcttttgacatgacgagccaagatgtaataagatttaactgtcctaagcaatacagattacaatccaactagagacaaagttgagatctttgaggaaactatggttcatgatcaactcctatgtgatgaactttctttgatcttgcctaggaaccaaatttagagatcatggtcaaagattcatctgaatattaaaccaagtaacaaaaaacaggcaaaataaattattatgtcaaaagtgataaaataaggcaaacctctggaacatggaagaaagatagcaactccaaagaacaagacataacctaaagatcttgtaagagagaagctaagagaagatttgtacctgttagagattgcccataaaaaaaaataaaccgtagcttccttcagatcctacaaacctaaaagaaatcattatcacaggctcacagcgatccaagtttgcttatttgcatcaattaaagtttaaaaaacaaaaaaaactgtaaaattaagaagtcgaagagaagctaaatcaatcaatgaatgattcagaatcttaagaagaagaagatgggttttgatgatagaaacgctttgaaacaataaaatccaataatttaattcaaagattttaaatttaaggagaaagaagaataaaagaaacggatgggaaaaaagaaagaatgaaatgaatgatggaaaggtgagaaatcagcagaggacaggacacagttgtgaaggagtgggaggagttgggtggcaaagtcgagatattaaaaacaaaacaaaaacttgaaaaatagactcgaaaataatactaacattttttttttgggagatgatgataacaagaatagtaatagtaaccggtggcggtggtattggttctgctgatttccccgtgagttgtgccttctctctggtgtgacgccattttactctacttttctccattttccctctgtcctttttctccttttctatttttttcttcctgaccagttcaattcttcttcttctttttttaaataaagaagagttcaaacttttaaaatgggcaacactaatttgtttgctaatttacgatagggacccaatgtatggtcgtccggtttagtctttttgttttttattagactaaactaaatttgaaatcacatgtggtttgttatttatctactttcgtgtttgagttgattggaactagttttggttttagttttgtttagtttcttggctcattcttctggttatcttggtatgctataataaaaaaaatactggagtgagaaccttcaccattatgggtttgaactgccataactaaatttggagaatatgattattcagatcgggtttgtttagaaatcgacatttctacttatatttggaaaagttatatagtagaaaatcaaacaaaatgtcgaatgttatatttctcgtttcatgattttctatatatctcatttgtttaattataagacagattgtttagttcgttcttttcgtttactgttttctcaaatttgttttgtagattttttttccatattcggcgaccaatcatataattatcttttaactaatatgtggttaattaaaaaataaaaaaatgtcgatttggttcggacttaagattagaatttcggtttggtggtaacgaaaattttaaaagtcagaaatcaaccaaactccggttggacggttcagccgcttcggttcggacttaagccatgccgctattagaaaaatggatgtttttttttctagtattcacacgtgtccataaaccctaattttccagttttatgaaattgaagaacgaaattgaagtgaaaagtgaaatcgtgcaattttcatcttcctcttctccttaaaccctgatttcggattctcacaatcgaacttggctgcagagaaggatggggactaacgaagtaacaaggattgtgactgatgaagaaaagagagaagcgaagaacttcaacatatttgatctccctgacgttcctaccggacttcctccgcatcttgagctccagcgaactcgcgttgtctgtaagaaggattctaatattcatgtaagtactattctcgatcaaaatttacactctttttaagctatgtataagttcagctaactagaaatttattggcttttctcagtgtgtcccatgtgggtttgctatgttcatcgatttcgtgtagatttacagagtaaagtttaaaacttgcttgtagaaagctgtgaatttactgagtttggtcttagcaatttaagaagattacactgtgggtttgtcgaaatccgaatgatattgagtgatgattgtttgaaatttgaagtctttaatgttcttccctttctttttgtgttttattgtagcctacggctatcactttctcgggtgcctattcctctatgggagtggacaacagtgtgagactagaaaacttctctgaggatttcaaagttgatgtgattagtctcacagagacagatatggtattcgatatgatcggtgtccatgcaggaatcgctaatgctttccgaagaatcctcttagctgaggtctgcccactgtctcactacctctgatgaatctctgattattagaatctttggttaatagtgtttctttgattacagcttccttcaatggctattgaaaaagtgtatgtagcaaacaacacatcggttattcaagacgaagttcttgctcacaggttgggtcttattccaattgccgcagatccgagactctttgaatatttatctggtaagaaatattctgtggaatgtgatccatctcattaagcatataaactctttgtgtcacgcttagttttgttgttgtttatctttgtgtcatagaaaacgatcagccaaatgaaaagaacaccattgttttcaaactccatgtgaaatgtctaaaaggtgacccgcgtcgtaaaggtaatatatgttctttggtttgctcaagaagagtctttgttttattgttagctcgagatctcatgagaggtatcatttttttatttcttgaagtcttaacaagcgaattgaaatggttaccaaatggaagtgagcttatcaaagaatctggaggttcaaccacaacgccaaaaacttacacttcattcaaccatagccaagattccttccctgaatttgctgaaaatcctatcaggccaaccttaaaagatatcttgatagcaaaacttggccctggccaggtactgtttctatttatactcttccccttaattgtgacatttttgaggacttaattccgttgagagatgaaagacttgcatcttcttcttgcaggaaatcgagcttgaggctcatgccgttaagggcattggtaaaacacatgcaaagtggtccccagtagcaacggcttggtatcgaatgcttcctgaggtgagaagttcaccataagccttctgggaaaaggacttaattaatttcttcttgactcgtcctaggcttttccggtaatgctttttgtttataatatcttaggtggttctactaaaggaattcgagggtaaacatgccgaagaactcgtaaaagtctgccccaagaaagtttttgacattgaagacatgggccaaggtgaagtaaaagccttcccaagtttccttcaaatgtctttacttgcttttgagtaacaataagagattctgatgaaacctgagaactttggcggcaaattaatttgacttgcaaacgtggaaaacaggtaggaagagggcaacagtagctcggccgcgtgattgttcgttgtgtagagaatgcataagagatggagtggaatgggaggaccaagtggatctgcgccgtgtcaagaaccattttatatgtaagaaaagaaaaagaaaaacacagttccttcaacctggcaattccatggtactgaaagagattctaattgagtttcttatcatctttcgcagttacaattgagtccacgggatcacagcctccggaggttcttttcaacgaagcagtgaagatattggaagataaatgtgaaagagtaatctctgaactctcctgaaaagagattaaattggtttagctctaccggcttggttccggtttagttcagttttgggttttgtatcgaagttaatacaaagaacattgaaatttatatatacttggtttcggctcggttcaaatttagaatatacatgtgaacgttgaagagtagatggatgtacgtacgtacacattcatcaagcactgaacagagtgaagaaacaacagaacagatcaatttttacaacaacgaaacaaacaaacactaacgacaacacagatattcacgaaagtcttgttgtggccgataaatttgctgccatgctagaaaccaaccgaacatattaaccgaaaaaactgtaaatgacatataaatagccacgaaactctatcagcacatacattatgcactggccgtcttttttttagaatcatccttctcattataaatcaaagaaacacaaattaataattaatcacgtattcaaactacaaaaatataataacacagaaaaatatcaagaagtttcaattacattgtttttgttttctcaaaaaacaatggctgcacacaaaaagagtcatatccgcattttctttgtttcagtaatgattatattatcattgttcagcggatttggagaaggacaaacatatataaactataatggtatgaaaggagacataattccaggttgcagcagtaagaatcccaaagaatgtgtcaaaattccagcatactcttacaatcgtggttgtgaaatctctacacgttgtcaacgtcaacagcattcgagttcgagttaattgatgtatgatatgtttaaatcattttcgaatatgaagttttttattattaaagtgatattactaactcaaattttaattatggtaaggttctttccatttttctttgtaacctggatttatttattatatgttttaataattgatttctttacccctacgattaaagcccaagttaagtgtatctttcccccaaatagtttaattggaagccctaatttaggaaggaaatttctgcttttgctttagacgcaaggagctgtttagggttttggtggggaaacaagatttgtccagatgttaagaggaaataatgtgcatatgaactaggtcataacttatacgatcattttagagacagtgctagtgaaatatgagctcatagtgaatgtcgcggtctaaggaaaatatatttgtaactgtgaaagagggcatgtaagcctctccttatttaaagagactcagttttgttaagcaacccattgtgatcatgtaattatgggtattatccaatttaggaagcatatattatattttgaacccctagctacttcaaaaaccaaaacaatagagaaagctacaacaacttgaatcagatgctcatatgatcctcccttggcaagctctgaatcgtatccgaccatctcccaggcgaatgatcactgctgttaaatgagaaaagagctgcttcagcccttgcatctttcaccatcttcaatacctctctcatcgcaggacggttttccggcttaacagccacgcaagctgtcgcgatggtcaaaagagcttgaagtttctcctcagaagcattcagctcctcacttacttcagtctcttcctctctcaccgcacgcacccatgtggagatatcagacccgtatttatgaacaaggtccttgaatgaagttctacctgttagaagctctagaaggaggactccaaagctataaacatcagctggttgtgttgaagccttgcgtaagtctctgcattcaggagctttgtaaaagagagaagctgcacttgtgtcttcaatcgagtaaggatcatggagatcgctgagaccgtagtccgtgagacaggactcgaagtccggacctaacaaaacattagatgatttcaagttcccatgcgttaagccaggattctgatgaatgtagaccagacccattgccaagtcctctgctattttcaaacatgatgtccagtgaagaggcttcccactcccagagaccttacttcctacgaataagacacatatcaaacagattaacacaagtgctgaatcagagaagagtgtgtgtgcaatacataccatggataagagagaagagacttccattggggaagtaatcgtagacgagcaagcattcttctttggcttggaaataagctctgagtggcaccagattagggtgcttgagtctgccaaggatctcaatatgtctcttgaattcatccattcgaggaaaccctgcgtccttgagcctcttaacagtgatgatgaatccagactccatcactgccttgtaagtgctccctaacgttcctcttcccaacgtttctgctgaagctttgagtagatcatccatggtgtatctcaccaccgtgatgtctcttcccaagaaaaccagagtccctactgatccttcttcgctttctttctcccaagagaaccttttgtttttctggtcactcgtaccttcctctgtttcagccgtctttgcttcttttgactctgccacgcgtttgcttctcctctcttctcttttggatttgcttcgcttccgtctccaaagaagacatatgagaagaaatgtcagcagaagtatcaatattccgccacaaatgcttccggaaatgattccgatgagcttcgttctgctacgtgttttggctacagggatagctggttttgctgatggagttgaagtgattccagtggtgtcattgcatgagttttgaatctgatcaccgcagagagcaatgttgtcagtaaacgacgactcattgaaccgattcagagcttgtgttggtgggatatgaccagagagttgattattcgagacattaaagaatctgagagttgcttggttgagaggaggaatggaaccagagaagagattgtcttgaacgtaaaacgtgtaaaggcgggagagtcggagcaacgagctaggaatcttgccggaaaaccgattcctggaaagaacaaccgttttcaatcggtgtagagacgtcagtgattcagggaactcaccggagaagttattatcgttgagataaagagatttgaggttgactaaaccagataggttagggattgagccagagagagagtttcctttgaaactaagaactctaagttgatccaattggttcaaactcttgccgttgagtgagccactgaggttcaaattctcaagaacaagctttgagactcttcctttcatgcatttcttgactccttcccagttgcaaggatctgttcctcgccatggaatcgaatttgaaggatcaatggatgatttcaaactcagtagagcttcaacatcgcttgatctcaccggagaaatcaaaaagaaagcaaacaccaagaagaacatacaagaagaagaagagatcataatggaattcaagagattttttaccaagtcatgatagaatcagcagttgtaagtggcatcgatgaagaagctcgatcacggacatgacagcgaagatgtcacgtgaagccaatgcttcttgatactttaagagcagtaggagaagttaatcaaatctcacttgtctcacttgtttcctttttcaatgcattcataaaaatattatttcgtgtgtacacttccactgttttacacagatatgtagatcaataattgtttatggtggagaccaagattaaaagaagagaagaaaatattaaagtttttgtctttttcactcaagtctttgaactttctcaagacaagtgctgagtgctgacttgggaagagaaaacgacagaaattggagggaaatgccagagatcattgatggtattggaggaacatagtttcaagtaaacatatttttaattcaactaatctgttattcgattttctgcttcaagcaattatttcccaatctctctcgttgagtaagagggggatggttcgaaatgaaaaaaggatacaacttgtaaaaaagaattgtataactcaattatcaaaatcatatcagttataacaagcaccgtatttggtagacaaaacttgaagtttaaaaagcacataattaactcactctcaacctatgtttcttcatctattcatcgacatccaagtaaaaaaagatgaatctttctggctaaccatattgggcaatacagcagtttcaatccttagtttgacgccttttctttctagatttttgtgatgcatcttcgttttctccttccttagtcgatggaatctggatattggtaagaaagaatgaatcgattaggggttttgacagaccaacaatggttacaaggatacaattatgagcaggctatttaccttttcctgtttttctgatctcttaagctgtcttcgtgagctactgtttccttttatctgcttctcctaaaattaagatttttgaaacaatttgttaggtctcagcggaagaataacaaagcacttgtttgcatttgctagaattcaaaaagaaaacctgtgatggtgtctctggattgtcaacttcttcgttttctccatgtttggttaatgaaccctggatgttcatattaaaaagacgaatcaataaggtttcagacaaaccatccatcgtcacaaggttacagtaatgagcaggctacttttacctttccctgtttttctaatctcttacgctgtcttcgtgctctactgttttcttttatctgcttcccctacatttagtagttttgcaagaatttggttgagtaaatgactcatgggaagaacacaaagcacttgttgacatttgctcgaacgtcaaaaagaaaaacctgagatggcgtccctgaattgtcaacctcttcgttttctccatgtttggtcgatgaatcctggatgttcatattaagaaacgaatagataaggtttttgacaggtcaaccatggtcacagggttatagagcaggcaaattttaccttttcctgtttttgtgatctcctaagctctctccgagctcttctgtttccttttatctgcttctcctacatttaggatatttgcaagactttggttaggactcattggactaacacaagcatttgatggcattgtcttaaatctcacctgagatggcgtctctggatcttcaacttcttcgttttctccatttttggtcaatgaatcctagacgtttatattgaaaacacgaatcaattaggtttccaacaaaccaaccatggtcacaatgcttcagtattgagcaagctacatttaccttttcctgtttttgagatctctttccctgtctttgtgatcttctgtttccttttttctccttctcctacatttaagatttgtgcaagaatttggttaggactcattgacaaaacaaaaagcactcgttggcaaattctctaatgtaacctgagatgctgtctctagatcgtcaacttcttcgtcatcagttctaatctttccttctttcactaatttctccatacgagcatgcttctgaaatgagtcaaacgacaaaaaatactatctcatcaactacaagactgatgaggaaaagctcaaaactaatcccgtgcttatcatctactacttgattccaaaaaggaccaaacactcaaatgctaattcaaagctacctaatttacctttgatgaaacatgtgcttgcattgtgttctcattcaagcaaacaacggttggacaatatctgcatttataaaccgatttggattgtatcatacaaccgagaatatagttctcttcctcttcttcgggtggttcttctaaaaaacgattcattgacatcttctccaatgtcccaccatagtcatcagcatcagagttatcatcaccatcatcaacatcagcgtcttcgccagcagctataacagagaataagcaaagattttaccaaaggttctctgagagtacaatcacaagagaactaaaagagataattgctcaattgaagaagcaaacctggggattcatcatctcctgaatcatcaccgtcctcggaaacttctgcaacagagtcttcttcttcagattgttctgattcttccgtctcaggatcagagtcagaagagaagcacgatgaatcggatccactgtctttatcaccatgctcaagcttgtaaaatcgtctctttatcatttttacttcgtgtttactctacagagacaaaacccaaatttagaattcgaaattctccaacaaatcaaaagtaaaggagcaaacttcggattaaagtaaatagaaaagaggagactttcgtaccgtgagttccgcagaagagagcttggagactgaaaaggggaaagctttgctaaagagaagggttttagggtttttaggttatttttgtaaattaagtaacttttataagggtgttttagtcattgagtggacaacattttatcccaataaatatacttattgagttgaagttaatcctctgcagttatttcattgtccatcaccaatcgccaaaaccgcagaaaggtctgacctttggattagcggtgagtaattagggtttatcatatcgaaatttctagggtttctttttcttacttcggatttcagcaagtttattgacccgaatctttgtttcaatagaatttttttgagttgtttaagtaagagttggagtttcgctttgatttttcgagtttgattttgtgggctaactatgtttatgcgtttttggtttcagtgagagtttcacaatgaaagatagagaaaacgatggaaatcttgagagcagaatcttcgtgggagggttatcgtgggatgtcacagagagacagcttgagagtacctttgaccgctacgggaaaatcactgagtgtcaggtcttgtatcgattctcgtactttatgatcagaagtctcagagactcgttttgaaacctgtgtttagtgaatgatacctctgagattgtaggatagttttgtttgatgaacctaagactcatctattctgtagaagagcacacacagatattgaggtttattgacttgttgaaggatgcagtcgaggaattagtagagctttcttaggaagtaaacatgcatctcaacctcctcttgatctgaaaatctgtttgagagccgtatgtttagaaatgcaagagttttgagatagatcatggctcttgtctcagcatcagtgcagtaattttggtttgacgtcactgtgttttgttggatattatgattaaattgcagctgagctctcttttcagtggttttgacaccaatcaggactaaccatcttttattctcttgcctgtggtatctgctttagtagtcactgagatggttttcttgtactcattcatcatgagccactagttgttgtaattgtaaaagtacagttattggcacatgtaagcatctctaagtagtctatcaatacaccaagatgataagtttctggtcaaaaatggtcttgatcagaatattagtcttcttttttaggtcttgatcagaatattagtcttcttttttagtggaattagcatggaaaacgcattcctgtggatttgttgtgggaaactgatttgaggtaacaggtctgttgtaagggttaaaagtatggttggctagaggctaatctccaacatcgttttgctaggattattgttgtggtgatacttcttgtggattagtatttctacaagtatgcagctgtagtttgactttgtgttgtgtgattctaaggacttgaaatgaagtaaatttgtgaatcttgctaccgtcttctgtttgcttgtaaatgttctgagtttgccacttctaggacatgctatatgagagataggaatgtaatacatctgcttatttcttaactctaatgtaacatctggttcttagtaatatatcttgttcctggctcaatatgcattttaataacattattggtcttctttgcgtacttgtagattatggtggggagagatactgggcgtccacgtggttttgggtttattacattcactgatcgcagaggagctgatgatgcaattaagcacatgcatggaagggagttgggcaataaggtcatctccgtgaacaaagctgagcccaaagttggtggagaagatgtagaccaattaaagaaaggtggaggctattcatctcgagggaagggaaccgaggatgagtgctttaaatgcagacgccctggtcattgggctcgagattgcccatcaactggtgacgatcgagaacggttcagagttccccttgcgatgcgctctcgtattggagacatagatggacaccgagatcgctatggagatcgtgatctggagagggagcgggagcgggagcgtgagtttgaccgctacatggatggacgccgtgaccgagatgggggacgatatagctacagggaccgcttcgacagtggagacaagtatgagcctcgtgatcactatccatttgagaggtttgtagctcttgtcctcaggtctaaataaatgttccaacatgtgttcttttaggaaagtcatgaccttttgatgtattaacaatgtagatacgcaccaccaggagaccgttttgtgagtgataggtatgggatgcctgaacatcatcttgagaatgaatatcgcgggagagagagaagctatgacagggacagatacgcaagggatacaagtgacagatatggagatatgggaccgatacgcgatgagggaagaccctacagaagcagaccaggtccttatgaccgtcctagccgtcctggaggcagaccttcatcatatgaacgttggtagtttgttttggttaaccagatgtcaatgcttatgctttgggatttaggtctatatcagagatagaactcgaactcgagatctctgttatgcttttttgtcgaatattatgattcttcatcgcagtaaaaaagttatgttcttatgatcctattgattcccataaagcaattcaatagattaaactcaaaattgatggatttaaaacacttgagacagagttaagcatagaacacttgaaacagagcatagcttcaccatgaaaattaagagaaaggaggaaactttggcaatacaatggaagaagaagtgttacactagcaagacaaaaaggtaatgcaatctcaaatcttcaatgagaagagaattaaaaaagccatctttaagcttacttaagaagaaatctcaaatcttcaatcaaatctcaaatctttaagcttttactaatgaagttccccgatgtagaaatcttcaatcatgtcgaaaacacgagtggcgtgttgaggtccgaagaagccatcagtagaatcatcaccagcatgatcaagaatagcgtcaccaccaggatgttcttcaacataagaagtaatatcatagactttatctttgattatgatccaacaatcgttccttttgttatgtactgcgacttcactcttgctgtaactttttggtcttaccacatcttctacaggctcactgctagatctcttcttctcttgattgtcgtttgttcttcttcgctttccttggattaagaacaatgctgatactagaaaacccagaagcaatccgatcacagctatcatctttctctccttggaaatagcaaaaccggagtgaatgacaattggagagagtggtggattagatccagcttgctgacgagtgacgacccaaattattgaatttagggtttagaggggcataaaagtcaaaacacaacgttttcattgtcctcatcttcgttagtggttgtcgaggtttctaaccaaaaagcatctccacgtctatgcaaaaatgaagttgtagttattttggttattactcgaacctgagacccatgcatctaattttttttctccttctccccggcgaatcctactattatcgattaactaatttgatgtctcatttttgtctatgcacaaattcaacttgattatttaggtatataagtaaataaaagatttatcataaaattacacatgtaaaagtttgaaacaaatttaattattcataactcacataagacatgtaaaaaaaaacaaaaaaaacaaatgtcacttagtgaaatggataccaaactttatgatttataataccttgttgtaatttaaatatctgaatttccaaagtgtaggtgactgtgtaattcacaaaaattgagtaaaagtttaaaaaaataaggaggaacaaaccatctttcttcaaagagtggactagacaaaaacaaaaaagcaaaaccaccacaatggaataaaaagtggttctgtttcttaatagaataaaaaccattacaaaacaaaaccaccattttctctctctctctcctcgccagcttctgcaattcgaaagttcttcgcatcatcttgctgtcaccactctctcgcgaatcgaatcacgattcttcaatcttcttcttctctattgcgatctctctgaattttgtagcttcacgatttcagtatctctactttcatcaccaatcgttgggggtttagggtttttgcatcgacgccatctatcgagctacggagaagcatactcatcttctattttggctaaatccgaggtgggttttgctcaggttttgctcttttaggtttctgttgggttttaatcggatttttttccgtatgattctgaaattgctaaaaccctaaattgaacatgtttttgggcgtgcttcgttgtaggtcaacttaatctctacgaaatagcttttgagtgatgattccgatggataattattgcgtaccgagtactagcacgaccggtttagtgttttcggcgacttcgagcatgaatgcttcttctggatttcatcttactgtaaattctccgacttcggttactggactcaaacatgaagcttctttggctgttgattggtctgttgaggaacaatatatattggagaaaggtctttcaaagtaagtatttttgttattctccattgttcttcgttctctgcaaattttctcacttcgtagctattatacaatgttagagtagataaatttttatatgtagatgaaggaaaaggttttgcatttatgtttcatatgaactgttatagctcgtgttgttatctggaatcataagctgattcagattcttatagatgtattttgtatcagaaaatttctacgaaagatggctgagtttttctctgtgttagtttcttaccttgcgctgttttatgttgtttcgagtttgtcttttattgttttgtttgcctaaaacctttgtcatgtcttttgtagatttaaagatgaaccacaagttacaaagtatgtaaagatcgcagcaactctaccagataaaagtgtacgggatgtagcaatgagatgtaaatggatgacggtaagttcccaatgcattgtcattaagtttcataagtggcttgcagacttcttattagttgttattcaaagagatcttggtaacgtcatttagcttgggagatgaaaaaaggaggaaaaacatagtgacgctactttgggtgtatgctttgttaaagataaagtcctatgggaaaagttcttttatatttttttggctataaggtaggcttaaagttctattgctatattgatgaaaagacaccttaccatatcataaaggttgtttaaagtatggttaagagtgtgcaaggagagtaataacaagtattgctgacgatagatctggctttctgttagctctggagtcatgttggaacttgatttgaccctaaagcttgatttgatttctgtagttaccctgaaactaatatcgccaaacgagtgatgtcagatagccttgggcttttttcgactttctgaagtttattttgatatgttactttttatgaaggataagatttctatgagcgatggttaaacattggttatatcctctgcagtatggcctacactgtagtgttaagattcatataataaatgggggaaaaaagttgacagattatagtgccaaatattaccttattggcttatccatactatctatcctgtcatattttttttatgaagttgggctgaagaaatagatagattttttatgacttgagttgtacaagcagatatatgactcatacaaacataagtcttgacacggggcctttttaacattaataataactgccagtttgctatctaatatctttcaactatttaaattcatgacttttgagtttgtctgggctaagattgaaatcctttttttcagcaaaagcgaagaaaaggggaagaacatagtactggcacgaaggttagttatagaaaggtatgtaatgttagtaaataaccagataacggttggtggcctaggttatagttcgctttacaagaggttattggctacaaatggttttttgttcaaaacagctacaaatttgttctccttgagatacccaacacacaagtaactgatttctccttgatttaggtagtggatttacccccaaaactgaacatgttctcaactgagccacaacaaaatgctacatatgccatgaaccatatgtgccagagtgcacgcatgccttttgaaggttagtactatttgggtaacaccgtaacagtattgtcggtattatttccttccctctcctgcaaaggttgtaactgtaaagaaagattattttagaaagacaaactgcatcttgtttgaaatctcaatcaaatgtactaggcaatttgttgttcatcttgttcatgcctgaatataggcattatcgatgttggagagttcctggactctctcagttattgtctcatctccttagttgtgccaagaaaactcaatcttgttagcttgatacctttttctcacctgtcacatttttacggtctcatatatattttccaaacttttattctcctaggtctaagtgatgcggttatggagcgtctacggcagaatgctcaagctttcagtcaaatctcctcaaacctttctgtgtgcaaggtaattgatttgtatctgatccaaatgctagctggtagaaaaagattgcattagcagaaaattgactttaaaaagatcgtagaatgtatttttcacatgcacaatgttttattcaatgcaacttattgtttggttgggatacatgctgttgtcctttcgtaatggaattcccatcctgacatcctattttctgcatacagccacaggataacgtcagtctgttttatatggcaagaaataacatcagtgccatcttgaatgagtatgtggatctaatagcatggttgaatcactaatgatacatttcctctgttgtccttcaccttctcgtctatgaaagcttgatttactatactctttacttattattactgcagcatgaaggagatgcctgggatcatcagccggatgccgcctctgcctgtctcaattaacaatgatcttgcaagcagtttagtgacaagtgccacacaggtaagcaatcttgcattttctctgaacgtggatattcctgaatatgtaagggattaaaaacctcaaatgcttcccttaccaaatttgcctctgtttcatgaaaaaatgtctaatcgcttcaaatcataggacttccataacccctaaaaatcggcttctagtattttagggaactatgatcttgtacaagaacattgctttaaatctggtgaatgatggaaacacaatgtttgatggtaaaatataattttttatctgtctgtctctcagccgagatcttataccattccctcgagcatctatctgaagcaggagccaagaaactgatgggggaggaaactggattttgaccaatgctaaaggaactagcacaagaaacctctggtaaatggcagctgttcaccgtgacccacatgaaagatgatggttttgtcaactgctaaacctcttgcaaaacacaggattgaagaagatgggatcttgtggaaccctttgtgctgtcggctaatattaacaatgaaccgcaggctagccaaaaaccccttttacaaatcctttcacgtctccataactgattatttttccgttgccaaaatgctttggcggtcaatccaagatatgaattcgttgcacagatccatgttaaaagttggttgtatagattagctgtttctgtaaggttttaaatgagagttactttaaagtttgtatcaagaacacatctttgtaaggtttggttttcagaggcattttcattcttcaaatcttatcttcaaatcagctaccatatggtatggctcctctttttccatgtattaaatttttctaaatggttgaaaaggtgatgttttagatttagaggttggtcgcagtatatgaaatgcatagaaaattatacattgaacactctgaacatcaacacaaactcttacatattatttttgtgggcttacacaagcccttagcatattaattttagtaggtttagctagagaaactctcatgcggttttaagtggctttccaggaagacaacggtggagtgttggagttcttgaaggtggacattgaggccatgtatctttctcctttcacagactctggtttggcaagggagtcgagctcagatatttcttcaggagtgagttttactgacaaagctctaatgttctggttgaggttttcaatcttagtggttcctggaatggggcaaacatcatctccctggtgatgaacccatgctaaggctagttgtgctggagtgcaccctttcttctcagccattgcagaaactttctcaaagagaatcttgttgtggtctacgttttcttgttggaatcttggtagagtctgcaataaagaaacacaaattagtacagtatattaatcatgtgttttaatgcaaataacagtagttgcctttctgaagtcatcgttttccagattctcagcaagtttgggtcctgctgctaagaagcctcttcctagagggctataagctacgattccaatcccaagttccctggtgaagcataaacgaaatgttaaccaaacatgtaaacaaagaggaaagttatatctgattttgattcttcacacctgcagataggaatgatatcttcttccgcgtctctcgaccataaggaccattctatttgcaccgcagttatcgggtgaacagcatgtgctcttctgatagttgaagctgaagcttctgacagaccaatatactttatcttaccctcttcaactagcttcttcagttctctcatcttggaattcagagacaaagaatcattttcagagccaacttggaaacattgaaaccatgacatgaagcaggattgtggaggaggcttacagtgatttcgatagggacacgagtatcgattcgatgctgataataaagatcaatgcaggcaatatctagcctctttaaactagcctcacacgctgcccttacatactcaggatctcctcttacctcagaaatttccccctctactataaagaatccaaatttggtcgcaagctccactttctccttcaccccatctttcagagcctgacaagaaaatgaattgcaacaaactttctcatacaaaatcttgttgtggtctaagttagtaccatagaatcaagaaacagaacaaactaaagtatcttgatcactctttcgaacaaaacaagataaactcgaacctttccgaggagcaactcgttggtttcaggaccatacatgtcagaggtgtcaaagaaagtaacaccggagttaatagcatggtggaggagagcgatggcgtcagtttccggcttgggagcaccgtatcgagcggagagggccatgcagccaaggccttgcgcagatacctcaaggccttggcttcctagcttcatcctcctaactctgcaagcttcagccatggattttatgtcacaactcgctttctctctttctctcttttgtagagtttagaactgagtggagtagttgttgaagttgggttgatgagtggtgtgattaaaaaaactctcaaattgcctatgtcttttacaaaagtgcttttacaaaatatctttcttacatgagatttaaccaaaaacaaaaaactacgtacgtgtttaagtgatatttcttcaaagatgtgtcatcaatttgtgttcagtagtcttcacgtaatcgatatttgttttctttcatggtcttgagtcaatgagtaatgtcgatcttcttgagtaggcaaggtttgtcttattaggtagtgtttggtcttcatgtttctatctacaatttgtgtcacctatagtttgtctcattggaagcttgtaggcaggttccagatcattggctctaactaatggtaaaatgttcaaatatgatgggaggactcatcattggcattagccattaggtgcctaaactctaaacctaagtcagctgggacgcttaactcatgctgatggcgataggtcactaagactatacagagaatggtcaccgtatatataagatgggtagaagaaaataacatattctatacataaatcatcctttggccagagaaactctcagacagttttacacagcattccaagaagacaatggtggagtgtcggagtttttgaaggttggcactgtggccatgtatctttctcctttcacagactctggttgggcaatggtctcaagctcagacatctcttcaggagtgagtttcactgataaagctctaatgttctggttgaggttttcaatcttagtggttcctggaatgggacaaacatcatctccctggtggtgaacccaagcgagggctagttgtgcgggagtgcaccctttcttctcagacattgcagaaactttctcatagagaatcttgttgtgatccaagttttcctgttggaatcttggtagagcctgcaataattgagtttatatataaaatcatttgatttatccacaggttatgtaaggttcatcaatcaaacaagtcatccaaaaagcctctgcacttgcctttctgaagtcattattgtctaggttctcaacaagcttaggtcctgatgcaaagaaacctcttcctagaggactgtaagaaacaatcccaattccaagttccctgaagaaaggaagacaagacgttacataattgatggatttatgcatcatgaaaggatgatgaaatctgcatacctgcaggttgggacaatttcttcttccacgtctcttgtccacaaggaccactctaactgcacggcggtgattgggtgaacagtatgcgctcttctgatagttgaggcagaggcctcagacaaacctatgtactttattttaccctcttcaattagcttcttcagttctcccatcttggtattgacaatcaaaataaatggtttaagtttagcaaaaggtgccagctttctataaaggtcaggaagtgtaagcgaactagagagcttagaaccaacccttaaggagtctagtcaaatgaaaaatcattaggggagatgataaaaaaccacactggaaggaaaagtaactaagtaagcatcccacatcagagagaggaaacaatagtaaatggcttatactaaatatcatttcatcagaaattggttctatatgaataagttagcactttctgaaagaaacctacgcagaaaccaaacatataccaagccaaagatgtgaagctcactgagataaactcaagcacacttgaagtactaaagtatgtaacttccctttcatctgaaagtaaaaatgcttacagtgatttcaataggaacacgagtatcaatccgatgctgataatacagatcaatgcaggtaacatctagtctctttaaactagcctcacaggcagctctaacataagcaggatctcccttaatctctctgtttccctctgcataactgattccaaatttggtcgcaagctccactttctccctcacaccatccttaagagcctaacagcattcaaaatttcaataatgattgatcaatcattcccatctctaagttttcccaacagagaacgaattcaaatttgttggacaatttcttcgaaatttaaccatctaaaagcggaaaggtcagatggcagattggggaatttcgaaaatagaacctttccgaggagaatttcattggtttcaggaccatacatgtcagaagtgtcaaggaaagtaacaccggagtgaatagcgtggtggatgagagcgatggcttcagtttccggcttggaagcaccgtaatgaccggtgagtcccatgcaaccaaggccttgcgccgatacctctaggccttgacttcctagctttatcctcctcactctgcaagattccgccatggatttctctcacacaaatctctctctctatctctcgtgtatcaatggcgagttttgaattggagtggtcgagtggagtggtttaatttgacagatgagtgatgatgatgattgaacaaaaaagccaataggtggcgcagttttaattttaacgctcaaatcctggtttgactaaaccatcacttttaaaccgaaaaatatcaattacgttttaattaaaccgaaaataagataatcgatgggatcattcatccattggtattaggtgtttaaactcctaaccctaagccaggtgggacatttaaatcatgcggatgggtcactaagactatgaagagagtggtatagctaaaggtattcacagaatctattcacaccatctgaatttattgtcgtcctcgctcttcctccgtgtgttgttcttcaagaattgtcccactgcttctttgttaatcttgaacacaaaggttattcctctaatctgcaaaatttgggcggttctagttatagatagaaagatgcagaaacacacttgtacaaagcataagctggtgcttacattgattgaactacacgatgtgagggttacaatctggcctctatcgagttttccgccatttacaaggatatgttgctttccaaggttctttagagagaatgatccgtagttctctagcttaaccaatgccttgttcaaaacatggagacagaaaagtatagcacattagcaactaattagcaaggaggtaaactaaatttaatttgggaaaggggaagaggatcacctgacgccgagatatcttgctcccataattatatttacccaagtcaatgtcaacattcaggccaccagatgatctcccaataattacctatgacaaataaatgatcatctgccatgtaactaagaggatttgatatgacatgaaaacatccaggcagaagaaaatgatttttcttaacatacctcgcgttttctgacaaaatgctttgaatcaggacaatgcaggacggcaattgccccatgaaacataattgctctttgcattgaagttcttgtgcattgttccaatccaattaatgcatgtcttgggtgcttagacatgttccattctaggtatcaggaagcgaaccatagttgagacaaccatagtttgagagagacataactattttttagcatgcaacagtgtgaactagttacatgattggttgaaaatcaacagccatatggcttaccttccctgttgaagcatgaatctgaatcatctgggactagattcaatttgcggatctggagatattttcatgtgatatctatcagaaatcagaaaaacacattgaatgataatgtgcgtaaagagtaatcagggtttaccattgcatcaatgtcaatctcttcttcaccatccacttcttcctgatatagagttgatgggggttgagaaagttctgcgtccctatcctcagaggtagtagcatttgcatataattgttcatccaaagaagtacaagcacctgagctatcttccattagaggtaagtttctgagtgcagctatagagcaacaaactgaccatggccttctaggtctttcaagagtttttgttaaaggtattggagagatttcaagaccaatattatcctcatgaacgttgtattcatttatacatctgtcgatctgatgacgtgaacacgtttctagcaataagctttcgcagccattaggaggaacaatgctgatcggtattggttcatcgtctttattccacagtctatgatcatcattgatgcacattatctccatagacccctgcatgttgatttcatctccacatctaacttcaattgcagatgatttgtcgccatcattcttgaaaatatcagaattgcttgggacacctgaatcttctttagaccttacatcattcttctcgttatgagtttctgaagaccacttactaaccagagttccatcatcctcactggaccatatagacaaagatttcgatccggttatcaaatcattgtcttcaggaacatgctctgatataacatcaaactctgaagattcagatatgtctgtgtcactgccacttgcgtctacaattgaaccctcatccagaggatcataaggattatccataagatttttaaaccagaaatcactttcaggtctcagacaatttcgtatatcctcatcaccatcaccaatatctgcattattatctaaatccggaaacatatcatcatcaacagacttgtgcctacatgttctctttctcatgacagagaatagactttcaactttccttttgacattggaactctctgatgtatcttcttcaccagaaattttgacatcaccaccctgtcatgtgacaaaagactaaaatcagaaaaaggcttgtgcaaattgctccattgagaactaaaaatctgggatctaatgcaaatagtgggcaaaaaaaaagccatttcaaccatggagattcttaagctacttaagaggatcgatcatttagtgtaagtgtagcagataaaaacgcgaaattcatgaaatgagatgatcacgtcatttcctttatatatggttcaatgtctgcaatactgatgagaaagatatatagatgaatagagagagacgcacgaagagatccttattgacgaagagatgctcagatactcgaagaccttcttccattttcacatttagttgaggaattgaacgacccaactcggttccaagcaacggtggtgactgtttctgcccaaaatttatcgaagagaagagctgagactgcaatcagctgagtgaagttgggttgatgaagatgaacacacacaaaaaaacacaattgggtcgcttaaccgtgttggaccaaaaataacactcgaatcctggtttaagtcctaaacaaaaccgaaaataacataatgaatgattttaccatttgaaactctagaattggtaaagaatcgaaagatgatcagaagttattagttgaatctgatagagaagaagctgaattgagtagaagtttatagaggacaagctggttatcaccattgagactctgaattggtaagagaagcacaagttattgagtagaagatgaattttacaatatagatagccttttttggtaaggtatgtatcacaacactttatttatagagtttggttacaatgtatggaaatgtaaaattgaagttttcacttggggaactctacattatttattcttcaaggcattaaccatgatacttgggtttccgtgggaatgatactctactctcgaagacgcaccattattccccaacacactgatctagctgacagaaagttaagaccacttcaatgtcatgatgcaccaccacaaccgtagaaacttcagccggttttaagcggctttccaagcagacaatggtggtgtctcagcgttcttgaaagttggtatcatgttactgtatctatctcctttcacaaaacctggttgggcaatggcctcaagctcagtcatctcttcaggagtgagtttcactgacaaagctccaatgttctgtttgaggttctcgatcttagtggttcctgggatagggcaaacgtcatctccctggtgatgaacccatgccagggctagttgtccaggagtgcaccctttcttctccgatattgcacaaactttttcataaacaatcttgttgtggtctaagttttcctcttggaatcttggtagagcctgcaataagtgggtttatataaagccatttgattaatccacagcttatctaaggctcatcagcaaacaagtcaaacaaagccaatgtacttgcctttctgaagtcatccttttctaggttctcaacaagcttgggtccagatgcgaagaaacctcgtcctagaggactgtaagcaacaatcccaatcccaagttccctgaagaaggaaagagaatttgaagttacatgatcgacagatattgcaccaagaaaatcggatgacatctgaatacatacctgcaggtcggaatgatttcttcttccacatctctcgtccacaaggaccattctatctgcacggcagtaattgggtgaacagcatgtgctcttctgatagttgaggcagaggcttcagacaaaccaatgtactttattttaccctcttcaaccagcttcttcagttctcccatcttggaattgacagacaaaaaaatggtttagtgcagcaaaagatgccatctttaaataaaggtcaggaagtagagttcagaaccagagtctattcaaacgatttcattagaaagttatcaaaaccattaagtaggaatggcaagagggctaagggcttacagtgatttcgatagggacacgagtatcgacacgatgctgataatagagatcgatgcaggcaatatctagcctctttaaacttgcctcacaagcagcccttacatattcaggatctcctctgacctctcttttcccctctgcataactgattccaaatttggtcgcaagttccactttttctctcaccccatccttgagagcctgacaaaaatccaaacttcttcaacatccaaatcatttctacagctatgaagctagaagaatcaaagggcaactcccatctctaaatcgttctttgttccccaaaagagaaaaaacattgaaaatcaaccatcttagcgggaatctaataaaaccgaagatctggaataatcaaaatcgaacctttccgaggagaacttcattggtctcagggccgtagatatcggaggtgtcaaggagagtaacgccggagtgaatagcgtggtggatgagagcgatggcttcattttccggcttgggagcaccgtagaaagcggagaggcccatgcaaccaaggccttgcgcagatacctcaaggccttggcttcccagcttcatccttctcactccgcaagcttccgccatgaatctctctgtcacaactatctctgtctcttcacttctctatgaggtgactcttgtagagctatgaattttttagtggagttgttgttgttggtggtgatggtgtgaatgtgatgatgaagaaaaagccgtgtggtcgcttttgtctggttggtacatgtctcacttgtgatttggtcgggggaaaaaataaaataataataaataacatgtctcacttgtgagaaactataaacctccaaaaaaaaaaaattcaagaacgaaagagaaggaaccgatacaattagtcgcacatatccttcatagagttgggtgacgatatagatagtcttttttgacgatatagagttgggttatttaagtttgtatcagtagtctaaacatcttagaagcaggtctttttgggatgtggctccttccccatcagatccttggtcttggcgtatgctcttgttccttagacctttggcggagcaatttgttaaatgcaacttgggtaatggccgcatagctcacttctggcatgacagttggacttcccttggcccgctgataaaggttatgggtgattatggctccagatcacttcgcatccctcttaacgctagggtggttgaggctcttggggttaatggctggaagctccccctttctcggtctgctccagctcaagccatccatgaccacatctctaccatcacgaccccctctcctgctacaattgaagactcctttgattgggttgttggtggtgttgtttgtcaaggtttctcttcggcaaggacttgggatgctattagaccaagagcaccggaattggactgggcaaaggctgtttggttcaagggtgctgttcctaagcatgccttcaacatgtggattagtcagttggatagactcccaactcgtcaaaggctagcctcttggggccatatccagtctttcgattgttgcttatgcactattgagactgaatccagagaccatctccttttttcctgtgaatttgcggctcaagtttggagattagcgttttctcgcttatgtccgcgtcagaggctgttttgctcttgggcagagctcctctcttggatgcgttcttcctcttcttcggcgccttccctcctcagaaaagtctcagcccatgctatcatctacaacatttggcgtcagcgcaacaatgtcctccataacaatcttaggatcgctcctattatcatcttcaagattgtcgaccgcgagattcgtaacatcatctcctctcgttaccacagaaagagatggcgcaacctcatggtgctttggattcgctaaccttatatcttccctaaatctctattgtagccttgttttattttttgcctcggctactcttgtataggcctttcgtttttgtaaaagcctcttattcatataatgaaaattaacatttttagcaaaaaaaaagtctaaacataactttctttatagagtttggtcaaaatgtatgaaatgtaaattgaagttctcacttggggaactctatacattatttactcttaaaggcatcaacccttgatagttttggctttccctgggaatgaacctaccataatccactctcgaagacacagcacttttattaccttgatctagctgacataacttagaccacttaaatgacatgaaccccacaacaatcagagaaactcagacgattttaagcggctttccaagaagacaatggtggagtctcagagtttttgaacgtggtcaggatgctaatggatctttctcctttcacaaaacctggttgtgcaagggattcgagctcagacatctcttcgggagtaagtttcactgataaagctccaatgttctggttgaggttttcaatcttagtggttcctgggatggggcaaacatcatctccctggtgatgaacccatgcaagggctagttgtgcaggagtgcatcctttcttctcagacattgcagaaaccttctcaaagagaatcttgttgtggtctaagttttcctgttggaatcttggtagagtctgcgataagaaacagaattgaacagataaacagtgagttgattaccaacagttcatcaatcaaacaagtcatataaagcctgtgtacttgcctttctgacgtcattattgtctaggttctcaacaagcttgggtcctgaagcaaagaaacctcgtcccagaggactgtaagcaacaattccaatcccaagttccctgaagaaagagagagaagatgttacatatttaatagatagtgcatcaagaatgaggatgaaatgaaatctggttacctgcaggttggaattatatcttcttccacgtctctcgaccataaggaccattctatttgcagagcggttatcgggtgaacagcatgtgctcttctgatagttgaagctgaagcttcagacaaaccgatatactttattttaccttcttcaactagcttcttcagctctccaatctttgaaattgacagacaaaagagattgtcaagttcagctaaagttgctggctttcaatataggtcatgaagtgtgagctcagagtcaaacctaaaggagtctattcaaacgaaaaattctaagggagatgataagatcatttcaccagacaatggttcttcatgaataagctagtaatttcagaaagagtgacccaagcagaaaacatagttctgaaagctaaactcttcgactctatattagtcccaacatgtctctagccacatgtgtgaagctcactgagaagtgagaggaactatataacttccatttcatttgaaagttgcaaaaccatgaaggaagattgacaagaagagtgcttacagtgatttcgatagggacacgagtatcaattcgatgctgataatagagatcaatgcaggcaacatctactcgcattaaactagcctcacacgcagctcttacataagcaggatctcccttaaactctactttcccctctgcatacctgattccatatttggtcgcaagttccactttttctctcaccccatccttgagagcctgacaaaaatccaaactttcaacaaaaatccaaactttcaacatccaaatcatttatacagctctgaagctcagcgaatcaaggccagtgttcccatatcacaaggccagtgttcccatatctaaatcacgaactcaaatattaaaaaatatcaatatcaaaaggggaattatcaaaatcgaaccttgctgaggagaagctcgttggtctcaggaccgtagatatcggaggtgtcaaggaaagtgacgccggagtgaatggcgtggtggatgagagcgatagcttcggtttccggcttgggagtaccgtagaaagcagagagacccatgcaaccaagaccttgcgccgatacctcaaggccttggcttcctagcttaatccttctcactccgcaagcttccgccatgagtctctgtcagaagtcagaactatctctctctcttgacttgtctaggtgactcttatagagctgtgaatttaaatggagttggattggtgtgatggtgaagataaattcagtgtcaattttggatggctggtgcagttttttttttccctcttaacgaaaacaaaattgaatttgttaaccaaataaagtaatggaatcttcataagtcaaactcatttttgatgtagttaaccaaataatgtcttcactttctttctcaatcaattattaacttcttgtgagaaataaactttcctaataatttgttcacgtataaatgtttttttaggttgaaaatttgaagtacaattttctcttattagtttttgttttcaagatatatctttgaattaatattatataaaaacgcagcatgtagtagtataacattttgatcttgaaaataaaaaaatatcaatttcaaagtcttgaaaataaccttttttttttttggctatgagtcttgtgaagttaacttggtgaactctcgactcacgatgcatatcttaattgagcaacatgattcataattcatcttttcatgtctcttgccaacttccaatagagtgcattgacattatttttttaatacattatacatatatcatgcatgtttgtttctcatccatggagaatcatttttgaaatttttggatttttgaaattgcttaaaaagaaagaaaaaaactcaatttttattgtcatacaatgttttccaaaatatgtgtacatgttcttgcatatgagttaattagtgagggtttcctcaaaaagattgttgtatttttggaaaacaaagtttatttttggatattggttctgcattttacatctaatttgttttttaaatcataattttagaaaatctattactaaattaagaaatctatgaatggtttacttcattccgtaaaacactataaattgtcctaaactcatattcgctctcaagtcaaaactcttctattttcccctgtcttcatatccaacagagatctcttcatggctccaattactgtcggcgatgttgtaccagacggaactatctctttcttcgatgaaaatgatcagcttcagaccgtctctgttcactctatcgccgccggtaaaaaagtcattctctttggtgttcctggtgctttcactcccacatgcaggtacaaagtttcaaacgctttttcagatttatcctttgatgctaagctgatggattcttagattttgatttgagaattggcgtttttggtttttctgaggttagcatgagccatgtgcctggattcattgggaaagcagaggagctgaagtcaaagggtatcgatgagatcatttgctttagtggtaagtatgaatattgatatgttttggatctctactctattcttgcctctatgagtttgtgtatagtgaccaaaaaatgttgaatgcatttgttgcagtgaatgatccatttgtgatgaaggcatggggaaagacataccaagagaacaagcatgtgaagtttgtagcagatgggtctggagaatacacacatcttcttggacttgagcttgatctcaaggacaagggtcttggtattaggtcaaggagatttgctctgttgcttgataaccttaaggtaactgtagccaatgtcgaaaatggtggcgagttcacggtttccagcgcagaggatatccttaaggctctctaagaaacattatcattcgcttgttgtattgtgaatctaaaccgctgtatgtgaagaagagaattatatagcctgatttcaatcaacaagcaagtgtattgacttgcttggcataataaagtatttggttttaatgtttttctttgcgttgattcatgaaagatatgagtacttaaaatgagttgcaaccttatagaaatccacaataactggctcaaatagagatacgaacacagaaacgcaaagtcctcacaagtacctctttaatatagagtctttattaacaaacaaacacaaagtaaacttgctttgtacaaaacctttattctttctaaggcattattggctctttcttattgcaaactcgcacacctatatacttaacttatttcacacacacagagatacatcttcagcacaattttaccgcgatttggcgaatgcggtataccctcaaaacagtttccaaacatgtattttatcttgctttccaagaagacaatggtggagtctctgagtctttgtaagtaaccatgttgttgtcataccgttcacctttcacgaaatccggttgagcaatggcttcaagctcaaccatctcttcaggagtgagcttcacggataaagctccaatgttttggttgaggttttggatcttggaggttcctggaattggacatacatcatctccttgatggtgaacccacgctagagctagttgtgcaggagtgcaacttttctttgtcgccatcgcttggactttctcgtagagaatcttgttgttttctagattctcctgttggaatcttggtaaaccctgtgacagagtagtatcaagaagcatgagatgactccaaatcttgaaatatgctttaaagaactcatatacaatgtatgtatacggaaacagagaactgaatcaatcatgcacttggctttcgataatcatcttgctctagattctcaacaatcttggtccggatgctaagaagcctcttcctagagggctataagctacaattccaatcccaagttccctagagaattcaaaagagacttgttatgaattaaacatgttaacaaagacgaaacttatggctgattctgattcctcacacctgcaggttggaatgatatcttcttccacgtctctcgaccataaggaccattctatttgcacagcggttatcgggtgaacagcatgtgctcttcttatagttgaagccgaagcttctgacaaaccgatgtactttattttgccttcttcaactagcttcttcagctctccaatctttgaaaatagattcaatgaaaaccataagttcaacaacaactacaagataacaaattataaagcaacaagaatcagcacaagtaacagagtattgcatgcatatctctaactatccctagttggttctctatgagtaacatttaacacatattgaaacagattaaaagcaagaagccataccgtgatttcgatgggcagagtggtatcaattcgatgctggtaataaagatcaatgcaggttacaccaagacgctttaagcttgcttcacaagcaatccttacatactctggatctcccctgaaaccaaattttccatcttcagaagcagtgatcccaaactttgtcgctaattccactttatctctcaaaccatctttcaaagcctgccaccaaaaagaacacaaaaatgatacttggaatgaaccctaaaagcctaaaatcctaaaccctagatcacagcctaaaaccctaattccaaaaatcaaatccacgagcggtcatcagtcaccaaatttgttacctttccaagaagcagctcgtttgtctcgggaccgtagatgtcggaggtatcgagaaatgtgaccccagcgttgatggcgtgacggaggagagcgacggcgttagtctcaggtgtcggagcaccgtaaaagtcggagagacccatgcagccaagtccctgagccgaaacctcaagaccttgactccctaacttcatcctacgcacttgacaagcttcctctgccattgatgtatcaatctttagaagataaaaaaaaagaaatacaaagactatgtgtttttgtgaaatcagaaacagattcgagtgggatttataggagtggagttgagtggaagataaagcaattaatgatcaccgcctcgccattagtgacaatgttctagagtgttttttataattaagaggacaaaaacaaaattgtattcttcttcatttgttagtattacttcaaaattgttattatatgatcgaaaagaatatataagttctataaactttgacgtcgtcattgatgatttcatatcagcattcatcatttgatttccaaaacctttttagagtatttggaattttaaatttcgacctcttgcaagaagattctaaaaaagacattagttggaataacaattaataataatataaaatttgttgtttttatagaaaagtatacatctaagataacctcttgcaagaagattctaaaaagactgtagttggaataaccaattaataacagtataaaattcgttgttttttatagaatagtatacatctaagataactagataaggtgaatccgatcatcaaatgttttgctttttccaaatactaattaatattcaatcggatgaaagaaataaaaaatgatagtgtttgaaattaaccaaaactactacatgagttaagttgtttgaacagatgatatcttcaccataaaggctaatcaaacgaggtttagagatgttaaaagggataagttaggcttacttgatctgcaagtcatcatctttcaagaactttttctaaccattattcccttattaatatggttccccttaagaaaacaatatatgctgctgggtcatgtgtgtcgtatctcacatcctaaaatgggataacctcggaccacaatatgtctaagtgagactaacctaaacgacttgacgttgttatataggcttctcaattagtctcttatatatttcttgagttttcgtttttgtttatctctgatatatacattgttatatagcataggcttctcaatttgtttttaagagctgttacttatagagtaaaatcaatataaactaatatttaattatacagtaaaatctttataattttttttttgataaatttaataaatagtataaattagcaaaactccctattcccaaatcaggacaaagtagaaacgaacaaaaattgataaaataataagacaatatttttaaaataatatcaatgtaaatatatggtcccgtcaaataaaataaatttctaatcatgtaaagataatttttagtatgttttttatttaaatgaaattctattagatctcaccaataaattttcttatataagtaaaagttatgttgtgatttttaaactaggttattgttttatcgtctataatagtttcataaaaataatcaaaaatgtttgtcagtttttaaattttaaatatgcagattttcatttcaatagtcatacatgctgttcaaatacaataattgatgtcattattcacacaattttaaatttattgatatcgattgtatttgtgagttcatatattatctttgttatttattgcaaaaaaaaaaattctcctaaatattaatggttcaattctaaaacaacaaaatttataacatccaaaacacttaacaatgaaaacaaattctctataaattaacaaatattacaataaattaacagcccataagtctttttgggcttgtgtgcctcttgatctgtgcgccggctctgtttatatgtataaagtgttcagagagtagattctcctacaaataagttaaacctccaactaatcaatttataattaccaatgaaaaaaaatatcagaaaactcccattaccaataattaagacaccaacaaaaaggtttctatatttagaaggagaaatatgattagaagattacccgccatcattccttccaacttttttacgaaaatggcgagtcgcaacacaatccagatgtacctcacgactgttgtcgcaatcgtgatcctcctggcggcaagccaagccacggaagctcgtttcacgagcctatgcgctcaaaccgcatacccaaccttgtgtcgaccgctggtgaaagggccaaacccgagacgagccacacacagcacgatccgagccttggaggctaagacgaaattggcaattacagactctgcgagattcaagagcggaaatccaactgttgcaatttgctatgcgactcttgtggatgcatccttcaatcttaggagggcaaggactagcattaggaaaagaaatgttatgatgctaaaaatgtttttgaccgcggctgtgtcagattatggtgtttgtgtcaacgggttcatagattcacatcaagtcaacactcttcagaacgatgtagatgagctcaggaagatgggaactaactgcttgttgcttgctacattgataagatgatcgagcctatagaagaagaaaacactaaaactaattcctgtaaaactgaccagacgaagcttattcttaattatgtttatgtaaatgttcatttttagatttcagagggtgttcttggtcaacttcaatcgggtaaatgtaactataatagaaagttttagccatttccaaatttttccgagcccatgagttttttgtggtatctttttccccagaatttcttgacaaatcacttttaacggacttaacagaaaaacggctcttcgcagatttaattagtgcattttcgaacacaatacgcaaacatttgttcctcattaacaatgatgagcattatatcgtattcttgacactgtttctgtcttgaaccaaaataagatctccaaaaaaagggattacattgtgagagctgtctcaactgtaaatccaagctaaaccaaaaacaattcacaaaaacatgaacaaacagtctacggtgaaagtaaaacagacccatacaattgattttgccgattcagagcctatttttttattaccaataagagacagagctgtgagaatgcaagtgaccctatcacgactaatgatgtctttgtctgaagtgaataatgaaggagaaagagatggaacagacctcacacatcctgagatacttcatcgagtagcttctttgtcgcttcattaacctccacgttttccatcttcaggcgccgtcgcatagcagggtgactctttcccgctgctgcatatgttcttatcaatggttcaaatatttctgcgcctatgttgtctgttccattctttaaaatctccaacaaattctcagctccattaacatctttcttttgctcgaaatagctcatcaaagctctgactgtttcaggtgacggtagccacttgccaccatctcctttgccgatggagactgcctttgacatgcattcgagtgctcgagccatatcaccgctctttacatagtaatccatgaagatctcccatgttttagcattgagctttccacctcttctgggagctttctccttgagctcatttgctttctggattagaccctcttgagcataagctccaatcaacacattcacaatcctgatgtcataagtagaacagttagcttgccattccttgaacaatgtctctgcaccaggtaaatcattcaacttgaccagcacttgtatcatgtttagataagctacatttgaggttttcggaatagccagcctcaacgaacgccaaattctgtaaacttcagtcagcttccccagacgtccatacaaagtaataagaaactgatatgccgtaaaatcccgttgcgtgtttttcatctccagttcctgaagagccttctcagctttctgagacagtccagcatcaacatatatcgatgccatattgctatacgtagtccaatccggagcaactctaccatctctattcatctcttcaatgactctctcaacaccagaaatatcattagtagcagccaaagccctcatccagacattataagtgtacgaatccggcatcacattctccgccttcaattcttgaatcatcgccggaactttctcagtctcacctgtcttggtgtaaagagtcatgaggctgttataagacatggaactaggagtaatgttgagctctttcatcttattcagcaaaccttccgctttctctgtcaacaactccttgcagtaacagttcaaaagagacccatacgtgagttccgtcttagatgtttccggaagatcaacaaaataattctccccagcagtaatttcacgagctttagcaacaagatcaagatggattgcttgatcactcactgtcttgttcatacctctctcttccataacttcagatagctacaaaccaaaaaaacaactccacaatatgaaatctaaagacacaatcatcacacagtgaaaaaattattcaacaattactaaattgttcataatgagcatcaaaataccacttaagaatctacatttctatatgtattcaacagatttgaagcaaatgcttattgtgaagctaatcctagagaatcgaaaatgcaatttggatttatgaaaccttgagagctgggtaatagaggccgcgatttcggagtttcttgatcgtatcgccgacctcccatttgaagacgtgtttagtgcctttgaggaactgattaagctgctgtcgaactttgacctctgtaccaccatctttgaagaggcgattgtacagaggttcttcgatgtacttctttgtcgatctctttgtaacgtctctcgatcggctcaaatgtcgcatcgccattttctcgtcggagcagtaaacaacgacaacgagaaggttttttgagtaaaaccctaattcactgtcacttcccaagctcgaaacagaattggaggagaaagtatggtgattatgggctttttaatgggcctgacgattatttcatttcggcccatactatatcagttaaacaatatgagaaacaccaaaatatacgttctctctattgtaaggctctctcacctcactctattgaagcataatttgtttatgtagtttcattttgatcataactcgagagaaacctatgtaaacatagacgaatgccccaaaaaacaaaaccaaaacctcaacgtttaacaattttgatcgcagaacgaacacatagacagaaatgtagcagtctaaaggaaaataatgaaccatgtcgtgaaaggttacagagagcctcatgtaaaataaaatagaatcaccataaagacaaattcacaagaatatggcttctaaaacaaattaaaggaaaatttgatcagctaaaatgtttcaaaacgttttcttttccctctacttttgtcctgtttcgttttgcttctttgattcaggcaattccttgagggatgtgggaatcacaattgacatagacgatgaaactaaatgtgcattacacgagtcttagttcgtactcaccagccatggttatgtatctcacccatggaagtgcttggtacccactcttctcaataatctttaggtaccgaacctacacaccaaagaacatatatattatatatatgacattgtggaagagacagtaaccatttattattaagcacaagcttacctgaatccctgaaacagtgaaataagggatctcaaatttgacacggataggagcctttcgctcaggagttgcttcctctgcagtgatacttggaagatggaactctgcccttaacatgtactcctatattggttttctgaaggttagcattgatactacatagtctacattgctgactgtttcaactgaatttaagagtttattgaaccttgttagtgttataccttgttccccgggaaagatttgattttccagactaacgcatctttttcaggagcataagaggcagaccctagagatgtcctaacggtggggttagatgcatcggttggtacaggcaactcaatctcaacgttcgttgcggtgctacaaaaagaatgttcgtgatcaaaggtttaaagaatctgatcaatcaggatctttgcatgacagtaagacagaaaaggaaagtggcacaaataccatagaatatatttaccttcgttccttgaactgacttctagcttttatgagcatctcaacacgacttcttgaatgactttctatttgtgcttccacccatataagtggctttacctgaacataaaagaaacaaatcatgatatttacttgttgaagacgtggaacaattccagtagatgctatatcccacatgtcaaacctgagtgctgagtctatatgtcatcagatcaaaagccccatcaggtggtatgaaagatatcgtcctatcgttttcaaaacgggccaatcgaacacacctgcattaaataaatggttgttgaagaagagaatacataaaactcaagtatataatctttttgaacaaaaagaaaatagaagggttaagatcagtgaagactttccaagtttcaatataataaaaacttaaagacgtactgatgaaatttgatgtcctccaaatcaatggcttttcccttagttgctcgtccctgcgcttccagcaatactctatcattcagtcctaacttacactctggcattccactgcaatagaatggatcaaagagcaaaatagtcaaaaagggacgtgatttaacatgctttggctgattaggaactatatcgtaaatttgatgtgttgacatacgtcaagtaagttcgcatcttcagcgctccaacaacatcagacctgacaatttgcccattactgttgacaagaatatttacattctcaataacatccaagaaaacctggaaaaagaagcaggttgtcattatttgcaaaccgaaacatcagaaacatattcctatcttgcgaaaacaatggcactcacttcattcttcttgtactgtattccctcactcctccaggagacagcattcgtcacagccattggaggtctctgtgtaacttccattctatatgcatcagtcttgatgaattcactgagaattcttgcttcggtatactgagggtaaccaaagtccatcatctcgtcaagtagctcatactgccagcaccaaaaaatcaatttcagcatctaacaatgacaaatacttttccaaaattttaaggatctttttgattgcccaagtaatagaaaaatatattgcgaaatagtactaaaagagcgatgacagaagcttaacataccactaccacaaagttatccctcaatgattcctcttctaactcctcgaagtaatgcttgaaaacctataaccagataacagataccattgccattacatcaaatatccaggaaaaagatggaaccttaagagaaaaactaaagaattgaccagccatacttacatcgacaacgcggtgaagaaagaagagaagactggcagcattacaattctgcctggatgctatcatcaagtatacattactatgttgtacaaacatataagtcaccccattatcgtaagcaactggatcatttgactgtgaatcaccctgaacaattaaacaaaacgatgattactctgatttaaaccagaatgcttcaaaagtacagattcaaatcaaattctaatccaaaacatttaaccaatgatcaaacttgttcattacttccaaaaaatttcagcggcatcagatcacaaagactgatacgaatccattatcttcaaaattcatttccagtgcagatgaaaatggacacgaatccattatcttcgaaatgtttcaattccaattgacgaatctttcaaacacaaatctacaagttcgttcgctaactctatgtttctctgaaaattctacagtaaccaagcaataaacaaagaccaattagcgataagaggaagatcagaacaacctctttctcgatgagcttagtgaagaatcgctcggcttgagcagcggagacatcgccacgataatcacgccagacgagaacgcgtcccttgatatcaagcagaaacagcgcggaggcagctcctgccatgttcttccctaagagtttcgatcagatccaaatggggatgattaatcagcgagatctgatgaaattatggttctatagaggaagaagtagcaacaacatctagatggagattgacgcagatctgcagctcagattctccatttcgcaattttttttttttttctggcgatctgatgatttcgttatcgatccttgtggttggattaaaaaaaaaaacggaagaatttaagaaaataataatattcagaagcaaagagctctgcctttcacccagacggtatcgttttactttttccgtcaaatttaataccatcgaaagtagaaggagagtcaatgaagaaagtcatcattgaagaagaaaggcccattggatcattacataaagtcaggcccatataggttgggtttcgtaggttaaaattattaggttaacgacgaattagtataaaaataggtttgtaatgaatcaaggatagaagtaaaacctaaaatcgaacatatgcgtttttcacaaaaactttaggggaatctagggtttgtgtagtgtcaccaccatgaaatcgtgaggactatcaagtataaactagaaaactgtcatggggtatgatcgaatgtttgtgtactcatttttcgtggatatgaagatatgcaacatttgatcattctccatgatagtattctagttcgatatataaaatttcaatagaacactgcaacatgaagtgttttgtatacttagcttgattgctagcatatttacgtatattacctcctatgtgttgatgttcacacgacaacacaatttcactggtaccaatcattccaacaaattataactcggtctcagggattgtatattttgttggattgattggtaacatgaaattttgaatttttgaatttttgatgttaccggtgtgagtgtatactttgttggattgattagtacgattgcatactttgttggattgattggtacacaataaaagcgtttgaaagtaatagattttaaacctttctaaaccatgtagtgaacttgaagcttattcaagcagtttattactttcaaacttgatattttgttacatagctagtttggctcttaagttctcatcataaagattatgggatcttaatgaagacgtaatagcccttatcttttcacatgttttgagtatttgtcaattatatatgcgtcctcttgttctgtgactatcttagtcttttataaatactatatatatatgcgtcctcttgttctgtgattcataggacaatggtaatgcaagactcggaacttaactaatattgtgatcgccttattgatcttctccctataccgctatacgtagtgaaattaatagtttgtaatgtagaatgctaataagatagaagtgtactttttggcaagacactaattataatgactaatttatcaaacataagaggaaaaaatcagagatatgttacttcatagtttacaaatgaatcatgggcaataagtcttgaacttaactaatatagtgttagttacgttaagtgatgatgaacttgtcttgaagtacatcatagtcaacatacgtattagagatagttacatttggtttacattattggttaactttattggtttacattattggttaactttaactaataatgtaaaccaaatgtaaccatctctaataatacgtacaattctatttattttgtacgctcaagaaagaccagatcaattaaccgcaatacaaagatccgattgactatcgcaaaaatgcatatatgacgggaacactacatatagtagagacacaaattcattatgtggatatagacattatgttaaaaattggagtctttaatcaaacactaataatatcgtttacaaatttctagagagtacaaaaaaaaaaaatcttctttatcatattttcgcagtattaatctttggtatatttagatgcaacttctacggtaagaattcgtcaaccattgaagcaaagaagaagaatgagattaaagaaaaatggggttaaagtcaaacgtataatatggtcaacaaatagagacgacattgaccaaaaagattcaaaactttgaaactagactctcatctcgttacttcattcattacttgcactgaaaaaaatagtatataaaaaagggttagaatataaaaattaatcaaaagtaataagtgcaaaataaattcatatatcttagagtcacgcgtttcctcgggttccctattgttcattaaaaacctatttgagtcttttgaatattcactcactctaacacacattcttcatttcttcaatgatcacacacacattcttgagttttccctcaattaattttagtaaaatttgtttctagtttctagaatccttggctttagactggttgtaacattacagatataaaatgtatgaaatgtttcgatatgaaatgttatcaatccgtatttataatacataattggtatttaagttacttcggggtctatactactatatatgatagagattaattatgaaaaaaatgaagatggttccagaatttatgtgcatgaaggttttatttgcagtgtccaaacaaaatacttgtagagaaaccatattttaatcacctaacttcgaccaatataaaacggattatcgtaatcattagttagggcactttttagttgactacgatcgatatcttttgcaccaccctttaaaaactatagcacctttcagtttgtatgactaaaacaaaaactattggcatcaccactaaattatgtatcaaaaaataacttaagaacgtatatcaaaataagttgttccatttagggtacataatactgtatttctttcacattaaacatatgctttaaataccatgattacattctttatgcttgagaaaagaaacaaaaaaggatattctctcacatttaataaaagatacaatgtacactcaatgtcactatctcttcgttacgttcttttaatgtaaccaaggaaataaatactaagatacgaattttcgaaaaaaaaaattcgtggaaaaaataactgaactgaatcgacatcgaacgatcgattgtcttgaagtcactgttgactataagaccaatccccttctctgaatcacatgtttcattctcttcacattctctctcgttccaaacaagtcttactttaacaacaacctaatcttttactctttcattctccatttccttcatttacatcaaaaaaaattcttgtttctctcttaacttcatacgataacttatgggattttccggcaagacttaccaccagtttgacagaaaatttagcgaaactaccgaagggaagaaatgcgtcatcaccggaatctccttacattctacggtgaagccgattagcctctcttcctctgccgtatccaacacggaagacgaagatctctgtccaacgactccaacagcggattccgttagaataccgacggtaattccgtgtcctccggcgcctaagaaacggaaactgacattgaaggttagctacggccctagagagttcttttcgccaccagatctcgagaccgtcttcatatacagaactacttgattttgaatttttgattaattatatatagagatcacttatatataatctctactctctctaacctgttttggtttacttcaaaaaaatagtttcttaaatttctaaatgagttcttccttactttagcttctttattctgaagtgtcttaacattaaaatggttgtcaaaaaaagatacaattactaagtatctatcttttagtttttgtttcttattttttattttcttttgattttaccataagctattattctattttttccaacaaattgtaagtactcgtccctgttccaagataatatctaaatcgttgaaaactgtaagatggttaaaagaaactttgtttactttagtcttctgtcttcatgattctgtcatcatgattcaattttactccgaatgtttgtctaccagtgaagttttgttagtagaagactcaactatgaagattttgacataactagttccatcatgatcgaaatcatcgaatcattgcaccataggtcaaaatagagtagtttgataatctctcatcgactatatacaagttggagaacctagtccagtatatatatctattaataacacagaaattttactatcgccaatttatatttaacaaaaactcatgattaatatatagggggactgacacaaatgacactaaaaaactttattattccaaaaatggcgcattcttttgaaatttccaaaactaaaaacatataaaatttaaatcctctataaactaattaaataataatgttttttttattaccatttgtatcaatctccccccccccccaaataaaaatgagagcaaacactaatctaatattaaattgaatcataaaacttttaaatagtggaaatatattccttaaattggaaataaaaaaaaccaaatataatactacaaactaattttaaaatgaaaagtctcttttaaatggtgaaaatataaaccctaaattggaaataggaaacccaaatataatagcataaactaatattaaaatgaatcaaaatttcttttaaatagttgaaatatatactctaaattggaaatagagaacccaaatataatattttaaatttatttctaatttattttggttgaatagattttatataaaagtggtattattattgtccataaaacttgttttagtgttacttttaggaatttctcaaataattatttgaatgctatttttgtctaaaaaactttttaatgctatttttgtccaaaaaacttaaaagtttgtgggaatttctcaatgaattaaggcaataaggaaaaaatactacaaactataatgagtaaaaaaaagacatcacttaaaatgaaaaaacaaataaaattaatcacttcaaattatatagagagagtataatccaaaaagttgccaccctatttatgaaagaatccaatcagtactccacactactgcatgttcatgcatagcaactgagaaagtacacctcatgacctgaactcaatacatctaaaaagccatttcaactgtcaacttgtactttctaacccaaaacgtaccacaatttgttttgccctatttaaatagaaactacatttcaaaactttcaattaattgaagaattttgaccgttattttatatacaaaatcgccccattaaactattaccaagttgtgtttgattgaggacaaatattttctgaaggagatcgttggatctagacggttcacttgttacatgtttaatataaaaattcgaatagtagatttaaaataaattttagtattgaattatataaggttatgactttcatggtctgttttgttttttaagtagatattgaaaagaaaatctcgtttataataagatagtgaattcgatttaaaattttggtttttgattttcttgtctagtagattgaagttgtgaacgcgacaataaactaaaaagcacttcttaatagtacttttgaaacacatataagggttttgctaaaatagtacttttgaaaattttctaaactattttggttgctcccataaaactatcggttaggggggtgagaaactttcacgtgtcttctatggttttggaagcagaaactaacagtctgggcagagaaagggtttaatttgctgactcactatcaaaatggacttggctaaagttgtggcagaattaatggattcagaatttcagaggagtgcccatttcttggagttttattgcatgagatccgacattttcaaaatctttttccccaggtgaaaggatactcactctccacgtgaagtgaatttatgtgatcattctctttctaactttgttgtttccttaccttcaatgcaagattttgtttttgatgtaattcatatgtttctttccagccttaattagtagagaaaagagaggttttagaagcttgataaggatcgtacgtcaagaatttttgtttttaaatgaaatcctacaacacaaaagtggggattaaaccctattaacattttgaacaataatcaacaccataaattaagtaccaactaaattattgattatttatgaattactgaattatgacagaattattttttatttttccttttgataaaccatggatgtgtcggctattggttttattgagaaattcacatttttaaaaaattgcaaatatttttaaaagttagctaaaaagtaaaaatcaagcaaatagtatatcactagaagtacaattcaataaatggatcctaaacctgataaaaaaaaaaagaacataagagaatgttgaggcaccgaggcagaaccagctagctagtaacagaattgtcggcttcttcatcactttccgtgtgcttcatttccatcgctgtgaacacgataaagaaaataagagagggattatttaaggcataaccacagaaaaaagaggttggcgtacttagttcatagagggggaggcaaaaccaaagtatataccacttacataattctgtaatctcctcatcttgaatttgccgcttttctttttttcttccttttcttcttcttctttgaacattaggagaaagcgctcaatgtacataaaatagatgtctccaataagctgttcttcttctgttgcagcttcgcgggcatcctgtatgaaaatacaaatttcataaactagataaaaacatgaaatagaaaatactatatagtttgggttctaaaacatatattggtatattgaattttaccttggacattatgcattccttatgaaacacttccttgcactgtttacaagaatatctcttacccaagcatcctgacctacagagcgcacactttcccgcatcataattttcctcttctaggacagtatgttgatgcagttgggacttcacaatgcctggaaacccaaggcattctacatgggctctgaagttacaatcaatacaaccatagagcgacacaccacaaggtctaccacacacactacatgcttgatgagtcagtaccttcaagtcctcaatccaaaagttatagagagtatgcttgtgaaagctgttcttacctagtccatcaacatctttgatgcacttaatatggaaggcgacttcacaaatgaagcaaaaatggccatatgatttaatatccagtttgcaggcaatgcacttaaaatccctcagcagctccatttcaagtttgtgagaatgaatgggatgaacgagtttctctctgaaccgttcaatacaatgaggataatatatctctccacactcctacatgtcaaaacgtttccacacaaaacctctcatcacaaatggtgcaagctatcatatatgaattagataccataacttcaaacaaatgatgacttcgaacaggcaggcttgctgcattttatttctttacaaacatatccatcaagaataaacagagttatatgacaacatagacatattacgtacctagcgtaaaacgcattcaatgtggccaatataatcacattcttggcagaaataaacatgatgtcctacatgtaccattatctcgcaaaccccacaatactccaaagaatcatcatctcctagaaattcttctttaccacggaccgagaggtatctcgatacattcgaaatgaatcttccagtcacattccacgcactgataaaactgtttacccgcacatgtcttgcatattacacagtgacgatcctcctctaaaccaactatatattcagaagtatagcacccaacataaaacaatgtgtgttcatgagacttgtataaggagttgtatatattaaggatataattgccattagtagttgtgtaaaccctagactaagtactatatatgtattagactaagtagttgtgatacctatagtttcaggcgtggttcacacgcattcgtgggagccatgttggagctctttcatcatcgccatgggagagcaagaaagtcaactaaagaaggaaactcaagattttagatccgatctattctatcttaataaatttccttttatatactatagtataggcagattaaattattgcctcatacaaaaatatttctatataccgtagtaaccaaccagtgataaatgtgatgtgacatgatacaatctctttttctataaaggagatttcatttggtacattttttactttacaacagtaaacaagaatacaaagacagaggactttcgactaccacttagacgctagcccggcctttaacagtgatacgtacaagagctggttccatgtgtccggtacacccggcaagcaccaatggctacaatcttggtgactcacggcctctcttttctctttttccgtcctgtaaaccattctgtatatcgaaggatgaccatcttttctgaaatctgttagtcgacttatgttcatatatatcaccggagttttcattgtatcacggagaatatactcgagagctttcatcttcgatggatactttgctaagtaactcgtgttgaaaatcggttctgtttctttgtggcattgtccacctgagttccatggccctcctctgtcaaagagcaccagtttcactacggtcaagaaacacgttttgcagtaaacaaaaagtacttttagattgagaattacctgaagtgtgtaacggaatatcctctaaatactatgtgggtttgactgcggtcgatgttcttatcgacccatttcgcccaagtaatgagagctcgtttataagcttcgagaaccttgagcctcgggtacacaacgttaccttcttggtaatagttttctctgcaaaagaacatcaaaatcactgttaactaaaacacaacaaggtcttcttgtttatgttctctgtttcagactcataccctagctttgttttgtcatgagtccaccaatggccagtgttgaaaatcagtatatcagcatctcgatacatggatgtcgtcttatccatcatatccaaccttaaagtctccaatgtagtcccattcacacctttgaaacttgattcccttacaaaaaagggcgagccaacgaaatccaccgtgcaattatagtcctgcaagaacaagaacaagatccaaaaatcacatcaagcgaacagacattgtttgcagctcttagtatggtactacatattccgcaagaaaaatcgatatctcacctcgaatctgaaagcataaaaccctttcttcttgaactctcttctcccagagatctcatacactcgtttcttgtccttgagactatgtctaaggatgcaaataagagactcccacatgttccggtttatcgaatctcccacgaaaaccagcttcttccctcttagcttctccagaaaatcagttccattcaaccttcacattccaacacagagaccacattgctctacttatcagaacaataactagcaatctaatctcaaaacttagttcactaaaacctcatcaaaatcttgttatttcatcaagaacattaagaatcatatacctgggaatgtcacacccatttggttgccatctccatttaacataagcatcatcaggtcttccattagcgtgacagttgaaatctctgtctatatacggacaagaaccaggtgggtaatacggcattgtctcatcatcagctctaacccaacttccatcgtagatatcacaatcctcatacgaacctctgcttcgatcttcagtcacagagccattctctttgcttgtgtttgcaggtacaacaaatcttcctcccaaatcagacaccaagctcgagctgtttcccacacttgttgtcgcatttgcttcaagggtattttggtcatctgcaactgaaccattaccctcttcagccagactcgagttcttaactgtttctccagatctttgtccagaatcaaagcttggaactttactttcttcagacaaagttgtgttcttcgaaccagcgtctgggaccacaaagcttggaactttgacatctgggaccttgtcggtgagattcactacttcaggcttctcgttcacttgcttgacagaagaagaattgtttagattggagcttttgagaccttgaagcagaggagagacgaagggtacattgaaggaggaactagtaagggagagaagagtaaggagaaggaaagaagcagcgattcctaaaccgaatctggttaatatgtttcttctagaagacagaatctggtctggaaacaggagtttcttcgacgagtccatcttcttagtttgttcaaatggaaacttggagaagaaactgaagtggttaagaaaatggtaaattctggttcagaatgtaaaagtgagggagagtttattaaattttttatttcgatgaacttgaatttgggggaagagcggtttctctcgaagataacgatttcagttttaaaccaccattcatgtttgtcaaaagttaaattgaaagccatttcttaatgaaattgttaatgtatgtttatccttttttgtttgtcaataattgtggtaagtaatgcggtatatgtggatctaaacttttaattaaatcatggaggtgctcatttgtagtatgattttaattatttcccttaataattttagatgattaaggtaattactactaatgaggaatttaatgagatcgtggtaatgaccaaaataatacggcagagtggcaccgactgtatctaaggcacgtggcataagaacggctcacgagactttggaccgacatcattcttcttctcgtttattgcgattgcttatagccgcgtgatctaacggtttcatgtgtggtctctcaagctgcaggtgcacgcttctgtcctcacacctgaatagtctccacgtttacgactctgcttgacccattattcgttgattttaaagaccatcctaattcctatgttcggtggttttgtatagtgtgtctgaggcgaagtttaatgcttcattacacgttgaccgaatagagttcgattctctttataccgaattatttcggtttggaatctttaatttggttaagtgatgaatatatgtttaggaattttgttttccggtttactcggttcaaggttttaggtttttcggttttagaaaaactatatcagaattttctttcggttagtaattagtttgaaccttttcgattttgttttggttttggtttaggtcagtttgaaaatcttagatttgtttcggttttgcattggagataacatagtttaaacaaatttaattttatttaagaattacaaaaagttatacatgcaaatgttttttttatatacatgttacaaaattattttgtagtcctgaaacttgatgtattcaattcagtttattcggtattgaaattacgtttagcttacaattcggttcatttcgattcaaaaactttcagttcggtttgatttatatgccatccaaaattcttacctcactttgaaaattcaaatattgagtaatgtggcaggctaatcaacattttcttttgcatttcatattttttctttacataaaaattacacactcaacttcacatctatatcaacattataaaacgacaaataaaaaacaaacccaagaaaagaaattttttaaaaacagtgagtcataatcatcgaggacccgagagctcaatggcttctactacaagagacgattcctgaatataatccgagtaatacctcacacgcggcgaagaactcaccatccccggtggcaatggcggtggctgatgctcaccagtaccgttctgcgtcgcttcccatctctcagccaaaccgtcaccttcaagcatcttcataacttctgacattttcggtcgatgagatggattgaattgagtgcagagtagcgcaacttgaacgatttcttcgagttctactctatcgaacttgtcatttagatctttgtctattaactgctttagtttcccttcttggtgcagcttcttcacctgccatttttaacaatctcatttctcagaccaataaaccaaaccaaaccaattccagatcaagcacaaaaacagaaccaaaccgaatccaaaataacagtttagtcttcaaactataccgaattcaaatcaaagataacagaaaaccaaactgagtcttttatcaagcacaaaaacagaaccaaaatttagccaaaatcacggctaatttatattttgttttggtttaagttttctatcaaacaagactgaaccgaaccaaaccacaattatgaacaatagcttcaagattctagaaagtgaaacaagaaacagagaaaagagacttacccagtcaagcattacacctttctggtgtgcggatctgccaaaatcaagagctttctgaccagtaatgagctcaaggagaagtatgccaaagccaaagacatcagtcttctctgaggactgacccgtggataagtactcaggtgcaatgtggccaacagttccacggactgcagttgtgacatgagagtctctatggtctagaagcttagctaacccaaaatcaccaacaactgcttcgaagtcctcatctaacagaatgttagctgctttcacatcgcggtgtataatcttcgggtcacattgctcgtgtaggtaaactagtcctctcgctgtcccaaccgctatcttcttccttctcgaccagtctaatgctggctctccacggatattatctaaacaaaaaatgtagcaagatggaactattaaaaacttgcaaaagagcatgaagaaattagcagtttttttggaaactgcattaccttttaagcgtgatgcgacactcccatttggcatgtaagggtagactaaaattctctcctggttgctactacagaaaccgcggagccggaggagattgcgatgaagagccaaacttatagtctctacttctgtctgaaactggacttctccacccgcaatgttacagtccttgagacgtttgacagccaccaaagttccatcgtttaagtgtcctttgtacacaatcccgtatccgcctcttccgagaatgttcttcgagttgaaatgattggtggcagatctaagctctttgaatgtatacctcttcaagtgccctaaactcacttctggatcatattgttctgcaaaatattaatcatcaagatgcaagtgtcagttttgctctgcacaaaatgatgtgaagccgatagtatttcaagatactaaccattaacgtcaaaaaatatttgcttgttacggcgatatctccaccaaagaaacattccgcttgtaaagaaaacaaaaaatgctgcactgaagcttgcggcaaatgcaagagcaacgtgatggccattggtacgagttcctgattcatctaaaacagaaagaagaaccaaagatggaagtgatgagatacattgacgcagaagaagaatagggagctatgagaagcagatgcctaatacctggaccatcttgtggaagcgtgagaggctcgggaacagcagaacagtttgaaacagcttttgggccacagattaacgcattaccaattacccttcagtttaagaagcccaacgctgaatcttagtttcagcttcaacggaaagataagttcttgtataagtttagtaaagcttacttgaaagttctggcagaaacttttggcagcgaaccactaagattgttatacgaaatgtcgctgcacattaagaatcagtaaaaagtaagtaaataaatattctcccaatgtatgtttttccactgtgaacaatagaaaaagcaggatttagagacttacactagagtgagtccctcaatcttggatagagactcagggcaagttcctataagactgttattgtttaaccgcctgaaaatgaaaatgacaagaacagaacaacagaccactcagaattgaattggaattttataaacatgcaacaaaagaatcattgtgaaaccgtaaaggagcactcacaagtaattcaagttcttgagttctccaagtgaggccggtatctccccggtgaatgaattgttcgaaagatcaagtgactgaagcttctccaacctcccaatcgtttccggaattggaccagtgattgcattgttttgcaacaccctaaacaacaaaacattaagctcaacaagaagcaaaacagagaacaagaatcacatatagcaaagactagaaaaatcttacactgattgtaaataggtgaggtttccgattctaggagacaatgtaccagacaagctttggctaggaagatccctgtttcattaagaaaacaagacaagtcttaaagatctatctggtttttttaatctaatatacgagaagagaagagaagactcacagtgaagagacatagccatcagtgcaagaaaccattctccagctacaaggatcaactgaattcacatcccaattctcaagaactttgtacggatcattcaattcattcttcacagcaaccaaagctgtcactgctcatttcagacaaacaaaaagaaagaaacttcagattgaaagaacaaatctagcctcaaaactcctatgaattatcttattgctaaagctgcatttttcgaaattgaaatcttatccaagaaaaacccagtaagcttatatgcagtatagtttcacagagaatgaagtaaacttgagctgctattggctaaggttatatgagtctggtgagcatttaaagctgtgatatttattatccaataaagaaacaaaaaagaacctaatccacacaaacattcaccagaattttcggaacaactaaacaaaatagacaaaaccaaagatgataaattcatagagaaaaaaattgagatttctccaagaagaaaaagactaaccttcatagtttacaccagtaggagaaagtgtagcagaagagatatcaaagaaccatacaaaaaccagaaatcctaatctccacaccacaaatctcacaccttccatatcccttcttaaagcaatcaactttggtctgaacaaaaacaagtttcaaagaacccaccaactcatttttctctctcccatatctgaaaaaaaaacttagcttttgtctacttttcttcttctctgtctttatttagacacagaaactaatttgagcaatccattttccagcaatggaacctctctttctctgtgatttcaattcaaaggaagtaaaaaggagaagaccccaattgaaaaatgacgacttgcaagttactcagcttagaaagagagaatttttgaatgaagaaacgattaagagaatgaatgctaaacgagctgtgacaagagatagagaagagagagaaaactctaaaagtgtgaagagaattttcccgagaaaccaagcaaaacaaaagcaccaaaatgctctgaaagtctgagaaattttcctagagatctgaaaaaaaaaaagctattgagtgatgagtgatactaatagtgcttcttggtttatattttatatcatttttatgactttggtagtagttgttattgaataactaatctctataacattcttaattttttcaaaaaaggtttgcttctaattccacaccactattaccaaatcatctaatctctcatctgcctactcttatcattcacaccaccaatataaaaaaggaatttaaaaataataatcatgaaaagaaagggaccaaacaagcaaaatccaaaatgaaaatgccaaaaaatccacaaacacacacagaaagatactgacagaataacaagaaaagaagagactctctgtttttctcacttttttataagttttgttaatttataagctttttatataaaacaaaattactgtgaggtaaaaagaatagtacattttttttgtttatgttttcatgatttcagtttgaatcctttttattttctgctttcggacaaatgtttcaagaaaacactttaatatacaaaaatgtgattagattgaagagatgggtcacatagatgataaaagaaaaaacataagaacaaggacatctctctcttattttaatattttgctttttagaaaaagttaccgagaaaaaaaaaaagttttttttgatgggcagatcacgttcatggcctgtctcctatcttgttggctttttcaggcttcaattattttacccctttttgagtttttgattaaaggataacataatacttctctttactacacaaaaatgtaagcgtagacgaattcgtttacacaaattttgtaagcgtagattatgttttgcccacttgggatggctaaatagatattgcaatctctttccatgaccagaaaaggcccagctcaatgaaaatatccagagctatcactaaaaacgggccctgattaatagaaaaatggtccaaatttttgaatagccaagtctaaaaatggacatgtctatgactgtcgatatccacttcagcaaattgcttgcatcgtgtgtaaaaggcttaaatgcttctgattccatatcgttatttcctagtagaatttttggagttgctagataaaagttgattaaatacgttttcttctgatctaagtcaagaagaagatgagaatcaaaagagaaaataccaagtaagaaaaaagaagatacttgttctttatttatgaatagtaagatacattagaagtgaaacataatccaaacacgtctcaaactcaagagacgctaaagagtattttgaaagtaagtgataagattgtaaaggcttatgcagccgctgtgatgtactggattgcctccttgcatatacctgtcattgttgcttcaggaccatacaccttgaaatcaaacagacatgtaaaaacagttagaaactgattaagcgggaatgtcttgagtttattcattgtgtgtctacatacctcgatggggacaccgatttcgtctccaagtgatctcattttagcaagtcccttttggtagtttggtcctcctctcctcacaaatatatgcatccttgctgctttcagctttgcttcctgtaaacggttaaagcatggttcatttatacttgtagtcaaggggcaatgaagtgtttgtggatgattctactctcttcttgcttactttttccttgagagctcggattatgccattgaaggtagcagcaacatcggtgaagttagcaattccacctccaattaccagagccctgctttttccatccggattcgctgtagcacactgaagaagcagtattatcattcagcaccacgaccaagtcaggagtgactttattttcagatgctttattggcagaagttaaagcagcatcttacatcaatgacaactctggcatactgcaaaacctcgtcttctttgggtgctccactgtattcagcataattgccaagctcagatgcatacccgagatctccaacctggataacatttcagtaaacactttagaggctaaggcttctaagcagaaaaatgcaggagattctcggtgttcatataaaaacatacggtatcagcatagatgacacttgcacctcctccagctaccatagtccaaattcttcccttgggattcagaacagtgaacttcaaagaggcacttgtctgcatatacaaaagggtcataagtcatagagaaactggtgtttccagaagcgtcaattactctacgcttattggtatgataccttctcatctagaccgtggatgaagctctctgttgaactcatcactcttccaaatggcatgggaaattcaatgtcgccccacctgcaaaacgtaagaggttaatcataccgcccaaactcttgacttatcatgacttcttaaagctcttgacttcggaacagttgaaaaaagtggaagagtcaaaacttacttcttaaagtttttgaaagcagcggtgtcatcaagctcacccctcatatccagaggataaggctttccatcaaccaatgtgaaaggattcatctccaagaaagtgaaatcaagatctggtgtcaaagaaaaaaagaagataataataaatcttcagtttttggttcagatgtcttcaatttgaattagtgaatatttggcataccttcgaatagggtaaaaatgacttgaataaaatcttcaagttcccctttgatctgtacatgttaaattagtaagtcgaaatcacaagtagtttgtttcaatgccaaacttcagttctcattgatattacctctagaggaagggttgcaacaagaggtgcacatatctcaaatgtcagggaagcacctgttggtatagttatggtcttgacctacatagaaagtggagttacgactcaattatcagctttacgcttagaagatagtgaaactgaaacaaggaagataaatggaaaaagcatccaaaaagaccttgtcccagttctcctcgatgtcaattcctccacactccgaaaagctaatgctgcagccaagtctatcagagacaatattaagatagaactcttcattgtgtgggacaaatggttcaacaatgaatgttgttatgggtcctttgcatccactcatctctacctgtacagtgatagacacacaaagctaaactggaagtagaaggaaggaaactaaaaacaagccaagttcaacaaaagtttacctctttgcctaagcgttctttcacgaaagttgcaacatcagcgaaatctaagttcaatgcaaccaaaccgcttttgccacgctttccgaacaacatatcaggtttcaccacaagcttctcagatgagagccaaggctctctctctactagctcatttagatcagtctcttggttaatctaaaacacatcacatacagatatgaatcaaagccttgttaatgaaactaactgagacatgtcggagaaaccaatgcaatgcacactaaacacaagtttatcaaagaagataaaatctagagaaatggatctaaacctgaacggatctgataggcaattcttgaccagagagtcttttgaagtgttctttcaccagtctctttgagtcatactctctgatcttcttccgagccatacttcacaacgatacaaacaaaattgataaaatacgaatcagatcactaactattcaattagtggggattcgagacctcttgattcagaaaatggagatcgatgaaaatggcggatcttaccgttgagagaggaggtagctacagcttcgttagttagcaaactaattcgatacctcttttcgctttaggatcgttatttatatttaaacatttttctttattttttttattttttatttttttttgtggttttggaaaaaaaaaaatttcttaaaacaaaacatatttattaatctgttcaatttatgctaattttttttatagataaattaaatcatactacaaaattagttgtaaaaccttacttaccaaaaaaaaaaaattagttgtaaaacctttggagttactcttccatcataaaagttatacctaacttgtaagcaaacgtttcaactcccaaccatttcgattttgtttttcatttttctatccaatatttttgtaacaattcccattaaatatttcaaatttgtacgtatgaattcatatgtgtttttactataatatttcttgtataaaaggagttagtccaccatacattgttaaacaaaccaattacaaaatgcagctactaattttacgattttggtatcaatttccatggcctgaatcagctgcagggttattagtcttgagttttccctgaacaggaagaacaacactaaataacatgaatttattacttcagtagacctcacatgtaacaaatatccatcaaattcaagatgtgttacattctaactttaaagtaatcatcgagcatcttataaaagctatacataactactaccaatttttgttatcctccaaatacttaacattttattcaagtgtaacgcatatatacctctaataaaggaggcttatctaggaaacaagcatggctataatggctcgcttcaaaaagttctgcattggtccataggctgtaatgaagtggacagacctcagctataagggattctgcttattggtaacgaactagtgatcaaaatgaatcttcatcttgagattttgcatacatgttcgtgataataggtccatgagtcaaaatacaaaatttagatctttttcttataaacattcatacatctataaataaataaatatatttttttggggattcgcaagtaaatggttataacttgtaagtaatcctttcttaaaacactaatcctttattatacaagaaatcatgactttgaattagataaatatagaaaaatagcataatgaaataattagtataagctaaggctgaataatcgaaataatgagataacattactagttcgttaactagaagttgttgccaccatgagtccctgaccaatccctgagggaggtgcagctcatagcttcatgactacgaaatcccaagacagtttgacaactatacatcttaattggttgaacagtttaactgtgctgccatgctaaaaatctattgcacatatttctgttttgatgaaacaaaaaaactgaaatgacatataaatagcaagtaaactctacatgcacatacattatgcactggccatctttttttagaatcatctctcgttataaatcaaagaaacataaataataattaatcacctattcaattacaaaatataataacacagagaaaagatcaacacgattcaaatacattgtttttaaaaaaaaacaatgtctgcacgcaaaaagaatcgtatccatgttttctttgtttcaataatgattataatatcattggtcagcggatttggagaaggaataaaacagataaactataaagatttgataaaagacacaattccaggttgcactagtaagaaccctaaagaatgcgtcaaagttccagccaacacttaccatcgtggttgtgaaatttctacacgttgtcatcgtgaacagcattcgagttcgggttaatcatgcatgtatgatatgtcattttctatcaaatatgaaaacatgtgtttattccctttgatatttaactttttaacaaaaaatatgttattattaatttatattattgatgtgatattgttaattcaaattttaattattgtaagattctctccatttgtttttgtaaccttgaattgtttattatattttttaataaattataaactaatgtgtaatcatgcatagcttaaacttcttgtaagtggtggtctctacagacactattgtttttaatcatagttaggtgtatattttgacatttggtaattgaatccgagaaaaatttaattgtttgataggcactttaccctatatcgatcactttctaaactcttttagaaactaatcatctattaccctagaggctagagttataatgtggatatgtgaagagatatgtgtcaaaggttttttcttacaattatttgttgttttgatttttttactctaatcattgtttaagaatgaatgtgtatgtacatccattaatgaaaggtgaataaatcagaggccattgtgtctttctcttcaacgtgcatttgagatgcttgcacccaaatcgttgtgatcgcgcgcatatcaaaatcaacatagccaccatttttcaaaagttttttataagcaattaaattcttgtttcttgcggcaaagactctttgagccaaaaggagagttatgagtttggtagttgtatatgcttcttgctgatgtaatgcaatataacagtcttgggcaggggcgtctcaaaaaatttaggttccatgtacaaaatttaaagaaattggctctcaaacttagtcaaattctgttttggccttcaaacttgggttttttttttttttttggtccttaaaataactcaattttttttatggtcttcaaatttactcaattttatttggaacctacacatttgctctacctgcacaacccaagaactgtccctagtctttgggcggttgagatgtcactaattaatgtcggaaaaaaacatgtttggctcaattgagtcgagtgagcttctagtaaaggtgaatttgatgactattcagctctttgtggagttgtaaggacaattcgtgagtttattggagatctgggagtttcatagttctgaggaaggagtgtagttacatgcattaaaccaaataccttattaacattatacatttcgaaagaaagaaaattgatttcacaatatatagtcagaagtccaataagtccatcactaatttaattaaatattgagccttgaacaacccatttttttagaccagtaatatgaaacgaaagaacaaggacacgcatatagtatctccataaaagactaagacaatcaaatatccaaaaaagtgatgagtacatgtggaaagacagggtgatctattaagatcccatgatgagaacttaataagagcaaaaactcaatggtttatcttgccccacgagctgttactattagcataatcaactgtttatgtatgatatcttctaattagaaaaccgaaaaaaggtaaataaaaaaaaagaaagagctcagattcgaggctatatcatccgatagatcagagatatgtgaaggacccaaccttcacttaaaccaatttcgtcaccgctcaatgcaccagccgggaatcgaacccgggtctgtaccgtggcagggtactattctaccactagaccactggtgctatttgacaatatgctccttctttaacaatttatacttaacatgctatagttcacatttgtccactgaattttgaataattataaagtgaaagtggtggattttcatgagagcttttgaacattcggtattttggcatgtaaaaagaatacaaacttaaaagtgtttaatgacacaaaaagctattattagcaacgcacacattgattgattgtatctcgataagtactatcgcagtcagattctagacaaacagatatctctatttagtagagtagagagaccttaacatgcaagaaacatttaagagaaccaaacaaaaaaaagcttaagaagaagacgatagatagctcagtcttcgtagtcgccttgggcatacttgtcttcggggtaatacacagccactacttggtttcctccaaattttcttccattcatccccgatctggcctttgatgagccatccacatccgcatactctaagaaaacctgcattagtattaccattagagtatgcaatttatatatgaatttggtagacatttgtatctgaggactgaaatctaaccttcccaactcctggtgttgggtcatgatctggattaggcctcggaatcacaacattcaccaagttacctgcacccaaatgacacaccaataaattatcaaaagttcatattggactatgtaaaagcctgagtatatgctatgtgctaatggtataatgtcagaacatacaatagtaaaaaaaaaaacgaattgcttaccgaatttaccaccttcttggctcatgtcctccattatgtctgcatattctgcatcgtctctaaggtcatcagctgtaaccacttgagtcaaacagacaatcttggtgggagtgcctcctggttgtaacatagcctctgcaacaaagtttgagagatatttaaaattagtgatcttttagatagatagagtgaaaggccaacgatttgtaaacaaactataaagtaaattaaacagacaatcaatcaagtaagccttatggcaatagatctatgtctgaactacaaaaacctgcgatgaaatctaaggaaaccagttacagtatctaagcatgaaattcttaatgaggagaacaaagaagcaaatctgattacaaccttgaggacgaacaaaaacaaagccttcacgttaacaaaaaccttaacgttttaaatattgatatgatcatgtattgatccaacacactaagctacatggactagtaaactatgaattcaacaaacaaagtaactgttagcgtttgagcctgtgctcaaacctgcaacaagaaaagatgaatcagtgtgatgaagatgagaagcaaagcaaaagaagaacagagcagaagcaaagacgaagacacgttggagacgtgaagagaggagtcaacgattaagaggaggaagacacaagtcaacaaaggagatcgggcttactgttttgtcttaaggagacgttgggctacttggttaagcccaactatggttctatcttaaggagagtagtatgcaagaatatgtaagtagtagagtggcttgcaagagtctagagttagttatgtgtttaaaagcatgcttgtgtgtgtaagtgtgtaagaaagtagtaagtaagtatgtgtatgttgtgtaagagaatcatgcaagctttattatcaatgtactcgtttaaagtgcttaaaccgttaaacgtttcttgttttctctttagaacaatgaagaagaatacggagttatggacgaatggtgtggggaaaggaagaattaaaataaccactaaactcttgcacacacattatgcactggtcttctgtatttagaaatactttctcttgttataattcaaagatacacaaactaataattaccaattcaatttacaaaatatagtgtcaaagaaaaagatcaaaaagattcaaaaacattgttttttttaacaatggctggtcataaaaagagtcttacccgtcttttctttgtttcagtaattgattatattatcattgttcagcggattaggagaaggaagcaaatatataaactatacagatatgatgaaaagacagaattc

SEQ ID NO: 102 - DNA, 103338 bp, Arabidopsis thaliana
gaattcctacatctcagtgatgatggaccccaatgagatgtagatgagatggacacaaaaaaaaaatgggctctaaagatcccagcttataaaattctgattaaacaataataacaattatggaaattttccaatagtgacatagaatcatatacaaatagggttagtgtgtaactggtggagtcattatgaacattgtatccaatcaacgaacatttcagtgcgagaaaaaaaaatgacaacacacaaaattttaggccatttcaagaatacaaaatcaggaacaggtcatagaattaggcattagaaccagctaataaacttcagaaaatataatctcccttcaatgaggtaaaagtcaacttttattccctctctatctgtctctctatctctcgtgcacacaacttttagaaagattgtctcgcaagtcacaatattcctaagttgacaatgaaaggaatcccaagttcgtcaaaccagatcctaaaccaagatcttgttgaggtatgctatttgtgatgatcatgtttataatgaatttggaaactttggtcttgagagagtttgttccgcttttgaagcttgatgtgccgtaagatgataattttgcgtatataaatttgaggaatgaaaactctaagagacttacaggatcaatcatttgagctggaagattggcttccaattacagcatcacgaaatgctaattggtactattcagctttccacaacgtcactgccatagttggtgctggagttcttggtctcccttacgccatgtcagaacttggatggtatatatctttttcctgagaattatattttaagagtcagtctagagatataaaaattattttgttttcaggggacctggagttgtggtgttgatcctgtcatgggtcataacgttatacacgttctggcaaatgattgagatgcacgaaatgtttgaagggaaacggtttgataggtaccacgagctaggacaagcagcctttggcaaaaagcttggtttgtacatcgtcgtgccgcttcaacttcttgttgagacaagtgcttgcatagtgtatatggtgacaggaggtgaatcactgaaaaagattcatcaactttctgtgggagactacgagtgtagaaagttgaaagttcgacacttcattttgatctttgcctcttcacagtttgtgctttcccttcttaaaaatttcaactccatttccggtgtctctttggtagctgccgtcatgtctatgaggtaagtgaatctcatcctctttgtttctatgtatcatgagcttgtgctttagattaacctcgataaacatgtggtcagtaatccagccttagaactagagaatatattagtttaagcttcctcttaagccaagtctctcttatagaattaggttagttgttggaagttatttctttcattaagaggaagataccttatataggccacgatacattgcatttaaagaaatcttaaaacctaacgtgaaaaaagaatactctcaaaaccaatattaaaaggaaaagaccaaaacaccgctaatagaacaccacttctcgcgattatacaaaatcgtatatcatatatcttgtgcaaacataacattgaggtctctgacctatgttttattactttcccatagctattccacaattgcttgggtagcttcactgacaaagggtgtcgcgaacaatgttgaatatggatataaaagaagaaacaacacctcagtgccattagccttcttaggcgcattgggggagatggcttttgcgtatgcaggtcacaatgttgttttagaaattcaagcaacgattccatcaacaccagaaaatccatcaaaacgacccatgtggaagggagccattgtagcctatattattgtagctttctgttacttccctgtggcccttgtagggttttggacattcggaaacaacgttgaagaaaacattctcaaaacactccggggcccgaagggacttataattgtggccaacatttttgtgattatacatctcatgggaagctaccaggtatatataccaagaaacaccttatctattagaaaacttctaactactaaaaacccgccttcatatttcttttcctaggtgtacgcaatgcccgtgtttgacatgatcgaatctgtaatgataaagaaatggcacttcagtccaacaagagttctacggtttaccatccgttggacttttgtgggtatgtctctgtgattttcataccaagattacatattttgtaaagaaacacgatctaacttgtatatatgtcacagccgccacgatggggatagcagtcgctctaccgcatttcagtgctttgctgtcattttttggaggattcatatttgccccgaccacatactttgtaagctcttaaactctatcaacatatctttctttctttttttgaataaaatgtaaaatttttttcaaatttttttttttgttaaaacaagtgcatcgttcacttaaaagattttaaccaaattttctaggcaaagctagtcttcttggtgactatcttgaagcaaaccacattcccctacaatcttcatatcgtctatctcaatcaacagatcttgatatcttcaacaaaatatatataaattaatgaagttctctttcagatcccttgcatcatatggctgatcctgaagaaaccaaagagatttagtctatcatggtgtatcaattgggcaagtggaactcctccctttggtctttttgtcaattgatgataatcttgttatagctaataatacatgtttttttttggggtcagatttgcatcattcttggggttctagtgatgattatagcacctattgggggactcgccaaattaatgaatgctttaaagcaacccgactccagttgcaaaagcacctaaatattgtactgaattttcttgtaggtaacacaagtttttctctagtagtttgatatattgtttaatcatggcttcactataacaaactctgagtgtgaatctgtattgaaacaaatgtatgtggaggaaagaaacagaagaaataattctgatttctctcggtttggttaatcagtccggttttgcctttggttaaacagaagaaatgtatcgttggaccatgatgactaatctttattctaactatttgatttgtaccatattatatcaaacaaaacaaaaaactatttgattgtaatttttgcttctcgtaacattgccaagggttcagagtattataggtattattatttttttgtttaagaaaaaagtattatatgttattgagcgttggttttatagttctttttaagaagagtgaatacctttagttaagcagtttgttctattggctaagaattatgcccgatatataagtatcaccaaatttcactagttaaaccatgtttaactgccgctgtttgtagggcatgcattagttagtaaacattgtcacaacacacaaaccctattcatctaaactatgatcgttctttacatattgaaattgaaaccgaccaaattacaataaaaagggttacttttgggcaaagtagtaattaaagaactgattaactacctcgtacgcgtatttgacttacgaaacacacgttaaggatatttagttgttaagttattctatctactgaataattgtcgtatgttcaagttaattactttaataataacgttatcatttcctttctttgtttttaatagaaacagtcaaagactcaaatattagtatgtatcaccatttattacatttgtctccttacatactgatttatccattcccgtaatttattcacattatctctgtcgaacaaccgagaagatctaagtcgaccaaattttcaacgtcttctaaaatgacacgtatcgtatcttattagctctggccggtgcactaagtaacggatcttcatataaattctcctaaaaccgttgtgatgatactcgagtaattaccggaacaagatggcatcattcacactcgcaataccaagcgcgtgacgtctagacattgcgtcgttgaacgacacgtggagttctgttcgtaaattcgtggagcttcagaagaaactcacaacagtctatttccgttggacgaaaatgacggttacccatcactagctagaaaacagttgtcaaacttgacagttaagaaaacgttgtcgttttgttctttcacaatttctacgaaatttctatcgaaagactcctgattccgtgatgtctgagctttatggtacaaccatttgcaactttaattttcacacaaaagccaagtttatgctggtggtttatcatcaacttgtgtctataatatctctaataaattacgacttatgaggttacgcgttacttatgcatggagcatgcacacacatatgtataacgtaaacagattttagtttaatagatgagtgcgcagacatatatcgtttcgtttttattgttgttgtgcgccacaacctgtctctatatcttaaatagctatcgcaatcgattttatttaaatcctaaatacacttgcatgttaaagaaacatgtattcattgactaataattggattagatgaaataataataataataataataataataataataataattggatatttggattagagaaattattgaaagtaatgtataaactattgaaccatgaaaatatatttgcgaataaatcatcaaactgaaactatcaaaatgtataagattttgaaaaacataatttcacgaaatatttttttttttttaaatctatgttttgactttttatcaaattaacaaaagcactatctgattatctcaagctgatttagtagaccgaccaacaattttatcttttaagccaaacaagtaatatactttatcataccaaaaattaatatatttatgatactaaagaaaaaactttatatatctcctctagtatatagtaaaagcaacaaaaaaaattaaaaataaatgttaagagagcgttttatggtcggcttttcacgcgtttcactttccaattttcatttcactttataagaatagaagaactccaaaacattaaaaataaggaatcagaaaaaaaatctataataaagttgtgattaaatcattagttttttttatataataaaacgcaggtgatcctaaaagttttcaaagcccaaagactaattgtaagatccgataaattactcgaattttggtgactaatgttacttaaacccaaatagtggaattaacactctttaccagtagaccaaagcaacttggtttaatttattttcttcaatttaccagatcatgatgccgtttaggaccattggactagtccatgctgagtgaaaataattcactcaaaagaataccgtaaatcagaattttccacgtttatcaaataactgactaaaaagcacacataacaaaattttcatgcatcaacttgtactaaaatttatagaaaactggcgtatattggtaaataaatagcagaaacaaaagtggaaaagttttgtggcgccacttgcgaagtgaactttggagctggagcacagctggacacgagcagtggggctgcagctgctaagtgctgacccaaattggggtcacaacctttcctcttataacggtccaatatatattaccgttatgttacatacaatatagtaatttatatatatatatatattttttatatagtaatttatattattttttgcacactatcgatttgatttacaacaagtccttttgttttttgttttttgttttttttgcacaatatcgattgtttgaaccttcaaaattcatgatagaactcccggggtttttcctttttatttttatttttttactctcaaaataagaaaatcatagtccgacgactccatttaaaagacttaaaaaaaattatggtcaaaatatgaatattttatatagatacttaatgcagaagctatagttgcactttttcctcgacaagactcttgtctcttcaataaaaaatgcgttggtttagttttatactgtatttagtaagtatatatgcttttccccacggcccacactcatgcattgatacataccactttattggtctccagactaatctggttatatgtgcccatcattaattcaaattcattaacttacgtaagaataccacccttacaaaacaacttaaaaaaaaaaacttgaatcaacatttaattaaaatttgacaaacatcgttataaattttatataactattacttagttaatttgaaaaatccgttgcttaatagttaataattaatcaaaaacacattgatttactacatattctttttatgccctcggtttggtatcttgatatatcaagcggcttgtaacttgaattcagaatctacgttttcaatgttgtttcctatgatggtcaagtggccgctacttgatttcagaatctacgttctatgatggtgaagatattgaaatgaatgttggaatttcttttattaaatttttagttggtatgactgattagccatacaaaataattaggttgcagccacttattttaacttgtataaaaaataagtgatactactaatttaaatcacctattattactttttttttatgggcacaaaatcacctattattactaattgatacttttattgatttatttaatattattcaatcaatttggtgtaaatctatattaatttccgctaacatcatcctagtactggagaaacttgatttcgtatctacagcctttctagaacaatttttatccaaaacttaaatttgtttacgttcattttccttgttccaaataaataattttctttttttgacattatgcctttgttgaagtaatgcatgtcacatacagtacaagaaaacacgagtttcagacttcagtgtaaaacaggattacatgtattgtaagcgaaaataattaacatcaagtagtcaaaatattttacactatgtaatgttaatgatgtgtaagattagcaagacttacacgttcgcggaaagtaatctaaattatatatttccattaacaaaaggtaatctagctagaattcttaattgactttgatagctagttcttgtataaacaataattcttttctcgttgatatttatatcaaagtggttatcatctatctaaaaatctatacataagaattagaatatccttaaaaattctaccagtaactttcaatagagagttatcaaatatgaatcatgattacatcagtgtttattacacacatatttacacgtaacacataattagtttcatggtcatcgttaattactctgacgataatgtaaactaaaaccgggtggatttaaccggacccatttgccatcactctccataaatcctaaccgtccatctaatcaagcgtagatctaacggtggatatcaaatcaaaggttaattccctccctatatatattagaaaattgatcctgaagcgtgtaccgtacacacatccccatacgaacactcacaatcgttaaaaagaaagaagagaagagagagaaagcttaaatcggaaaaaatggtttcgtggatgatgacaaccaaggcggtgctaatctcaagcggcgtcgccaccgtggctctgttactgaaactctctgttccggtagctgttgatttctccgtgtcacgagctccgatcttgtggagctccttgttgtcatggctgaaaccaccgtatctttacgttgttaccaacggaattatcatcactatcgttgcttcttctaagtattaccgaagtcaccatgaccgtgatgaagaagatgagatcgtcgtgtacggtggtggaggttataagatccagacggaggagccgattgtgaatcaacatcaagcttctccgaggattctggaggttaaggatttggatactggtgcgcattttggtttcgttgtggcgaatctggaggctgaggaactggaatcagaggcggttacggcggttgtgtttgacgatgaggaggaggagaagaagattatagatagcgcggcgacggcggaggatgaaattgaagaggagcttaagagtgtgattatggttgagaattcagatctggttgaatccgatgtcataccgccgccgatgatgatcgaatcggagaatcttcctccgattgagaagcctctcgttacttcaaggttcggtcaccggaaattgatgaaagcaagtcaagaaggtactgatttgattcttcactttttaaaaaaaaattggatattagaaaaacagagcaaaaagatgatgacgtcatgttaaaaaaacggttaggtagatttttttatttttgaaaattcaaatatggcgtggcgtcgaaaacacgcgtcggtggaccaaagggtaaatatgtaatctaacattatacttttcttcaggtggaagagctttgagagtgacgaagccgaagaagaacgagacgttggagaatacgtggaagatgataacggaagggaaatcaacgccgttgactagacagttataccggagatctgacacgtttggacgtggagattccgggggagttgacggtgaggtgaaaccggtttataagaagtcggatacgtttagggacaggactaattattatcagttggcggagacggcgaaggtgaggaaagagccgtcgctgagtcaggaagagttgaatcggcgagttgaggcgtttataaagaagtttaatgaggagatgaagttgcagagaatggagtctctcagacagtacaaagagataactagccgtggggtttagtttactgtttttattttctggttaaaattttttcattggcttttttatacacagaaaaaaatagaaaaagaagattagtcagagtggatttaacttaaaagaaaaaaaagttaacagtagaaaaaaaatctgtttattaatttgtgaagcttgaaggtttttttttgtcaacgctttgaagttacatagtttttttttttgtttgtgtgtgtataattttgagaaatatatagtttggtttgtaaatatttatttgttggttttacaataaaaaaatagataaagtaaatgaatatatacacttgtggtcgatgtattatgctaaatgattgttcaaatttgaaggtgtgaaagaaaaaagaaaaaaaaattgaaggtgtgtgaatgttttaatacagtacatatttaacagaatttgtttaataacttcgaagtaaaatttttatcaataagtgtgatcttttttgttttctcaagtcaatgggggtctattttgaattatctttttaaagttcagtttgaatttaaggcatgattggttgggttgtaaaaattttttaaaaccaccaaaaatgttacatcatcaaaattgaaacaattatgctgtaactttcctattttttctcaaagcccaaataatattttcttaattattttggctataagtacaagtttttctaaagtacaagtttatggtttttagaagatacgtacatttttctctttttttttttcattttcttataaatattactctagttttcatatatatatatattaaatatagttttatggatataaatagtaggtaaatatctactttatgacatatatatataactaacatttttttaatatatatatatatatatatacattaattaagtttatatttgtgaataatattatataacacataaatacaatttaccaataatatttttttttttaaaaatgcatacaatcaaaatcttatttctacaaccaatttctttaaataataatattatataaataaaacctacagtctaatttctacagcaataaaacctacagccatatccatcacacctacaacaaaaattttacagcaataaatctacagttacagacgaaccaatcacccacttaattggttgtgtaccaatatattgtaaactagtattagtaccacttaaatgttgtgatactttttcttgtaaactagtagtagagtttgttaattaaagtcaaaacacttgtttcataacttcaaactatgtaagtcacaatcgtatataatatataaactaactttcagcagtacatttctaactaatttcataactactttttctatatctacataaatatatatacatactaataattacctttcaagttagaaaaaaaaagtgatgaaactcccatattgtttacacaatttgtaactttgttctaacgtgaaagtgttttaaagatgcaaaactttttggggaaacttttttcgaacaacatgacaaatcaactttaatgtatttgaattgtaatcatttcttttaattttggtaaacgattacttgcatgatgatcctgacgatgatgttgtgaatgtgaatgcagaagtagttgttaacgttggtgcccctgctgaattggtcttgcacgctgctgcccatgcaaggattccaattccacaatggggacttctatgaatgcagcttatgaagtggcattagctcattagctcagctccatgtgtccaaacgcaagccacaacctgtctatgagattatgaagcttcaattccctggtttgaccattgagcaggttaaaaaccctggctaagcgaattgctaaagcagaaaaggcggctcagagatgattaatcagatgaatggatgtatctctgggagttctttcttttgtcttcccattgacactctactagtaaacactgatatgtaattagcttaaactctagggttaagttataccggagaaagttacatattatcacataacttctcttttgtgtttgctgttttggctatgctatcgatcgataactatgtttggactttggagaattattaattacactgtttttgacgaggacaaaaaaataatagaatcaacatctgaagcttgagcctttttttttttttttttatgtattgctaggtgaattccctctagcattatgatgaagattctcctaccaactaactatgatataattatgtagtataatatatatttgcagtcacatccattcaacatttttcgaaaacaaatataaagtgaatattcaaagatttgtacttgtttataatttagacagtgtcttcttaaatacataaatgtacaagcattttaacgaccaaaatttaaaggaaattatgagaagtgcatatgaaaaaatcattttcatggaatacggtgggtgaaccaaatacactttagtagacaggtggggttttcttgtgaatgaattttctttctcaaatagacttttcttagaaaacaaacacagaacaaagggtccccaagaagtttgtatatcgttgaaaacaatattcaactatcataaaaatatattttagaaacaaaatgataagatataatatgttatatacttaattatatatatatatatatacttatatatatatatagtgtatcatgcatgcacaaaacacccaacgactaaactactcaaatatggaaaactagttggtcagattctaacataaatttaatggttttaattatactttggaagattagttggaatgaaaaattcaaatggttataaataaaaaacatagtttgcttaagaaaaataaaagtagatgatagctgaggaacttaatggcactttctcttctgttacgtgaagtgggaaaatcatctgtcgacacatctgttgtctgcaataaagtcagttgtgggtttgtactgccaaattgcaattagaccatcatgagaaaggaccgaccagtagagagtatgacttttagatagagacattagtcatttattctttttccttctctacttgaaaatcattttatatcttgtgtatatattttcatctttttaaagtatatatatatatatatttatttttgccttattaatctttaaattctgaaatgatatcatgattcatgtatctccacatttacaaaaataataactatatttattttgattttaaaaatatttaaacccccatctaatatattcattaatcaactgaagattgattacatagtggagagagatagaacactaatctgaattttacaaagaacacaatacataataaattgaaaaatgagttttaaacgatagttttacaccacaaccctcattcattaacaagtatgcataaatgctatacatttactatagaatctcacaagctttaatttgtttttcctcactttagttctttttattttgtttttttttgtttttaattgaggaactctatcgagagtacgatagttcctctgaaattaaatgagaatcgaactggagaactaagtaacataaccttacaaaatttaggtaacactactagctagcccaaaggtattggctctctgtatatctaagtttccatgtcttatgtgtaatctaaataatattttacatacaatctctagtgagagtaacaatatcaatagtttcattaacccatagttcatgaaatctccatcctcgtcccttgttaacaaaacggacctatggttacatacttacatatgagaaccatcagaagtcttgcgtattttctgcttgtcaacaacgatttgagttttactaaaatggaatgaatccaaacaaaaaccaaaccaaactacaacaatttgtttaatatctttctataaaaccaaaaaaaaaaaatcgaaccgaaaccaaaccatatattttaagttcgtaattttcaaccatcaccaacttctcctccaaatcaattaaatgcttttcggagactataaaaccttagttttctctataaataaactattctcttttcttcaaaaaaccaaatccaacactcgcccaaaagaatggctacaaaactcaatctcctcttcacgattttgcttctcacactaacactctctcactcacgcccggcccgacccgaatcatcatcatcaaccggatcctactcggatcagctcaagaaacactctaaagataactataacaagggctatggatcaggaggataccctggccttacaaccgaaccagcaaccggttttattttaccgggttccggtcctggcggtagttacagcgaacttagcggcggatatagcaaaggacgtggggtgagactaacggtgatgtgtgaagagaaaggtcattgttacatgaagaagctgacttgtccggcaaagtgtttcaagtctttaagccggaaaggcaaaggatacggtggtggtggtggtggttgcaccattgattgtaagaagtgtgtggcttattgttgaaatgtgaatgtcgtgggaaatttttatttatataatataatagcatatagtctttagtttttatttttgttttctagatttggtgcgttttgatttggtcaatatacccaaaatattgctaatggaatggagcaaccctagcaaaaagagaacggtgctgtcaaaaaaaaaaaaaaaaaaaaaaagagaacggtaagaggtgtaccgttactacgtttggttacaaacggtaaaagttattgaaaaatatttgacaatgtatgcaaactaatattttcctaaatgtaagaatttctcttaaaattatatttgaaaactgaaacacataaaaatagccgttaaaaatattggtgtggatgtaagatgagttcttataaaaaaagtaaaaattcatgaatgatttcaaaatacgtatgaatctgaactctgatttttgaacaaacaaatttacatgacataaaggtacaaaggaaaaattaaatctttttttttttgtttatagagcagagagagagagagagagagagagagacttcaagaaaatctgaaaaaagaaacagtgcatacacaaaccagaatgttacaaggagaactctcaaacagcggctctcaaggctcctctcgctgcttcccgtctcatttgatcttgtttcccgctgcctcggaagtacatatacacttgctgctccaacaaaacaaacccataccaaaagaaatgagtacagattataacactatgttcaaagactgataatatagtgatgggagttgaagagacagacctgaataacccagatgctaaccactgattcgaggcagaaaaatgcaaacccaatgaagtagaatatctataaacagaacagatatcagatcattgatacatataatcagatcaggcttttatcttagagttgtttttaagatcatcaaagggtgagagagcttaccccaacaattgcttgaccacttaagacatctattgcaggtaagatcccactgttacagaaagaaaaatagattacaaaaagaaggttatagaattttccaaacaatggatagcaactatttatgcaactattgttcagtggagtatgccaatgacaggtaccagaatggttactaatataccagtgttttctgaagtatgcaataaagatttggagcaaaaaaacttgtggttgtttgcttttgatcaattcaaatggattttctccacactcaaattaccaaacacagtgacaagatcaacttcaattgtttagaagttcgatgacaaagaaacttacgcaagagattttcctttgaagacgacaggtggagcaactgcagcaaagacgcagaaagcaatgtggagctgcagcaagaacaagatttcagaactgattttttttatactgagcataaatgtaaaaatatccataaaagctaattatagctcaccatatagaacaagaaaaaccatccaaagctcaatgcactatcagttctgcaaacattcaacaaaaaattgataaatcagtaacataataacattatgaaaaatatatctacactttgaaagtagagaactccaaaaatcatgtaagaacctgaaggcacggtagagtggtcgataccataacacatagcctcctggaacacccgctatgaagtaaattaaggcaagaagccatatcgtcactcctgaacaaaataaaaccaaactcttaagcctgttaatatgcatttaaggtctcttacagaagaacaagcaacatttgaaatagacttaagaaacaaaccttctcctttgatccaagctgtagtaacggcgatgatattccagaaaagacaaagaaccaaccctgccaaacaagaattacatctagatggtgtcaaccaaatgaaagaagcaacaaatacaaatctcatgcttgaaaactgtgatcctttaaatttgaatactaatgcaggaaagagcaagtatttgtatcatatgaaaaatgttaacctagaacactatacgtacccaaatacgttgcaaaggtaacatactgtagtctttggagatgaaccggaatttcgtttgcgatgtcatggtggataagtgggaagaaaggcggccagtttttcacttcaataacgattccagctgcatagagtaaaccgcaaaatgaaagattttaatagaggaacaaataaaccagtcatttgagacacaaataagttaaaacagttaataacaagttcaaaatcatctaggagacaacttggaaacaagtgcttgaaaagagtatattgtagtacctcgtgcagcagcatcttctttccgtttgaggtcctaaataaaaccaaataaaacaaataacaacaccgatgcttagtaatacgaatttcaaaaggtttaaacatgtaaccaaggaaaccaaaaaaataatcatgtttgcacttatagaaccattgcaaagaactatctaaagacggctcatagttgataagtccatgctttaatttaactaattatagcagccaatacctgctctcgtcgttttagctcagcttctttggcttggagttccttctctttcttcttcaaatcctggattccaaggcacaaaatgctatcataagtaactccaagatccacctaatcacaatatcatataataaacaattactccaatatctctaactaacctgtgtaccagctctgtcaagaggaatgtctacggttcgaccataatcgaaaccaacaggctctggaggcaaaggcgaaagtctcgaattcgacgcaggtggaactcctctagcattctacatcatgtaaaatagattcacaaccattacaaatcatttaagaaaaaacaaaattcagtgagaaacgtcttcaagattcatgacaaatagtagataaaagcatcacaaacccaagttttagtgaacataaaggtagaaactttatcaaccccatgaattacaaatctctcataatttccaattcctttaaacccattttcaatttctaagttacaagccagtagaaatcaaatcaacaacaaaataaaaccctaagtaaaacccaaagattaacaagattcaacgaatcaaccaaaattgaaaaacccaattcggagaaagatcaatctctagtttttacgagttgaatcgaaaagtcaagaagcttacagcgaaaggattgacttcttcttcctcagcgaaaggatttggatcataacgattagccatgggtatgaaaaaattaaagcttcagaagattgaaaaagctagttatcagaagaagaagaagacgaagactttagaaatcgatctaagatcttagcacggaccaaggattagccgaacgttgaagacaagcttatatgaagacacaaaagcgtgtctttttagtaaataattgttctttttttgctatattgctaattaccatttatcttatctgaatttattcttaatcctccttagtactttacactttaaaatatttcaattttattagttgtaaaatttgtagattcattacattgatgtcattatcaccattgtaagacaaattaaatattagcctttttttagttattcaacaactgaagtttcaaataatttgaattttctaatgagtacacacacacacataggaaaaaattgaaattgtcctcctttggtcaatgatcttgtctgcttctaagaacatttgaaaagtaacccatcacatacggcacaatttcgttttatacaaaaattgatattaattttgaaaaaatgctcaagcttgaaaaaaaaataacttttagaaaaataaaacaaaaactttaaattttgttttctctgtcttttatatgattgattgaaagcttttactttataacaagaagatatatgtttttaaatctttttagttatatgaaactgattgagagaacctttaatgggatatttcataactttatatctaaatcaaaaagagggtttattgagaaaaaaagaattgaactttatccttaattttttaatatgaacacttttttcaagaaaaatatgctcatataattggaatttaatcaaaatggagagagactgaaccattaaagaagatcatgaaaactacactaatcaaagagaggtaaatgattaactattaacttatatataacaatgagaccaaccaaaaaaacatttctctatatttaatctgattaaaactgtatctgtttatgttgtagtctcttcagctttcctctgcaataaacttggaatcatactacttctttttaatctccggttattgcctattcggttccggctcggtgaagaccgctccacccagtatttgtcttctgcaaccgcttggttccaccgttctttaaaagcttgcagctcccacgttgattgtctccgtatctgctcacaaaacacacacattacactcctgctctatagacgaaagaaagttcctaaagcagattcatcatcaggtaataataactcacctctgttcttgaatcaaaagtcgcagaaccgcgtctctgtacataagaaaaaagtgaccaaagttgtgaactttctgtttgttttacagtaaacaaatgaggatttggatagttacgtagcttaccctatttactccgctgcgagctgagttctgtggaaattaggaagagattattcgtttatcggttttgggtatacatacaaggagaataggtggggaagtagatgatcttaccttcttatcgggataaccgcttccacctagtgtttgaatgccttgatggaagatatattcactgtcgacaatgcctactttcttgctacggtcaccctaaaaacgacattttcaaaaccgattcatctagagaatgcaatcggatcacaatgctaatggagacgagtgatgttgcaaggtcttaaagaagaaaaagtctttacctgagcacagtatccaagtttcatatccattccccaaccatgaaccagatcattctacaaaccgcaaaaacaataagtaggatgcaatttcatttaaagaagaacagatatatttgtttataagcattcatctcttaaaattacttgtattagattccaagtgcaaaaccatgcagatctcgaaaacactggagccattccttcaacaaatctggaaaaaacagagaaaaaacagacaaaacaatgacattaatgtctgtgttttggcatatagagaagtcttaaactgttatgctacttaagaaattttaccctgtgcatgggggcccttcactagcatttgaacatttcatattgcctctactatcgtaaactcgcctgcggttttgttatcattttgtgtaagtaatcgaagacacaaattatcaagagaactacttaacaaagtggttcacaaaatcacaaggaactcacctatgaaatattttcgttctagaccggactgtaattctatggtgaacttcagttgagtttgggtgcaaggccggttgagatatctccagtcccgctgttttaactatcctcaggtacctgtagagagactgcttagaaaaggcactccaagatttgatctcaggtaaattcacaagtgaagttgtaaatggaattttacttttgagggttgaaattctccactccaagatcttcatcccaaagaaaaacataatcgtaaatggagacaatatcaggatggagaaaacgtttcgcaaaccacctgagtaaatatcattgttacaagccatatatatagttgatcttcatagattttatattggaaacatcactataccattttgtttggttatgtgcaacaatgtgtatggcttttgagctccactctagatcccaccattgatccatgtttccatcataatgaaatagaatgacagtgaaattcgcaggaagaaactgaatacaacaaactaactaacattagaaacagaaaattttcagtaattcactgatctagacaaaagcatacttaccttctttacaacagcatcaacattatccttttgcttaagtcctaccggcattgccaacaagttacggttggtcaattcgccgctctgttgtaagacaacaacagtctattagaaacttcctacagcaacaaatatatctgattcctctatctaaagcttacagaaaaatctaacctttgacctcaaactactacttgaccaaagtggctttaactccaaatctgatttaggttgcatgataccaaaaggtaagcctttcaacttttcactgaccggttcagattcctgaacaagatccacacacatcaacttcagaccagtaatgcatcaacattagaaacaaagatattcaaaaatgttacctttgccatctcaaatggataatctgtttcttctatctgagtaatgcatatagcaaacaaaagagagttacatatcaataatcacatcgttatatctaaacatgatagctctgtcttttccacaatacctctgtttgttcatactgaatatttgtagtcttataccaaaagatcaaaagtactgtacacattagcaccacaactggtttcattttccatgacgatttaccctgcagatttcagcattcccacatcaaaatcaacagcataaaccaggaatattgtggtgagatacagagaaaaaaagcttgacttaccccttcttgagcattgtttcttctcttaacaagtgacttccatgatttaatagacggtaaaccatgttccataatctatttaccgagctacaaaaaaccacacacaaagcaatattcatcaattcccatacaaacacaaagacatttcaaaatttccactatctgaaaaactcaccaaagccaccgtctttgtgttgttcccttcacaagaacagaaagaacaaagaaaccaattcaacaaagcttcaccaaaatctcagttctatacaaggctgatctacgcacatgcaagaatgtatcttttcgaaaaatctacaaaagaacacaaaaatcagaggctccacataccaaataaaaatcgaaacttttttagcatgtattctaataaatctgttctacaaagatgagatatcttttctggaacaatgagattataagaagataaaaagcttaaagagacacacaaagatggcttcttacagagttttactcactctcacagacacagacgaacacaatctgggccactgttgaaagcgaaacggctaaggattcgtataaataaacgaatagaaacaattcattaaaattttcttggagttttgttatctttctccagatctagggaaagtaaataaactctaaatactaatgatatgaaattaaaaagaaaaaaagttgctttggttaagacattaattaacaacaacaaaaattagtcatttaaagcttatatttaggaagaaatctggtcacgaactgttcaacaaattacaatgaaaaattaatggcggtgcgataaatttctaagaggtaatctttaattaaagcatagacaacataaaagaaactgagtaagaagaaaagataaaaaaacagacacaaaccttaaagagaagatatctgaaaacttgaaagattgcagagtcactgtaatggttaatgaagcaaaacccagatggtaagtggtacttttgagagaaagtaaagtgtttacactttaaaggtgagattttttaccaaaaccaatttcaagaatcaatcgaaaccaaacccaacaacaaatgttctacgcggaatcagaagaaaacaaaaaagagagaagaagctatggtggagtgattcgtgtcatctgctgaatctatctctgtctttctcttcctaaatataatagtaataattaatttaattgtttattaagttggattctgcgaccaaatacgagaattggaggaatgattttttaaaaaataagtttagtaatgtgtggtgtatttgtttataagaaaataaaaaatgtatttttgattaccatgttttgcgtttccttaattattttagtttacaacaactttcaataagaaacagaacatataagtgtgtctggtttgctcttgaagcaactccaaatccaaagctccaaaaagttttctacttcttgggttgttcaactagaacatgacttattggcactaactagattcgtattggcttttgtttttcagatttgtttaaagtttgttagctctcaaagatgctaaacgttaaaccggagtaaaccagcttggcttgttattggattgaaaaatactgcttttattggatgttagacaattcaggaaattaatgtttaatgctatcaatttatttagacaaatgttttttataattgagtagttatttttaaaaaataatttttatgtgatgtttaacaaggacttgcagcaaattacgtttgcatgttgttgatataaaaagagaaaaaacaaaataaaaactaggatgattcttattacatgagagattaaggatatagtattaagatgatcagtgggtgatgggaatgacatgaaccccaagctgatgaatcatgttacttgcttttccatggaacccaacgattttgaagccttctttctcgagtagaaagcttgaactagattcgaatccaaaggatatagatgttcgtttgttagtcttaaacttaagcatggttatagattccacgtcaccctcaattcctttattgtaacagccctccaccgctgtgacatattcaccaggatactcaaggtccaactgtgccagatcaacaaaaatattaagctaatatgttcccaaagataaatgtaagaacaagtttgataattagaattacctctttgacttcaagtggtgttttgtttccatgatcgtctccaataaccatccgagtgtccttgtcgtaaacgaacttgaggaatgcgataccattttcacattgtcctacatatatctttctaacaccatcgtaaacaccatcatcccaaaaagctcctcgatcataacctcgtgcttctagtttctccgcattaggaggacaaggcagcagagaaaaatatgcaccaatagcagtaagaaaaccaagaaaagtccatccatggaacccagctagagcacaatctttggtctccaacacaaatttagtcccagtcacgcttccatatgtcggagaaattctcccttttgatgttttgaaaaccaaagacgtaacgcacatcactttcctcatgccagagtttttgaaagtaccatccacagatgtgataaattcattgggatagtttaactcaaactgtattaaacttcttattttagatacaagtcaagaacaagaagtatataatcaacaagtataagctatcaaggaatctgacctcttctactaatgatgtgttattcccgtgctgacgcttcacaactgagtgattactgatgtactcaaacgtgatacacgctacatgattgatagaataactaacatacacctttcttatgccgtcaaaaacaccatcatcccaagactcgattatcttactaccgtgacataccgatttagtaacagaaactgttgtgaaatatgctccaagagaaatgaggttcttctcagcatatccatgaaacccaataattttctttcccttgtctgcaagtgaaaacttcttacccttttcatatcctagcagctcagaagtctttatgttagttttgaattgaagtgcttgaatggctgtagactcgtcatcatagtaaccctctacagataccaaatgttcattgttgagatggtcatctcaaactgaaaacaaataagaaaaagaaaatggtggagaaaagagaggttagaaatcatgccaataatgagaacatgggaaattccaatacataccgcctgcgagaaacctctacccgagagaccgtggactgagccaattttaggctgtccactcttgacatagtcgaacttgatgtattgaatgccttcaaaaccacctcttacatgaatctttgttataccttcatggtctgctccatcatcccattgtatgcctcccttgctgccttttgcttctaatctacaatcaggaatccatgtgaaatatgctccaagagattttactagtggattgttctggctttttatatatccatgaaacccaatgataatctttcccttgactgaaagtgaaaatttggtacccttgccatatccaatcagttcggaaaccttgaaattggttttaaattgaagtgcttgaatgtaacagggtgcatcgtcgtaataactctcaacagattcaagatgctcattgttaagatggtcaatctcaatctgcattagaaaaataaaagaaacaaatattgtcattccgttattcgcaacaatctgattttcgtcgagattagtcacatgaaatcggataaaacaagttttatttatgtttcgaattgttatgctctctatagcctaatatattttaaagtcataccgtttgtgtgaaaccactcccaaacaccaaacagttctccacttttcagctgtccgttcttgaaatattcaaaatggatggtctggatacccagtgcagtgcccacacttatcagggcttaaggcgaagttgagattaatagccttaccaattttttctttaataaaataatttcgtaactaaataaattattgaaaacaaaacaataatataactaaaacataatttttcttccttcatctttaattaaagcttttaccaaattatcataatcttattgttgttttataatctcaaaaacatgttgctaaagatttataattttttttaattatcaagtcaccacaatcattatttataaacaaaactactataaagatgaattagtatatgttaagttaataaatatttagaagtgctaaaacagattccaactgttttaaaataaataaagtgaataaataaaaccattaaaaatagattagtcacttttaagagaaataataaaaaaattatatgaatggaaaacagtgtctttcaaaaccattatgttacagcatcttgggggccttaaaaaagttttagattttgaaaacatgaggcaaatgccttttttattacccataggcacggctctgtggataccggtatgaccaccacgtacatgaatcttataaattccatcatgttcggatccatcatcccacttatcgcctcccggtatgcctatcgcttccaacatttcaaccattgtgaactgaaggagatagagatgacctcaggtgtatgaggcgagaagaatacttgatgagtggagagtaatgtcgtgcctggtgatctttaaacgagagttgatcatgtcttataaattgtatacaagtatcgagttttcgacaaatattttgcacaatatcataatagtgaaaataatttaaaagagaatagtggaaagattgcaggccgaaaggctcaagaacgtgcgtttgacaaacaaatggagaacaaatgacaaagacttttcttgaaactctttaatccaccaaaaaaaaaacgtacctcaaaagagttggtcattagtcgaatttaccgggatacacgagcacaataaatctggtgtaattcaagcacttcaattcaaaactaacatcaagactttcgagctgatgggatatgataaaagtaagaagtttccacttgcagatcattatcccactgcttgcctcccgcaaccattcagcttccaatcgtgtttgtcataatcatatatcccaatgattttttgtcccttgaatgcaagtgaatacttgttaccatttatcatatccaattagttcagaaatcatgaagtttgttctgaatagaagtccttgaatgaaaccggatgtggcatcatcgtgatcaacctcaacggattcaagatgtttgttatcgaggcggttaatctcaaactgctaatatcaacataaaattcaaataaagggagtttaatttagaatatacttctaagagatacataaacataccgtaataaatagagcttcacttttcaattgtccatatttgttgacctaagaaaacataagtgggatgacggatctgaccatgatggtgtttcgatccctggacaataactacatcatacataaatttctgcaacaccatcatggtcggattcatcatcccgcttatagcctctcttttcgaaaatgtttctgtcaccctgaacggtactgaatcttcttttttttttttttttttttttttttgagcaaaacggtactgaatcttcataccaagaaaaaaggatcttgtgttaatcattttcagtaaaaaaacactaaccttttaagtcaatgatccaatctaatatctagtttaaaactaatggggctaaactaatttgaagaaaacagagaagaagatcaagtttttttattcaccaacatttggataaatttcttgttatacaagtttacaaaacatgctaattacaattagtcaataacaagtactttcagattcagaataattatatttccgagtgtttagatgctcttcaaattcatctctctaatcaaaagcatattgttaagaaaaaatgtataattcaatcaaaaacatatagctccattgccttgaacagataaaacaaatatcactttccaatcaaccaaaaacataaaacagtatcacttttgagatgtaactaaaaccatgttccaaaacgaccaactggatataaaatcaaaactacctcgtgtttgttcgagttacgaactaaatccctgcgagtcgatgctcctcaaatcgaagcagccctaaccttcacagttgtaggcgaaccaaaggagatgcattcgtgtgatctggatcgagaacgtcgcgagtctaataataaaggaaagtagtgctttggtcgtgtcaatgaaaacgacgtagttaatgacacactaaacggcgttaacaacgatgtgcttttttattttgaccggtaaaattcttttttttatgtcgtctacaaaaaaagaaaagaaaattcgattacacatggtcattcatttatcaacctaactacatgcaatggaaaatggtcaaaattaaccggaacaatttgtcagatgaatggtcgtttcttacacgaactgataaactattcaaatttacaatctaaacttaacaacaatagatcaaaactaacattgattttgtcgtgttagtcaaccattacgttttgctgactgtattaccacatgtatcgctgacgtggctagatataaatcaaaacgacgttgtttttctcggtttcatcaatgtcgaagtcatcgtcttcggagtcgttagtctctggatattcagtagttattgtctcttgcggaagcggattaatcgataatggcaaagacaaatactacaagaaaacatgcaatttgggactttttcttgtgatttagccttcttattagaaaaaggtatgaaatgactcgactaaaagaggaactttactctttttgtagtcgcaaatatttgtgatgttgttaatactactttgtgactatgtaacgacgaacacgacaacaaacgcaaaatcgttgcaaatgtaaaccgttgcaaaccattatatacttcacaaatggtctgttagtgatcataaacacttacaactaatgtatttacatccctacgtgctattgaacaaccttctatcaattttctctatgattagtaaataaattaaaaggtgacaatgagagaaactaacaatgagattaatatacattttctttaacaattagttttaccaatgatcatgattcatcactgtctatgcctgcagattagattgacccaaatataaactactacatcaaataagctttctctgcctaactacaaaaaacatatgaaacaaacccttcatacaaaaatcatctaacccggttccgctttctccccatcaatgcaggagattcgagtccgcgattcgcttgtctaccgtcttttcttaccgcagttcccttcttacccgctgccgaggatttcacagcagaaactggtaaatccgtaacagaccttttgttacccctacttgaagtctttgccatatcttgcacaaccgttttaagagggtgcgccccggttcttggttttttagctgccagactcgttcggacagaaggagatgtcgatttctgatgaagaaccacaacctttgtgcttccagcagtaatgctgctgcgatgaggaggatgatcttctgttaaatagtgtcttagagacttggtaacaatgtctctaagtcccaccgcggatttgtattctcgagtgttcttagagtaaaaaatagctgcattgttcgccaccaaaagaaagtccctaaaaagctctttcgccgaagatatcgaacaaccgttgattcttgattgtacagtgtctaaatccatatgcctccgtactaatttcttgtatcttcctcttttctgtttagcaccaaaaaaaagaaagagataagcgaaaaagtggtttcaagcaaagactaaaggattactatatatgatcatcacctggctatcaagccgtctacggaagacgagtgcacattcgttctgtgcaatagtgttgtatatcttcataagctctttgggtaaagccaaactgtgacctcggctttgactgctgctagtagaagcagcttctttactcctataaatgctagcaatatccgcagatgtatcaaacaaatcgctttcttccacagcgctaacttccatcacttctttaccgacactgacactgcaatcttttcgttttctcttgcctcgtttcttcctcatactcggaagcacttgtcctccacctccgtacactgactcgaaaatgtcgttgtgtaataggtctttcgtcttctcttgctctattaccactggagcttctgacttagcttccggtgaccagtttgttgtggtcagctcttgctgtgtgaaactaccaactgatgacaagtctttggatgtatctttgctcgtgcattctcccccgccctcggattttggggagggttcgagtgataacgttcggctagaatcataattgttttgatgacattcatcattactttctgacttcagactctgaagctttgattccaaagacctacagacagaatatcatagcacagaattgaacattcaaaatctggttttgcctttgattccaagacataaaaacgtttaagccaataaaaagaaatataagaaacaaatcctaacccaatagagtcttcggatttaagtaaagctgctttaagctcagctactcgtttcttcttaagctcttcaaaccaagctctacaagaacattatcatataagtaaagtttaggtcacaaaagtccacaagaaaaagtgttgaagaacaaggaaaaaagaatctttacttgcatcccacataacgttttcgcaagtctttgtacttggccttgcatatctgcaaacaagagtagaatttagcagattcagaaagagagacaatgtctgcattgaccctgatatatcgccaaccacactgacattttctaatttcttgcataactaaaacctatttaggaaacttcgaattcaatgtggttatctttcacagttcaagcagaagcataagagttatttacaattgtctaacaagagtattttttttttgacattaccctaaacctttcttgacacacaagtgataataaatctatgcttctaaatctaccgacaacaacactgttgttctgccttaaagccttttatcttctatttttaatttttaaaaattagtttcacatcaacataattttttttttttttttttcacattaacataacaaattttgcttaaattgcctaaaaagatatcaattttgattctgacattaatctaatcgaaattttctctgagtcaaagaaaatgaggagattgagacaaaacctcaggtgtgaaaatctcaggtaaagaatgagaacggagttcgtcggcaacgacggtccaatcaccggttccatgacggagaacagcgccgccgagaagaagctcctcccatgttccccaatcactctccattgtcgtcgtcatcatcaccataaccatcaaaaataataatcacgcgtgtgccttacgcgctcctcgattttgaaaaagaaaaagaaacccaaaacttaacttacgcaccccaagcgcatgttagcgctttccacctaattttccctttttttctccgaccactcaattctcaaaaaaaacaaaaaaaacagagacagagacaacaaaccaagaccaagataaaagtttgtaatctggtatgataagacaagaaaccagaaaaagccgttacgagtgggtttgtgtcggaggtaaattacacgaaaagctgttttccgacaagaaaatgggggagaaaaattaaattaaaattcaaaattagtaagaaggaaagaaaaagaaaaatctgaggtgggagagaaagagttggcgaagggtctggatttgttcgacgtttgtgaaatggaacaaattagaaattgatggttgtggtttgttttatttgttttttcttgttttgttcaaaaggcaaagaagaagaagattggtttgtttttgaacaaagaagaaagacttgagactagatttgtgtgcctttgtttttttttttggtctaaataaagtaaatttttaatttaaacagaatttttctatcttttctttaatttattcgattttttccgtcattaccacaacttgttggaataattattgttagataatagtgcttttgtatacccaaaatccaaaataattttaatttttgatagtttcaccgaggataatataatgaatgatataacggatattattaaattagttctctttataatctgatcaatataacaaaatttcaatacatcattcaattcagtcaccaaactaatatcatgattaataatcactagatttaagtttcggaaagttcattaaataaaaaaatctttgatcataatttatatacttttcaactatttttagaaatactaaatgtaatccaaatttgctaattcgtttgtatgtcccactatttaaaagagacaacaagtttcttcgtacattccttaatttatttcctacttaatttatttcctacttttgagatagacgaagaccaataacaaagactgtaattatgaagactagctactatctgaaatatgtcattatcacatttggtagataaacaatctttgataggtctatattctaacctcaacatgacacatgaccaattccaaaaatcagatatatgtcgagggaccaaaagtggattgccaagtgaaattcatataccgattgcgtcttctcattaggattgcacattacattcacatagaacgacattgtaattgccatttcagctacacatttgagattcactgaatcaagaatctgaagcacatacaactctaatcccagacagattgatttacagcaatataccgagtttttccccgagtgacttttcatgttctcctggcacaattctatatcaaaccccgcacaagaacctgcgacttttcagcgaatcttcaatacaaaagcaccgggaggaacatgaagatggttcttgataatgtacattgtacaaattggaaaactcagcaggagggggttacagttcgcaagtgattccgagtggtcttgactttgaaccaggagctatggtgtttgaagaactaggtttagttcttgtgcctttcttgctataagaccacctcttctgtaataaatggaagaggacggaaacaattacacaaccgaaagcaaataccgatcaacaagagctgtcatgctcgcaatggtccataataagatgtgtaaaaagtattcttttaccttgtcagtagtggaagaatcttctgaaccttttgcaattccgcagaacagctttggcagatctgtaacctgcagttctcgatttgttttactttctcgaaaaagagagatatgtgtgacatgaagatataagaggagccgaaagtataagtacctttcctctgcatgaagatcaacgccgacaactcgtcgtgctgaaacagttgattgtataactgtgccaaacactgctacaagcttcaagagcatttccaaggagacatttacaggcctatacaaaattgaaatcacatgttgctttcctctgttaagtcaaaagctcatattaacatataaacagtgactgtaataaacaaatgaattttcttgccattccctcattcacaagccaaatgatggagacgactatatatctcaaactaaaagcaaaccaaagaaggttgaatatgggataaaataatttacctctcagtcttgctgcccaataagcctgtgaggacgggtgctaattgagaaaataaatctaatgttaaaatctctgttttgtctgttagaatattgatcacatctgcttgaacctgttccagtttaagcgagtcagctttttccaaacatctaagcattaaaaaagacaggtaaaagtatatctactggggtacttacagagtgatctgacagttttcttaaggccgcaatcgcgcctttaatatcactacgttcccagaaatgtcttacaatctgcatggttgtgatatcagccatttagtttatcctcacaagcaggaaaaaaagacacgtaaaggaaaaaccaaacagaaataggacaagagaacaagagaaaacgatattaaaaagaataatagcagagacaaaatttacctgtaattttgtcaaccgtgattgaagagtgtttaagacctcactatgagttcgcattaaaatctcccaaatgtcaccatcatcctctctcccagatatctgaggctcttccttctacaaaagccaaacaaatcaaatacttgttatgtattcagagctcttccaactttgtaatcctagcaatttcatattttctgtatagcatcagcgactatattcaattatacaacaaactacatttcgaagttggagaaagtacgctgtctattagtttccaaaacttattaattgaagcttacctgggtcaagatatcagaagattgttgagtttttgtagtctcatccagtgtcatatcagtcacctgatcaaatactgcaggtgttgccagcgtttgagttggactaaatctttgcctggatcttatatgagatgcatcagctgtcacatttgttgcttgattaagtttcacaggaattacacgggcgggagagttcctagctgatcgtgttaatgcaactggaggctcatacgatggcatattatctgcttgattgagtttcataggcattatacgggcaggagaagttctagccgatcgtgaagatgataaaggacgctcatcatacgtggtagatgcttgattgagtatcacaggcattactcgtgccgaagaggtcctaagtggtcttgttgatattacaggaggctcatcagatttcatgttagttgtttgacgctgatttagtatcacaggcgtaactggggctggagaagtctttgcttgtcgtgttgatgttacaggagactcatcagatgtcaaattagtagctgaaggcctatcaggccgtgttgatgttataggaggctcatcagattttatttttgttttctgattgagtttcattggcatgaccggtgctggagaagtcctagtttgtcgtgatgatattacaccagacacatcagatgtcaaatcagtagccgaagtcctatcaggccatgttgatgttatagaaggctcatcagatttcatttttgttgtctgattgagtatcattggcatgacgggggctggagaagtcctagtttgtcgttttgatgttacaccagacacatcagatgtcaaattagtagctgaagtcctatcaggtcgggttgatgttacaggaggcgtatcagttgccatgctagtgtcccgaccgagtactacaggcattactctgactggagtactcttagttcgtcgtgttgataacacaggaacgtcaactgtggtcgagttagttgcctgatcaagtttaactggcattacctgggtaggcatcatgctaactgtctgtaccgatgctgtcaggggctcttcctctacagaattagagctatgaactactgttgcactggctgctttatcttcagaatgagtaattttttctcctctttcaaacctctcaaccaatgaccgtgtccttcccgaaacaacttttactgcaaacacagcagtttttaaagaatcaataaccagatgacgcatatcctaccaaagaaaaacaaagacagcaaactttgaatggctaacctcctctaacaaccttcacagattttgattctttgctacctccaggggattcaaggcctgcatgacaaaatattcataaccaattataaaatgattgctgcctgaagaccgagactcttgaccacaactgacaagaaaactgttaaggaagccctaaaagtagctaaagatttagatgtagaaacctacaagctaatgctattacttttctgccggctcatttttccagattgatttttcttgtagacggtctttaatttaatacctcttcttaattaacagttttaaaaggtgaaaggaagccaaacacataacgtttcactagttttaacattggctttagaagcaaaaatccccattaattagtctacgccacttttgaatcaggaacttactttttagttcatcaccagctttttctggtgacagaactctttctgacctacttgaaatgctcttgttctcgatatcttcctcacatgggttactacctctgtcatccctgagccctgttggcaagtccatgtctcttgaggactctaacccattctttttactgtctaaagctccagaatcagtagatgtcgcccatcttgcctcattgtacttagtacttggtgatctctgtacacgaggcggtttcagcagcatacctaagtcaaagattgcaagatttccaaaaggataggattagatcatctgaacgctcaaatctaatgaaactaaggtatgaactgggagaacctacattttgcttcatcagtcggtgattctggtaataaagcttgttcaaacttgttggtgatactcttgatgatagaatcgtcggcatcatatgggttcctaccactcatttctgaatcaaacgccgtctcagtatctagtttcttctcaccatccaatccacttttctttagatatccaacagccactgactgcttctttgtttcatcaaactttgttggcgtctttcttacataagccggtctcaacagcatgcctggctttgtttttgagaaagtgatagattcctttcctgaatcagaagagtctttcccaatatcactatcccgtggaacaacactatgcactactaaagacttattatcccctgcttgtccagtagaagttgctggagtacttagagatcctgacttatgtgcaacagccgaatttccgcctgtagctttgaagagaagagagaatattaaaccaaatataaacgataagcatacagaagtgagagacaaatgaaatttacactgtcgcaaaacagaaactgacattaaagactaaaaataacagtccaggtcacacagtggttatggctagcgatatttaatttattcagaaacgacgaccaccatttcagtctcattcaatttcaataggtacaaaatttaggaatatacaccaacacatgcacggaaaatatatgattagagcaggcctaaagataaggtagctttcctatcactaatacaagaaaaccagagtcagtgatctctgctaatagtccattgcaactaatcgttaaatgttgattcactttctagatataggtggttgagagtaataagtaagctaccgcccagggacttctcaaaacctaaccaaaaacctgccatatcctactctaaaacgagaaacttcaataagttcaaggtagaaaactgaatctacaaacatcgaacaaaattaacattcactcacagtcgatgtatatgtttttgatctctttcgtctcataatctggagatgagctgcgccttggggtactctttattctatcgaaggactgatcatccagagcactgagtattttctccacgcactcttttttatccgcagatccaatgccgtatggctcaatctgctgtgttaattaaggataaaagaaaaaacaaaaacatgagccttcaaaacacttatttaccagctcggacataaatttttagaggaaaatcacaatagctgacatactgatatatctgagacccaaatccctactgaattttggtagtatgaacaacccaggagctttccttcgctgatgcataagtcaccaagcgttgaccatcccatatcaacaccatcatggcaaaccacaggttcccatgaataaacctgaattatgaacatcagcttatgatatcaatgtttttgactctggagaaccctttatatggtaaagctcatcacaaagaaaatcaaaacctttaagctgtcatccaaaccacaaaataaggttcgcccatccggatgaaatttgattgaacgaactccagtagcctgtgaaaacaaggaaaaccacataccacataaattgtgtgaataacatcttccgagacggctacaaagctagctcaacgccaaaacatatttcatcacatgctgctttctggactccgttcacttttatttacttctaaatctttttaagaactaaattttatcttggcatttctctaacacactcttcagatcaaggccgagaataagcagatttctgatattttttatgtgtgagatttcccttcaaggtgatcacgctaacaggaaataaacgtaaaaaacacttgttatagagtcccctagaaaacagtatctagtgacaccacaggctagtacctctggtcgggtagatccaatcaattcaaacgtttccaaatcccagaactttacagtcctgtcagcagaacctgaatatgaatagggagagtgtgaaatcacaagaattcaatataaaactgtgattaaggaaatgtcagtagttaatctaccaatcgaaaacgacaccaagttacccctataatgcctgaaaaacaaagaatcacagactaacctgtggctaggaggaactcaagcgggtggaagtctagcgaacggataggtccttcatgaaacttaaattcatgcaaaagctttccagcagtcaaatcccatacctattggatacaacatatatagcagtatcgttctaagatcataagtttgaaaaatatgatgcacaagcttcatttgttgaaaatgctgttcttacctttacaacattgtcaagtcctccggagactacccaacgaccatcgggagtaaacctgatagtgctgatgccacgagaatgacccttgtacgtctgtatgcatcccttcttcctgatgtcccaaatctttagattcgcgtcactagatcccgatgccaaaaattcaccaaagggatgaaattcaacagcagaacaattggatctatgtccagtaaaagctcgaaccactacacttcaagagcaagagtgaaaatgttagacctcataattctaaactaaaagtctggtacactgctcaaataaccaaacccataatccacatagccgataactcaaatgatatccaatatattcccattaaacaacactagctcaacataaaagaagcaacaaatattctaaaacaaaggagagcagaaaatcaataaactaactctttgcttcttcaacatcccacagctttatcacacccgaagaagctccagcaagtaccaaaacttcagcggagtcaaaagctactgaatccactgcactagtatgtccacacagactctgccaataaaaggctatagcatcattcttctatccataataaaacacaaattttctgtcaaagacatactgaagaaagcaaatgtgaaacaaaccattaaagaagtaggcttgccaatcgcccaaagattgactttgtaatcatcaccaccagttataaagagccgtgatgtcttctttccgatacttagacaattcacatttgcagaatgtgccaaaaactcctctaagtttccaaaatcaagttaagttataaacaaacccacagagaataacatatcaacaaaaataaattcaaagcatatccagaaaaaaaaaattggagaagacaaacatattaattgcagtgtctttttctatcaatttgctctcagtttaattaagcaaacaataatagaaacattttgaccaaattgacgaagagctaataaaccaaagcttgtttatgaaataaaccccaagcgattcagtgataaagaaactgttaaaatttctcaaaatcgtcaatataaggatacgtagcttataaccacgcttcgccattttttaactcgattttccagcgaatccgtgagggggaaatagaaatttgaatctggaatcgaatctgtagcttccggaatcgatttaaaacggtgaatcggagctacaaaaatccgaattgtcactaaacgacagaggtcgagattttagggagatttcaaagggagggatatgagaagagatcgctttccgttgagatttgaaatccaaaaaacgtgagagagaatcagattcggggaagaagattgaaagaaacgagacgaaatcagattcaaatagtgacacgaagcagaattaagaaagaaacagagaagaagaagaagaaattttgataaagcgaagaaagttttttttttttttaatcggtcggtaggttttttaattttttaaaaaatttaaaaatataattaagcatttttcttggacagtggacctctagtttcttcgttgttcgttcttctcggttctgacgaaaacacccttttgtccgggcattgaattcgagtggaaattacgaaaagaacccttgcttccaattgacttctattggtacagtttttttctccaactccatcataatttgttagttttcttttgtcgaaaatattatttgattggtgaggcaacacgtcatcatctcttggttttgtttgtttcttgaagacattttcaaccttaggaatgaattatagtaatttcaatccatagatgtatgatggatgctaactgacgttaaaaaaagaagaagattatgatgataattgtgtgtttttttttttgacgaaatggaattatattgagcttgaataattcaatttcaactgttgttcaagacaaagtagcggtttagctacatcaatgtaggaactggaattcaaacaaccaaattttgctagtttatgagccgtttcattacatcgacaacatttcatattcagacaaatcagtttttatttttttattatttaacttcttgtgccaatagataacatcttggtgtataaagatgtgttaagtaaaaaaaaaaagatgcgtgagtagaaccaataaccggatcatgaagtaaaatgattttaagaagaggaaaaatgtcgttttatacgcgaactttcaaaaagtggtcatttaatacgtgaactttttgtgtggctaaataaaacataataaaaacgttgaccgatcatttcacacaaatgttattgttgaccaggccaaaatccccatgccgttatctttcattaatggatatgttagttccgttaacacacgttaattaatttccgttaatactcaaaacgacgtcgtttcattgaaaaaaaagaatcaatattcccaaattgatttcaaaatccctaaattccaaaatggaatccaattcgtttttcttcaatccatctgcttcacatggcaacaacatgttcttctttaggaatctcaatcccgttgtccaaggttcttttctcactctcataatcttattttaccatgttggaagtttccctgtttttgttttgttttgttgtcttgtgaataaaatatgatgaacacacacacatgagaaccaatttgaatatgaataacaacattgactattgacagcagttgttcgtttgaatttatgaaggaggaggaacaagatcgatgatgaacaaggaggaaacatcaaagcgaaggcctttctttagctcccttgaggatccctacgacgatgactattacgacgaccacttgctgaaaataagaggctgttagggatttggtttttagaatttaaggatttggtttttggaatttaggaattaaggaattaaggattttttggaatttagggattttgaaatcaatttgggaattttgattcttttattttaatgaaacgacgtcgttttgagtattaatggaaactaattaacgtgtgttaacggaactaacagatccgttaatgaaagataacgacatgggaattttggcctggtcaacaataacatttgtgtgaaatggtcggtcaacgtttttattatgttttatttggccacacaagaagttcacgtattaaatgaccactttttgaaagttcgcgtataaaacgacatttttcccctttaagaagataatattatagtgatttgattgttgtgggatatttgattttgttccgtaatatgttatcttttcataataaaatttatcaaattattggacaatttttctcatttcatttaactattgagaaaattatgctaaatttttgtctcatgttaaaagttgtccacgatagagagtagttaacatgttttgaattgtaagaattcaagttaaaaacaattcaggaacaaaaaaaaaaaaaagagagaagatattctatgagacatttgtaacattggatgaacgaggttcaagaccagtgaacgattgatcgaaatttgagtttctgaatttggtataagttcttgttttaaatggtagttgatgtggtgaacccattcactacaggagaaaacaggctcttgttgttgcccccaaatcagaaacctaccatgcactagacattagatcacagttttagtatctgcatactagctaggtttagaggacctgagtttatgattttcacgatttaacaaaataaaccatcacccaaatgaatcacacaaacaagctgcaagctaaaacagagatgcaaaaataatacaataaaaataataataacataatccaagtgaacaacacaacacactgcagaaagataaagaaattatacaatccaaatgaacaacacaacacacactagaagaagaaatataaagcaatagaagaagaagcgtggattccgattttagacagagaggaatccgaatccagcgtaaagtttgtttagtcctgtctaaagaagaagaaaaagaaacagagttagattcacatgtggaagcgaagtcagatccttcatgttgtggcagtgagttatagacacgcggcataggttggtaaagcaaggaattgtgggactgtgtaaatcatacgagtccgtcttgctttctttgcacttcatatatgtatcaatctctgaaacatgacttctttccacactgatcatacgataatacgagattgttcatacctactagcaaagatatgttgaatggcttttgttgaaaatccctaatctccatatgagtaatgcagctcgccaacctttgatcatttgatattagctccaaactcaactctgtggatatcgttatggttcgaacttgtagatgctccaagagctgcagctccttcactcagcttacatctccatgaacattagaatatagtagtttcaatattcttaaactcgaaaactttggtattccactgagactaccaagtctctttgcacaatccaaattcagctgagtaagatttttcaactcttacgtaatcttcaggaaacagagcacaatataagaaacacgacttgatattttcatccaccaagctatcgtagctgtactttagaattggaagaattttattttccatgtcagaaaaatctgcagcggatctagtcaaaacatcgattgcatgctcccattcttgtaccatagttttagatgtcatctctcttgccaactccacaataacaggatctctacttaatgtgttgtctcccacctttgtagagattcccaatccttgactattggttttgtggtggctctgtagagattcctagatctcttttctgaggggaggcatattcaaattcaaatccttgatttgatgcttaagtgatagcggagaaaacgaactgagtcgtaaatctagttagagatcataaacagagggataaagaggataccataacacgcaacaagattaagaaagccactacactagagatagcttaggattatatcacaattttagtatactcagaatagctttaggggattgacattagagaatctaattacaagatctttttcatctggatcctgtaaattatcagtcacttattcgaacaacacaaaaatattggaacttgtaaaagaaaacaacagatagaagaaggacactgcaagatgaaagagaaaccaacaaatggatttcacctaaacgcataaacttttgattgtgtaaaaatgtagtctgaaaaggatgcaaaacgttttagggaatacaaaaggaaaatgaaaaacataatccaagtgaacaacacaacacattccagaagtgtcagaatgcaaatcaattatacaatccaaatgcactacaagaagatagataaagcaatagaagaagaagcgtggattctgatttttgacattgaggaatcccattcctgagtaatggatctttagacgacgtactagctcaccactaaagaagaagaaaatgaaacaatgttagcaacattgcattgaaattgagaggcacattatattctattgtgtgatccattttgcagaaggataatatatcatgctaaccttgaaagaaacaatagcaagaaatacaaataactcaagcataagagatgaaaagaaatgattaccggtttgattgaaggcaagaatcgatttttggtatcttcgtcctcccattcaagctcattttcctgttctggaggatccatacgtatttcaaattcttcaactagtgggacacttgtagcatttaatggaagctttctcagctttggacagtatttaacaactatgttcgacaaaagcggaaaggggagaggactccagtagatactctccagcttcggcaaaccatacaaaaacaacctttctagtttctgaaatggtgtaataatacttgtaagattgattgctttctctttgtttattatttctcccacttctcttgaatcacgaatgtctaggttgacaagatttggagcaaacaatatccaagtcagatccttcatgctatggcacttcattataatcagtcctgtgaggttggtaaagcatggaattttcggattgatgtgtaaataagacgattctgtctcgctttctctgcactttatattaatctccgagaaataactattttccaccagtagcccataaagattctccatactcgccaggaatgataaatcgaatggcttttgaagaaacccctcaatacgcagaacagagattaacttcgccaacctttgatccaaactaattaactccgcggattcagttatgcgtagatcttgtagattctccaattgctgcagctccttcaatacgctagcatctccatgaacattagactctcgcagactcaaccatcttaaactcaacaaccttgatatcccactgatactacaaagtcgctcggtgaaacataaattcagaaaaattagctttttcaactctttgagaccaacaggcagttgctctattcttgtccacgacaagtcaagatactgcaacgagaccagccccgatatctgctctggaagttcattgaagtcaggattatgtgaaagatccaaaacaactagcttttgcatataccgaatgaattcacctgatagattcttcaattgattactttgaaggaacaaagttgtaagttcagaacacttggactcgcatgttatctcttcaatttcattcatcattagtgacattcttcttacagctccccaatccttgacttttggtatttcatgtaacccgactcttgctcgcacaacataattctctttctgtttcccaaaatcggatgcaatccacaaagccatttcacgaaccacgtcatgcatcacaacatgccatttcacgaacccacgatcatttgttagtaaattagcacggataagggtaccgagcatctcataacccttattcctcgctctttttataacttggtcttctccgatgaatccttcgcagatccatttgtttatcaaggttttggtatctatcttatcatcttcgggaaacagagcacaatataggaaacacgacttgatatgttcatcctccaagctatcgtagctgtacttgagaatcggaagaattttgttttgcatgtcagaaaactctgcagcggatctagtcaaaacatcgattgcatgctcccattcttgtaccatagttttagatgccattgtctcaccaatgcaactgagcgccaatggcagaccacgacatttttgagcgacctctcttgccaaccccacaataacaggatcactacgtaatgtgttgtctccgaccttgtttttgaacaactcccatgcatcctctggttccaaacatttgacttgcatcggcttatgatcccccatctgcccacaaactttttgatctcgggtggtgaatgctactttgcatttatttacttcactcggatagggaataccaatggcctctaaatccactttctcccatatatcatctagcatcaaaacaaatctctttccctttaaaactctgtgtatatcggtggccttatcactttcattcttgttcttccacaggtcgtcacaaaggtgtaatttctctgcaatatcttcttgaagctttgaaagctttgcgccttgagacaccacgatccagatcacaatgtcaaacgtaccacctgtttcagcgaacttattgtggattttcttgaaaagggttgttttgcctacaccacccataccgtgcagacccatgattccgactccatcttccataaggcggttccatgcctttttgagcatttcttcttgaccaatcgtaggctgagtaggcctctcttcaacttcagatcttggaggcggctgagaaacctcgtcaaaatttccctccgattttagtttcgtaacctcttccaataacaaaaacacccttttcccatatttgtagcttgaacatacatattttgaacataaaccgcagagacacaacttttgaagctcaacgggactaacacttagcagatctttgcactctatatcaatgctattgacacggtcaagccatacctggacagcttcaagcctttgttgatggcgtgactcctctctcgctaccttgttctgtacctcatgttgagttgctcttagatcttccatttccctctgcagagctctgagattcttctcgaggtttcgaatataacctttaccacataagcatctaatgatacgatccagcatttgatcaccagaaatttctatacacacaaaatttcccatggtgaagttaagagagaaaagtttcagtaagcaacaacgaagctaaagctaaagctgaaggtgaagaagtgttttagataacatcttgctccaatacgggtgggttgagattatcaaagaaagatagaagataataaaagacattgctgtcactgattttcagaccacccattttccatatgaaggactttgatttttctcttctttttttggtagctagagtccatacaaattagtgtctggcaataatatggcatctaatgacttttcaaaatgacaaatctttcattttcgtgtagactattagactagtatcttttaccatcccacagcaaagtggtagaactatgtaagtcctttgtcgctctgatatcaagtcttgtaactaaataaattgaaaatagaactgacctctaaattacgaagaccaaaaagcatacactgttgattgtgtaaaaatatgtagtttgaaaaggattaattcaatccgttttaactttgaagtaatacgatacggaaatgatgaaaaacataatccaagtgaacaacacactggagaaagaaaaaaatgcaaaagaaaagtagtgaaaaagaaatccaaatgaagatatcacaaattacaagaagaaagagagaacaacataaaaagaagccatggactctgcttttagccagtgaacaacttatgactaacccacatcactaaagaataagaagaagaagcaaaaaaaaaacttgacaattgtggaactgaatgaaattgagaggtataacctctctgctgggaatatccctaacaccccatctacctaattacttattaatatctaaagaagctgaacttattttaaggtttctcctccatatatgtctatcctatgtctatacttattttaagctgaactgattttatagtttgaaaggaaaagaaaagattttttttttgtgagatttgatcattagaagagtagaatacacatctttctttaaattttgaaaaattgatgacacataatctgaacatctaatctgaaggcaaacagaagccaagccagatcatttatgcactcaggtataagcacgtctgagagacgactggtaaagcatggaattgtcggattgtttaaattagactagtccatttagctttcctgcaatatatacatctcctagacatgactactttcgacatagagatgatgaagattctccatactagccagtgatgatgtattgaatagcttttcttgaaaagcatgaatatgcagagaagtgatgcagttcaccaacctttgaccgccgaaatgtttgatccaaacctaactatgtaggtatcgtcatggttagaactagtagatgatgctccaaaggaccaaggtctgcagctccttcactaagcttcagaagtagtgtctttagtgattctggatcagagaaagaagatggaagaagattttacagactttgttgaagacaaagatgtgaatgatttagacaatgaacaccaagatttatattaatgaaaaaattgatgccggctcatagagagattcccagacttctccagggcaatgaagaatttgatgactcaagggactagtgaagaaaacgaaaccttcattttgagttattgtttaattggaaaccctcatgaatctttttgcatatccaatagctttattgtgtggaatgaagctagagaagatgagaagttgaacatacagtggtatggatgtcaaggatttggtcatctgaaaacagaatgttctaccgtcaaaagaatagattggcatttgcgttggaatcaaaatatgattattatctaaattcgaattgaggaaccagagattgagactagatgggaaagtgaagaagattgacaagagaagacgtcagaagacgaagcgtcaaagattgagggagaagaagaagactttggttttaagtgtaaaagggcttttgggccacaaatgtatttaaggcccaactagtaaatgggtttagaggtttgcacaaaagttataactatgaaatttcaggtatgttcaaggttttgttaagacaatgtacaagaaaataaacgtttcagttttcagcgacttttacagaaggctgtggtgaatctttgatcatgcaatctacgatttaaagtaaagagtcaacatctattagtaaccttttcatcgttttgaatgtttaaaaagagcacaaaatttggtttttagatggtttcgtgctggctccaaagagattcgtagataacttctccgagacaagagaggggaggcaatattcaaatccttcatttgatgcttaagggatagcgcataaaacgaactaagtcttaaaactagttataaagatcataaacagatggaagctatacgagaacgtgaagagagatatgcttcttgacaaaagtgagaagatgcaaaaaaaaagattaagagtttaccataacactcaacaaaattaagaaattaagccaccacactagacatagtgatacgattgatgtatcaagaagaatgtgaatgagagaaagcaaaagaagacacgtgcaagtgaggaggcacgtgagaagaaacttgcttgaagaagaagatatttttaggatctaaaaatatcttgaacaaactcagttcgagtataaataatggctctgaatgtttagagaggtttatgttgtttgttgttgaatggtatgagagacttaagagcagagctagtgatgtgctagtctctctcgtatggtgtattgagagctgagctagtgatgtgctagtctctctcttgtatggtgtgttagtgtgtaccggtttggttaaggaatcggaggtatcgatattgaaatcttaacacatagcttaggagtatatcacaattttagatattcagaataggtttgagggattgacactagagaatctgagtacaagatcttcatgatttaccaaaatcaaatcttttcattaacaactggaacatgaaaaagaaaccaacagatgaagaaagacactgcaaggtgaaagagaaaccaacaaatggattttacctaaacgcataaacttttgattgtgtaaaaatgtagtttgaacaggatgcaaaacgttttagggaatacaaaaggaaaatgaaaaacataatccaagtgaacaacacaacaacacattccagaagtatcagaatgcaaatcaattatacaatccaaatgcagcactacaagaagatagataaagcaatagaagaagaagaagcgtgaattctgattttagacagtgaggaaactcattcctgggtagacgaagtacttgtactaaagaagaagaaaatgaaacaatgttagtaacaatgcattgaaattgagaggcacagtatattctattgtgtgatccattttgcagaaggacaatatctcatgctaaccttgaaagaaacattagcaagaaatacaaataactcaagcataagagattaaaagaaatgattaccggtttgattgaaggcaagaatcgatttttggtatcatcgtcctcccattcaagctcattttcctgttctggaggaggatacatatgtatttcaaattcttcaacttttgaaacacttgtagcatttaatggaagctttctcagctttggacagtttgaaacatccatggtcaacaaaaccggaaaggggagaggactccagtagatactctccagcttcggcaaattatacaaaatcaaccattctagtttcagaaatggtgtaatacttgtaagattggttgctttctctttgtttattatttctcccacttctcttgaatcttcaatgagtagcacgacaagatttggagcaaacaatatccaagtcagatccttcatgctatggcacttcattatctccagtcgtgagaggttggtaaagcatggaattttcggattgatgcgtaaataagacgattctgtctcgctttctctgcactttatctccgagaaataactattttccacccgtagggaactaagattctccatactcgccaagaatgataaatcgaatggcttttgaagaaacccttcaatacaaagattagagattaacttcgccaacctttgatccaaactaattaactccgcggatacagttatggctagctcttgtagattctgcaattgctgcagctccttcaatacgctagcatctccatgaactttagaccctagcagtctcaacaatcttaaactcaacaaccttgatatcccactgatactacaaagtcgatcagtataagtcaaatccaggaaagttagctttttcaactctttgagaccaataggcatgtgctctatacttgtattcgacaagtcaagaaactgcaacgagaccagccccgatatctgctctggaagtttattgaagtcacgattatatgaaagatccaaaacaactagcttttgcatataccgaatgaatgcacctggtagattcttcaatttattactttgaaggaacaaagttgtaagttcagaacacttggactcgcatgttatctcttcaatatcattatccattaatgacatctttcttacagctccccaatccttgacttttggtatttcatgtaacccgactcctgcttgcacaacaaaattctctttctgtttcccaaaatcggaagcaatccataaagccatttcacgaaccacgtcatgcatcacacaataatatgtaccaacctttgttagcaaatttgcacgggtaagggtaccgagcatcgcataacccttattcctcgctctttttataacttggtcttctccgatgaatccttcgcatatccagtagtctatcaacttttcgttatatatctcaccatcttcaggaaacagagcacaatataggaaacacgacttgatatgttcatcccccaagctatcgtagctgtacttgagaatcggaagaattttgttttgcatgtcagaaaactctgcagcggatgtattaaaaacatggattgcatgctcccattcttgtaccatagttttagatgacattgtctcaccaatgacgttgagcgccaatggcagaccacgacatttttgagcgacctctcttgccaactccacaataacaggatcactacttaatgtgttgtctccgaccttgtttttgaacagctcccatgcatcctctggttccaaacagttgacttgcatcggcttatgatcccccatctccccacaaacttcccgagaacgtgtcgtgaatgctactttgcatttatttacttcactcggatagggaataccaatggcctctaaatccactttctcccatatatcatctagcatcaaaacaaatctcttgccctttaaaactctgtgtatatcagtggccttatcactttcattcttgttcttccacaggtcgtcacaaaggtgtagtttctctgcaatatcttcttgaagctttgaaatcattacgcctttagacaccacgatccagatcacaatgtcaaacgtaccacctatttcagcgaacttgttgtggattttcttgaaaagggttgttttgcctacaccacccataccgtgcagacccatgattccgactccatcttccataaggcggttccatgccttttcgagcatgtcttcctgaccaatcgtaggctgagtaggcctctcttcaacttcagaccttggaggcggctgagaaacctcgtcaaaatttccctccgagtttagtttcttaacctcttccagtaacaagaatacctttttcccatatttgtagcttgaacatacatattttgaacacaaaccgcatagacacaacttttgaagctcaacaggagtaacacttagcagatctttgcactctatatcaacgctattgacacggtcaagccatacctggacagcttcaagccttcgttgatggcgtgcctcgtctctagctaccttgttttgtacctcatgttgaattgctctgagatcttccatttccctctgcagagctctgagattcttctcgagggttcgaatataacttttaccaattaagcaattaaagatacgattcagtgtttgatcactaacttgaagagaaaaacaactccccatggtgatgagaatagagataaacttttagtaagcaaaaacgaggctaatattagtggaacaagaccactgcaaagttctgtggttacaagcgaagagaatgagaagaagaagagagaagaagagctaagtacaatctctagatctgggaaaggagaagtcaagcgatagttttttttttttttttttggaccaatcaaagcgatagttaaattatgaagtttgtataacttgtcatctttgctttgctttgactatgaataaatcaattgagtttgccccccaaaaaaaaacttgccctgttttggagaaattttcaatagatataattaaagtaaaataaataaataaacaaaagcaacgttcatatctagaaaagcaaacttttgaattaattatttatgtcttggattatctttctctttgcaaaacacgaaaaatattcaaaactagtgtaattatgagttccactttcttacgacaaaaaaaataatgtgttcccctatcactgctagtgacgatcccaaataggatgagaactttcaatttaatataattttcatgtaaccgtttgaatgattattcaaatgattgttgattcggtgattacataatttctcgtctgaccccgattctaatgtaatactagcttcaccttgtggtaatagcacttgcaatgtttcagattcgagtcttcgtgaaagtaatttttttgtgattttaaagaacattattaattactaatttccaaaattaaagaacttataaatgagtggtatttattttggatatatattattctacgtggtgtttaaaacatacatatgtattcatttctaatcttgaattttcgtttactcgaacattacatcattcaaccgaattataactttaaatcagcaaatacaacacagaaatgaattacagaggtaacgtaattaagtaagtagctttacgaattatgaatccaacgtcaaatgagaagacattattcccatcgaaatattcttctttttcaaagaaatatgaaacactctaacgaaacaagcgggttctctaacaattcctctgtggtataaccgtaattctgatgctgttgctgatccaacccgtttttagccggatctagtctaacccgacccggagactgattattcttcctagtctttgccccacccacccgactactctgattcgaatccatcaccgatctattcgtcgccggcgatcttgaccttcttccggatctctcacccgggtctctcacacccgacccgtatctcgctccattacatgtaccattgtttctcttacgtggagattgatcagttctccgggtcggataattattaccggtgacctgggtccgagttttcgccggagatctctgagatttcctctgtttcatcatcacatgttcctcatcgtaaccattcatcacaaccgttgaagacacactctcgctcaaactcaagctacaaatctccgaaacctcagagccttcttcaggatcaaccgaaccgggtcggatcaaaaccgggtctgaagccattttcaagaaaccgggttttttctcctcatcttctcggatcttggtcttcaccgggtctttgaacgtcgaagtgcggaaactagaggaaggagtgaacaaggttgtctctgacaagacttctttgactactgtctcttcttcgacaatggttgtgttcttgtcggaaacgttctcgttttcccgatcggtggtaccggagctgacgcagcaattacccattagagagagagagaagagacgacgtcgtttgatcggagattagagagtagtactccttggttgtgttgtgtggtgacagcagaggatgattgtgaagtgagagtatttattgttaatattttgggacagttgataatatgagtaaaaagaataattatacaacaactaccccaaagtagctttagtttataatgatttcagcagcaattatgtctgtgattaaaccccatgcaaattttcaattttcttgatataatgacgttaataaagttatgataactttttagtcaagaaaattaaaaaaaacttttgaatattaaaaacgtttgaatgcgtagaaatattacgcattcaaagttatgataactttttagtcatgaggtgtgttacactgttacgtacttacgaccaaaaaaaaaaaatgatgtatcatgtaatggattttgttgttgagacttgagaggtagaaattgacaaaaaaaaattttttttaactaatgtgagttttatctgagatccatttacatccttcaaaatttgatcggatccaaaatctataagataaatattgtagatgtcattgaaaaaggtctaaatgaaagatctaaaaagtcacatgactcacatgcacggaaatggctagagatctaaacaagcccacaaagagttcatttcctttaaatatatcattgaacttaacattttttttgtcaggatgtccttaagctgtcaggtaataattttgacaaataaatctctacaaaagcagatgatatatagtttagttctgtacaatttggagtttttagaggacctgatttaagaaaaaaaaagagagaatgtttctttaaaaaccaatgataataatgaaggtcagaaataaaggttatgtcagagatctaaaataaaatcgtatcataacataagacgaatcatttgaccaaaaagaacaaacataagacgaaccttacgactagatctagtttttttctttctcggggacacatcatggtgtcttctgtaatattatgattgaacacatgttacgtatgttaccaatcacaaccacattgtacaatatactttaccatttattgcttattgggtcgggcttaaagatgattaggcttaggcaggtcgacaatagcatattcatgaaaactcatgaccactacagttcactgacagacacattcttctcaacgatcaattattttgtgataagaaaaatgaaattcaacaaaaagaaaatctggcaaaaatcgtaaaatacatatatacttgagccaaggcttttgcagtttggtttcttctaattatatttacacaaaattctcataacaaaaatcttggcaatgaagatgcaatcagtttgcaagacacggtagagaaaaagttaaccgcagaagcacaaaacatagcataacgcaaaaagcacaaaaaaatagcatatataatgcaaaaatcaaactttttaacattcttgaatggagtttggacttgaagttcgactgttggaatctccgggtgcaggagtgggataggcgatgaatgaagctatatcgtctcctagcatcaacatcgagactccttttgagtacacaactatttgcaaatcgatataaacgccacaaaatcagtttccaatcaaagcaattgatatccaaacagttttattgagaagacaagaacatatctaaacccttatctgtgttatgttccccaaaacagaatttgatgttagcacaaagtcacacaaaaatgaagttgatataaacctcttaaattaaaagataggacttgaagatttacattgtatgggtcctcccatgtttgaatgattctagttatgttcacatggtaggttctttgtgtatatgtcacatgccaattaatttctaacccccaaatgactattaattcctaaccaaaaacaaaatcatttccatttccaattgataatcaagattcaagacaatgggataattatctcacatccaacaaaacccattttctttttttcctttttttttggccaaacaaaacccattttcaagttcatatatttgtgtgagatttgccattccaagaatcaatcctctctcaagcaagtcgatcaagatttattcggagtttgtgaccgtagccgatattatcaaatccaaatcaccttattcagttaagcttgcttagtatcaaaactcgaagagttgagaaacaaaagggaatcttcagtctctatgaaactatatcattctcaataacgtgaaaaagaagaggacactctctagtctctatgaaacaaagggacagagccagtgggccattttgtgttcctaggaaatgcaagcacacatagtagagtagagacctcttctactatctccacacgcatagaatccactattttctctcactcataaatacttacatacaaatcaatctcaaatacaaaatcacatttctcttttacctttttttatctttatggaatgaaagaacaggtatgatgccgaatgatatcaatgaatgcatcactatataagtctctgtgtgtgtgtgtgtgacaaagcttatgagacagttaaattagtgatgatccaaaaacatgtgtgtgggtcagtttcattaataccaatgagtacgcaaaccctatgatgtttcttgttttggtaccaaagaaagtgttcaaatcaattaaaagaactatttggaacacatctctatcacataaaagatcaaatctgacgtaacttaaatttagatttaccttttatacaattatttaattttgtataccatataaaactatttcgggaacatattaatgaacaagtcaaaagactacaagagtcaatctccatattaaatttaaaatttattttaaatttggaattataataataactttctatctttgggactttaaaaaaaaaaaaatttgggaacaaatttacaatattagaaaaatataattgtgaaaatatcataattaatcgattttgataatttaccatattttagaaactagaaaccgaaattgttacaaaacattaatattatgtaccagtactatacatacacacacacacacatatatatatatatatatatatatatatatatatattctaattagattttcataatgattcaattttaactcaaacttatttaatacaaaatacgatactgtaaattgggtatatgagatatttattagaaattatgaaaagaaaataaaagctaatttattataattaaaatttattgtatttccatatttttttgatttgcgagcggacataaaaaaaaaaaattttgccagcgtatgtcttaatcaattattatataagaaaaatgaatcaggttaattttttatttatagaacataaatcaatgatatcccattttgggagttaataaaagtacatcatttggttagactcactttaagagcttcatttcccattttttttatttcttcattctccacaatgactaatggaagaagtaatatcaatttgtaagttccttagatattctcaattttctattatctatttcacaatatctattaatgattttgataaaatatattaagaaactatattattttcaatcttttagctttcagattagtttgttagattttttttttctgtaatgataaagcatgaaatgaaaatcttgtaaaggatcatgatcaaaaggtctttgctcattttatatcaaattgaatcaattttatttttgcttaaaatatttaaagttcaataaaaataggtgaagatagatctttttcagacaaaataaaataagatataaatctcttttccactattcgacattacgattgctttattctatttgatccatttcgagtcatcatttttatactcgagtttcatataaattatgttttcgcaaaattcagttttaattttgttgaattataatgataatttatactccctcaaatccataatatttgataatttgttagaattttgatgtaaagttttttatttaaatatattagatttagcatagtcatgattttctaagataataaattgtttttctaactgaaaactatccttgttttcatattttgtaacaaattattaaatgtataaaactcgatgaattattgacccgcaggcagaccaggtcgatcaagacatctggtgaaccaaaaaactttgagctcacaggggtagttggggaggaggatcagccaccccgagaagcttctgagcgcggagccttcgatgagtctaagctggttgacgtcaacattgccttgagctgggaagcctttgaggtgaagcaaggaacagagacagtgcgtgagtattataacgagttccttaagaaggtcaagaacctcggaagagagttggaggaagagcagctggcgtgtctgttccaggaagggctacgcgaggagttgcaggaaggggtatgtgcagcgaactgcggatggatccttaattatgtgtcagatgtagttgatgaagctgagaaggtagaggccaaacttagaagcatcaaggaaaaggtgccgctcgtgtctgaggagtttgcagatgttgactgcggacaaagcaatttgggccgacccgcatccgaagatgaggtggagagcaaaccctccaaatcctatgatccggaagaccatatcatgcaagattgagatggctagagtcaacataaggtcttgagtcttgtggattatgtttcctattttatatatcaaaaagttgctattactacttccctttatttacttcgtaccatgtcatgcaagattcaaagctgtgtcagtaccaaaataatattttgcgaagaagaagaaaaatcaaatgatgtttcagtacggttcgcagagattctccatttcgacggtaacagcactcaattcaataggtcatgttgctttctaggtaagtaggaaccgtgccaagttgattcattgattcatgtaactatacatgggatgaataagccatctctcttgtttacaattcgaaccttttggaacaaaaatattcctcaaaacaaacacaaagatccaaacaaagtcgataacttcattcaaatcaaatgcacgtatgcaatgagtcatcaaatatgttgataataagaacatttgactagagtaattcattgcctacaaaagcttatgttcccctccccatatcctaacgattgcgggtccaacaaatcccgatgcagaagaaaaggaaaagcagaaagcatatgaattgtaagttattgagattgacgggaagagaagagagcaccattcattgttcctttttgctactgatttccaatggctgaaagaagtacggaatcattctgacgggtcttcgagcttaccggtagacaaatcattaatgtgcggatacactgctttctcgtccagttgagtttgagcccaaatcaacatcttcaacaagcttggaagtttaggatctgtttgttcacaaacattgagttgctacattaaccatggaggaaaatggaaagtttcaagaagaacttggatgatacatgttgtgggtgaagtaatgaatgaaaaattttacttgttatgtagagaagagttgcatatactttgaatcttaagattgataatgaatgatgctcgagattataatggtattttgtggctactaaaagacaaccagtataacatcaaaattcaaaagctacctttttcgtggctctggcttgtaagaatcgctgcatttacttcacttgctgtcttaagacggtgggaaagatcaagaagctctttaaccgggcaggtagaggcatcgtcaaaaacaagtagggctacagttttttccaattcttccagaaacgcttgctgcagagagatataacagactgtatgaatgaagtttcagcaacaacagatattacacacagtcaatgagcaatacacatggaaaacaccatctttaacgacagaaatcaaagtgaaatacaaagacttacgttttcttcgccacgtggtgcaagttcctcctgagcaaactctaaggcctcttctgtcttcccttgtcgaattaattctatcaacctttgctgctgaagatgaaaaaagagctccggattcgtgtctagtatctgcaagcatgggttcaaagaagaatcagattttgcttctttattacatcagaaaagtgaatgactactctccacacaagatatgaagaagcattgtacctcaggattcaaatcattaactttttcaatcgcatcctcgacatttccgttttgaacagcctttttaacagccattcgatcagtaatggtcgcaagatctatctctgctgtttctcgataaggaagttcaaaaggagtagataagctaaacatcaaacacaccaattccataaacaaaaactcaaaaccagaatcagaaaaaggatacgtttggttccagactccctttggaatttctcagcagcttcaacatatccttcagtcacaagaaaattcatcaccaaagtattcatatcttctttcctaagcttcacagcatttagtttcttctcccattcttcacgtgtgatcattttcttcgaagtagcctgcgacaagccacgattaaaactaggtcacacaacgtgcataaagattaaagttttccaaaaacccatcatcaagttgtatcaaataacacaaagaacagactcataagaggagtcaaaattaccatatcttcgtcgtcttcttcaagctgattgataaaaatacgaaacagtgacattagaacgccagtgaggctctcatatcttgaaatctaatctaatccactcaatacgaaattaatacctgttcgagcaacactccgatcagagctatttccaaaagaaattgactttgtgatcagatagtgatacaaagtaatttagggctttagtcaaaattcaagctttaatctcaaaacagcacaggagtggtagttctaagaaagagagagtgtgcgactattttcctcaaaaattgaatataacgatgtacctggagaagtggagaatctggggaagattatctgggaacgattcttgcaaataatccggagatttggcgatcgatttgcttctagattgcttgcgaaagtctcttccctaaatttacaatctgataaaacaaaaaaaagttggaggttttcgatagagaagaagagatcgggtttaaattattaggatgttgacgaaccgtcgatgaataatccggtttaaattattaagggaaccggtttgtttttggatttggttctttatataccggatagtattatgtaactcatttccaaatgattttaatacccaaagatttttaaactattttacctttgaagaacaaaatttcgatttaaaatcataatttttttttatttttttttttaaatcttggaggttgtgggtcaaagtccgtaatcccccaggcctgaaaccacagcataaaatattagtttcgtcccaagcgtcactcgaaccggcgacctctaagctttgcataaggtctttaccaattgagctaacgacacttggttaaaatcataattaaataagactgatgttaaaaatctctatattatttggaatttgatacacaatttaaaaccaataactgatactctattatactctattaaaatcaactattaggtaacaaatatgtgacataaacattttgcagtccgatgcaaaatatatctttcaatctcaacaatatgttttttcttggtcaacaatctaacaatatgtttaattgcatcttcaaactaaagtcccaaaacatgttttgttctttgcacatggttgtttgtgtggaaccacaataagacaaaggatcgattgcagaatttgaggtcttctagctagttgaccgactaagaatcaatggaccacttattctttaatattatttttcccaactggtttggaaggacttagtgaagaagttacactaaaacttctcgagtcaatcctcatatggtttcttttggcaattcctatctctgcaaaatcaaaggctcttcatatcaattaatatggcaagcaactactttgagacatggcaagaacggaattgttgatcacataataagcaagctctttctcatcaaactacctacaaagttttgcgctctacaagatatttgatcaatcataaaaatggtgatctcgtataatactagtcttcttttagggctaacaaatgattcagaagattacaaatgtgctttgtagaaattagcaatatagtgctttgtagaattttatgaccacaagattggtaagatcatttagtcaaatatatgttttatctcttcttattgattgagatgattatttttctaatgagtcgatccacatgtctaattccaattgatctttgtgatttagtttcatatttgttttctttaacatatgaaatttttttgttagtgtagaaaatctaattttcacacaattaaaaataatttttacaataaattatgattagcaaacacttcaaaaaaatctccattacttaaacacttcagtttcctactactaattaaagttgtttccttttgtttaaattgtgattttgctttaacaataaagatgacggcgcataaaatataattatatataatcatgcattattaaataatgaaaaaatggaaaaaaatgaaagaaaaagaaaaacaaatgttcgaccgttccttatttaaagccggaagtcccatagccttgtggtgtttactttttccaattcggagaaagccaaaagagagaacaaggcaataaaaagaagccaccgtcgctacaaaaagtcgcgatttttattttctctatcccaactgctctctacctttcctcgaaaattccttcaaaacccaattctcaagccttcttcttcgtcgtacctgaaaattctacaatctctggatctacgcgtctacttctgaatttcgatttgggtttcccgggagctgaaattccgtgacttttgggttttctgatttagggtttgttcctcttctcgttctttctcgggttagttttttttttttttttttgtgatttttgatgggtgaggaaggttcaatgtttggtctgggaggtgaatttccggttgatgattgtgatggtggttttgagtttgaagatgatgacgagactattgacatcgaaacgctttatcggattctagatgagaagcctgattctgctgaggtagttttctcggcttttgtggtagcttgagaattttgattacacgcttctctaacttcaatttcatcgttttgatttagctgaatttcattgcattatttgaatgctgctacaaagatgtttggatttgtattttgttataaagtttatgtatgtgtgatttcacaattctgtagctacactaatctctaattgactatttttttcgatagagaagaaactaacattgagagtgactacttttagggtagccaagaaaacttatcaccagttggttcatctgctgacgagctcaaggattcacagttgctaaatggttagtagttgttggaaagggtgccttgttacatagtcatttagtatttattgagctgtttgaggtacatcgtattaacatcgcttggattttttttgttgtgccaggttcatttgatgaacatgtgaaaatggaagccgggctgagtccttcacctgctcatacttgctctgcaagtcttaaagattggttttcgttaagtcagggtgagcagcctgtggaaacatgtggagtatctcaatctgagatgactagttgtagtatatcgtctagtttctctgatcctgatggcaatatgatggccttcaatcctgtgaattgtgacgttgacactgtttccaagcaggatgataagataatcgattccaaatgtatgcaccttatctactaaatgtcaggttatttttttttttaaaagtttgacactaatctatctgttgctaatttccatattcctcattttttgttacatcaaattgcagctatgttgactccatattttgacaacgtgactggatacggagtggggttgggagccaatcataattcgtctgccatgtctgttttttttaataattccaattccctcagtgacagtgcggataactatgtctcttctgcacaagattgctacaatacaagtggtacatccttgtcagaccatacccccaattctgttcagaatttcgcgtttgagttctttcctaataaagaagaagctgtaaatgatgttgagagtggagtaagtgagtctcagtcggatggtgccagccggatgatttttgatagacatggaagagtggataatggatctttagaaaggaaacctcctattgatttttctagtgcaagagggatcagtttcaagtttgaaagtaatccttcagtttctcctgcctgtgtcaaaccctacaacagttttgacagtcatttagctgatagtgaccttgaccggcctaataattattcatgcagttttcaggataataaaactgttcatgtgaaggttaaaccagaggctgaatcagagaaagttgtctacagttcagttccaggggaatttagtgtcagggatgatgcttatctttctggagaaaccaatcgttggtggtctggtgcatcaagctctgcagtctcctatcaaacagatattgaaaaaggatactcatatatggcaccgcaaacagctctacctagccaagacagtggcaagataagctccaatcatttttacgattcagatacatgtttgcaatatgttgtagaagatcccagcccagtgacacaaaacaatgagtataaagactttcaaattcaacaaggagaccgggaatatattcaaccgaggggcattgattctcaattctcaaatgccagctttgaatcagttcaaagccattcttcagaatgtatatccgatagtgatgatgattctgacgtctgcataatagaaccttatggtcaatctgcaatcccacatcgacctctagctatgaaaatgccggtagtttcttcagaatattctacagttagtcataattttaatcaatctggaggcctgaagcttcagtcaaataaagaaaatatgatctttcaagctgcattgcaggttagcagctgttagccttataagggagtaggcgttttacccaattgccattttatatcttgttgattccattttcctctctcccagacaccaacagtccaacaccttagtttttactgattgtggatacatatttggtttaaaaccctgtccatgatgcatcgttatgctgctaaactacaatttatgacagttccatatttacctttgttcgtggttttaattcagactcattaggtctaatgacatggtctgatgtgacaggatctcactcagcctaattctgaagcaattctgcctgatggtgtcttgacagtcccgcttctgagacatcaggtatgtatgtaattattaaaattaaacacaagctgtagaaatgaaaggtatgtggtactgtattgatgtattgtatgcttaactaagatgatttggacccgaaaggagaatggaacttttgaatctgttgatatctttcccagcttgatggttgattgttttggccaatgagaatagttataattattattgttaagactgactgcatcttactcatgaacagcgaatcgcattgtcatggatggcccagaaggagacaagtggcttcccctgttcgggtggaattcttgctgatgatcaggttattttgtcttctgttgtaatctttatgtcaattataaacattcagcataaattttctcaaatttcctggtataattatcttttgcagggtcttgggaagacagtttccactatagctcttatactgaaggaaaggtctaaacctgcccaagcatgtgaagaaagtacgaagaaagaaatttttgacctagaaagcgagactggagaatgtgcgcctttaaaacccagtggaagaagcaagcattttgaacactctcaattgctttccaatgaaaacaaagttggtggagacagtgtgggtaaagtgacgggaaggccagctgctggaacgcttgttgtatgtcccactagtgttatgcggcagtgggctgatgaattacataagaaggtgactagtgaagcaaatctctctgttctggtataccatgggtctagcagaacaaaggatcctcatgagttggctaaatatgatgttgttgttaccacattttctattgtaagtatggaagtgccaaagcagcctcttgttgatgatgaggatgaagagaaggatggtgtacatgatggtggaactgcagctactggcttttgctcaaacaagaaaaggaaatatcctcccgattctaaaaagaagggttcaaagaagaagaaagttgagtttctgtctggccctcttgcgaaagtttcatggtttagagttgttctagatgaggcacagagcattaaaaattacaaaacccaagttgcaagagcatgctggggccttcgtgctaaacggaggtggtgtttgtctggcactccaatccagaattcaatcgatgacctttacagctactttcgattcctcaaatatgatccttactcttcctacgtattgttctgtagcacgattaagaaccctataactaggaacccagtgaaaggatatcagaagctgcaggctatccttaaaacagtgatgcttcgccgaactaaaggtcagtctactggtattgaatctaattttctttgaatgttcatctgagggtttttatggtttctaactggtaaacgcatttaggttcacttcttgatgggaaacccataatctctttacctccgaagtccattgagttgagaaaagtggatttcactgtggaggaacgtgatttctactccaaactagaggctgaatctcgtactcaattcagggtatggctgtggactcaatataccctcaaagaaatatgcaatataccatgaagaaatggttgtagattatgcattttccattgtatttatctacattcccaaggccttagttttttttttttctttttctttttcttttacttcaggaatatgcagaagctggaacagtgaagcaaaattatgtaaatatcttgttgatgctcttgcgccttcgccaagcttgtgatcaccctcttctcgtgaatggtgaatacagttttacctgggaatcttctgttggattagctaagaagcagattcagtcagacgcttcattggcaatttgtggtatctgcaatgtaagattcttttgtctcgtaaattattatacaacatgtttttttttttccctgatgaacgtgagagggcagttctaaaacattaaaaaagtcaagacatggaattgaaagcatcagtggatattaacaatcatattaagcaatggtttttactctattatgcagatccttgagttatctcatttcatatcacctttcgttgtcaaaccatcatatagttttcttgacttgtagttcttaatctatatcccttctttacacacaggatgcacctgaagatgctgttgcttcagtttgcggtcatgttttctgtaaacagtgcatttatgaacgccttactggtgatagtaatcactgtccctttgcaaactgcaatgtcagactcaccatctcatcgttatcttccaaaacgagattggacgatgctatgcctgacatgcaggagcgtgctacttcgaatagccttagcccttgttctgatgaagatcttccatatggttcatctaaaatcaaggctgctctagagatcttacaatcactgcccaaagcacatgatttgacagattcaaatcagatctctgaaaacagagaatactccggtctttctataactcctgtgaagaatgagggtatgagcgttgatgttccgattaaggtagctggagaaaaagccattgttttttcccaatggacaaagatgctaaacctacttgaagcttctcttgtaagttcacatattcagtatagaaggctcgatggaacaatgtcagttgctgctagggataaagcagtgcaggatttcaacactctccctgaggtacatagccgttaattgaatttgaaggacttgggttgactcgctttctatgatagcaacacatgatgataagatattttttggctctttttctactttttaggttactgtaatgataatgtctctcaaggctgctagtctcggactgaacatggtggcagcttgtcatgttctgatgctggacttatggtggaacccaacaaccgaggatcaagcaatcgatagagcacatcgtataggacagacacgaccagtaacagtagttcgcttcacagtaaaagatacagtcgaagatcggatattagcccttcaggtctgtgaactggttgatttggttctcttcaatttctctataagctttaagccatttcatttttgatctctaaacacgttttgtcgatgcagcaaaagaagagaatgatggtagcctctgcatttggagaagatgaaaagggaagccgacagtctcacctcacagtagaggacttgagctatctgtttatggctgattcatgagaacgagcttcgtgctctttttgaccaatgcgggcgggtacatatgatagggtttttgtgcagttttaggaggaagaaactcttcgtttaactgactacaggtttgtgcaaaaaaaaaaaagattagaaaagacgattattgggtttggggtataaaaatagaaagctgatccgatttgattattggttacatttagactttaggtattgacagttaaatggaagatgacaatacataggagtgtatttgcttttgaatttctcattgtaagatcacaatgcgattggtccagcgagttataatagcttactttcaagatcctcaatttcctagtactttaatacatacaaaacaaattcgtattggtaacacacctaagatttccaaattttgtacaggaatattcactcatgtcttaattaattcctggaatttgaaatctcataaaaaaaaatattctatcggcttcgagtctctcgcttggacactttcacgtcatttttccagacataacgataggtgacatgtgaagacttgtactagatagaacatatgaataaacatgtcagatagagaatccgagttatgtcacatctatggttatataacgcaaacacaagaccgaataaattctagaccggtcaaatcgattgatgataactaaaccttcgtagagcattttggtcattctctagtgctctattttagattccatattctcatatcatttgtttccaagtaatatcacaaaagttcgaatttatactttcgctttctttgactccacattatctaaaccaccaaactttccttcgtctcaatttatatcaattaacaaatgattctttttttgctacttaaaaagtaaaaaaataactgaaggacaaaactaatttttgcgtgaaaccaattagctttaacgataactagaggcacgataaactaatgcaaggctcgagagacaatgaaagtagttcatactctcatcacttagcaaatatgacatgaaattcaataagattcaagttcataagtttaaatcaatcttcattcttcaattaactcaaattgcattattgatgtcactattcatatcatgcacctccatatgcaaaaatagtcatgaactagttaaaaagcggtccccatcacatgtcacacgttctattttctcaatatccaatagtgtgttaaagtaatattaaaaatataaagtcttagcattataaccatttaaagattattttaaaaaatttattggagatattttattcacgcattctaaatatagaccaaataatacctataagttgcaagctagtggctatacacctactaaagggttctatgaagaggaggattacttctacaagctacatttaaaaatatggaaggtctcattctattataaaccaaatgatgttaaagatttccctttaacttcttattatagtaagttgaattccatgtcataagtcataaccaaggaaaaacacactatttctttgtttcttaaattatgttatatcttttgtatattttaaattttacaatttaattaattatttccaaatgataaataatttgaaacttgaaaatatttcaaaaattaagacgcactagctaggctcgccacaaatgataaaaaggtccatttacttttggtagtttgcgaaaatcatctgcgtttgttgatttttttttttttgaaagaaacgaaataatattttaattgaaggcaccaccaagttagaatatatacccaaatattatttgttcaaagatatttcaacgtgttatgtctttttcttttctcgtatttggtaattgacaagtttcatttttctgttcttattggaatgtttagttcttccgaatcctagctcaatggaataacgttatgtttgaaaattgatcatttacgtatgtaagaatttgctaaatatttttttggtttaataaaatataattctgttaatatataatactaaaatgaattaaaactagaaaacaaatgttttaatagtttaacaatctttttcatatttatgttaattaaattgtacaaaaagttatttcaactgagtccacgattaattgattaggctttaatcaaactcttctcaaagaccgactagtgcctaacaaatttgtaaacataacgttccaattaagtaattctaaccctgagtaacgtatttacccttataaacatcatttaaaatttgtggaattcaatgattctatgcataatgcagttatgctattgtggggctaccaattctcgtatttcacaggtttaataagaaaataaagttgcattactttttgccatttcgtgattaaaacccatcaaagacaaagtgcttcacccgctccacaaaagtcatatagctagcaaaataattttcttgaaaatatattcaaacagattcattagaataaatacttagattaatttgatctaaaatttgtctgttatttgataatggatcataatacaaaaaaaaaatagaacatagtcttgtaattataatattagtaaaaactagatcatttagtatgaaagtacgtcaaaatttcttattactcaaaaaatcacaagatactactacggtatgtcatattaagtaatgcttgttcttcataaaattaatgggctgatacattaatataatgttggttaggtcccaatcacccaattaattatctgcttcccattaactgtgtgaaagctttaatattatacaactaacatggctttctctgcttcaattgggctctaggttatgttagctaggtttgttttcaaagtatacattaattactctgtatttttgtttttttccaatttttaataaaagttttgaccaaaaataaattatgcatataagtttttaaatcaatagaaaaactacaattttggatcgaaacatactttaaaaatattttgtgaaagggaaataattcgaccaaatgatcaaaccagctaaaaccattaaataaataaaatattatatatatagtaaataaagcctcaagccattaattgccaaataggatactactattccatacccacctaatttatgtattttcaatttaataaaaaaaataaacacaaaattccccttgatacaaaaaaaaggtcaccatgcatatttccttataaatagatagacatcaaagccataatgtctaaaccatctcatctcagtgcttcttacttatctccattagaatcatcaaattatgatgaacatttccaatgtgtccattgctttgtatctttgcactcttttcgcatttgtttcatctgatagtccagaagcaatgagagatcttgtgacaaactttcctggccaaccaaaagtgagcttcagacattacgccggttatgtcacggttaatataatcagtgggagggctttattttattggttcttcgaagctatgactcatcctaacgtgaagcctttagtattgtggcttaatggaggtaaccaaactaaaattttcagtaacaagaaaacttcaatatgctaattttgcttcttcttttttgttgacaattaaattcatattttttttttcttttaaatcgttttgacctatggggacacattttgatattcctttggttataactaaaacaaatataggtcctggatgttcttctgtgggatacggggctacacaagagattggtccatttcttgtcgataataaaggaaacagtcttaagtttaacccctatgcatggaataaaggtatattatatatgtccatcgatcttcttcattctcatcaagaatcatatttatatgttaaataacgaaactaaatgggttaaatttggtgatgcagaggccaatattctctttcttgaatctcctgctggtgttgggttttcgtattcaaacacaagtagtgattatagaaaacttggcgatgactttacaggtaataaatatctatatgaaattatgtttatgtatttataagataaaatatttagcttcttggttgttattggggacgtcaattgattgttttttataatctacaattaacagcgagagactcatacacttttctccaaaagtggttcttgagattcccagcttacaaagaaaaggacttcttcatcgcaggagagagctatgcaggtttcagttttcgtgtaaaatcaatattttacaatacgtcatatatctagggttttggtcattatgttttgagttatataaacaattatgaatggacaggaaaatacgtacccgagcttgcagaagttatttatgacaagaacaaggacaacgaaaacttgtctcttcacattaatttaaaaggcattttggtacttaacacctttgatttgaactttaaggacatttttgtatgtgtttgatttgcatacagtacaactaatcaaattgacgttgaagattattctattttcgatctatatatacattagaagacctgatatttgaactcatagcacatttaactatttaagtatatgtgaatctcatataacactaatatattataacagaaattcaaattttgaccaatctttgaatatattttagacttgttatttgaactttgaagctaagtagcttttataaacactaaacaaacttatttacattgtccgatgatccatttcaagacatcatttttgtaacttttttattttatttatttatggatgcagcttggaaatccattgacatcatatgcggaagattggacaggatgggtggattatgcgtggaatcacgcagtggtatcagacgagacatacagagtcataaaacaaagttgcaatttcagtagtgacactacatgggacgttaaagattgcaaagaaggcgtggacgaaatactcaaacaatacaaagagatcgatcaattcagcctgtacactcctatctgcatgcaccattcatcaaaggttgattcttatgcaaattacaagacgacggtaaagtactgattatacaacacattcattaataatgtgtttttgctacaagaacttaattatccgaaactctaaaacagataccgaggctgttcgatggatttgacccgtgtttggatgattacgcaaaagtattctacaatagagctgatgttcagaaggctcttcacgcgactgatggtgttcatctcaagaactggaccatttgcaagtatgtattactcttgttatttagatatatttaatttctgtttatagtctatgacaaagattatatatattaatctcattttttgttttcacgaaaaacagcgatgatattttaaatcactggaactggactgattcaaagcgatccgttttgcctatatataagaaactcattgccggaggatttagagtttgggtttataggtaaaattttggttacatttttggcaaacaaaactttctacagacaattacttcaaatcagttatgaatatatgaacaacgggactgaaacatacattttaaacttggttgcttgaaacccaagcaaaatgtatttccatctatttttcttttatcctcttggtttcaaaagttgatttatccggtttggcaataattggctgaacaattgtcaattttatgtggtaaatcagtggcgatactgatggaagagtaccggtactctcgacaaggtactgcataaataaactggaattaccaatcaagacagcttggaggccatggtaccatgagacacaggtcacaactcatcgaagtcaaaatattactaaaatattactaataaatgttatttcatactacggtttttgtttatgaagcttgattaattaacagatttttctgatgatattttaggtaagtggatggtttcaggaatatgaaggtctaacgtttgcaacgttcagaggagcaggacatgatgtgccttccttcaaacctagcgaatcccttgcatttttctctgcctttctcaacggagttcctcctcctttgtcgcgatagtgaaaaagttgttatattaatcaataaggaaataatccaccagatcaaccgagattttaattttctactatttaggaatcatacttccaaatctaaactaattactggtaatgagaagaaacacccagaccattttatatattaagatatagatcctataacaaaataaaaatactaatatagatccatttcactttcagtatgagattcttaaaagtttttttttaaattcatatagctatcacacaaatcaatttgaaaacaacatagtttctaaattttccactcacacctctcttaacaatttgcacagaagaagaaaacagaaaaacaaaacacactattttacatgtaattgaggtaaagattaatcaccaatctatatacagtatacatatataatatagataatgataagatattaattagtagaagcatggtgcgaatatcgattgcatcattggtaccggtttccgctgcgacgcaacaatcttgagaggcttatgttgatcatcaagctgtgaggccataacgcgtttattaacacgataacttcttccaaagcacatagatgttttcattgctccgtatccgtccttcctcttaaattcaagaatatttggcaaactgttcaaaagcaaaggaagaatcatatattcatcaccatgtgccatcagtggcataggctccatctctgatagttcataaacattgatgggatcatagagagccttcttaatgtcatgaagcatctccgtgtttgaatcataacggttcttcttgttaaaaaacatctcgaagactttacaacaagacatgtgaatctccttgcacggttttggcaaatcgcttagtccatcaactagtacatgctccagaaactctttcctttttgaatcgataatcttttcgatatgagcgatcgagtcctcaatctccagacctggatgattcttcatgtggagcagcacggagttcatcttcccttgttcttgttccttctgaaaaataacgttgcatgacaaatttgatagtttaataacaaaattatctagtgagggttaacatcccttagtttaatttgaatatactaaacccctaaaaaaaacataaaagttgaatcacctgataactttgtaggtcatttaaaagtcgaggtatgatcatgagcaatgtagttatgctatcgtaatttcccggtttgagtttgttgtggggaaaacaaggttccatgagacatgagatggaaagagcaatggtgtgtgctgcgattgagatcattccgtttcgaatatattcgtccattgacgatgtgtgtccctttttactccattcagcttcacgtagccacgactcaaatgtttcaccccactacgatatcattcatggtttatgattaatccttaagaagttgagactttcttttttttcaatgcattaaagcagggaatatatgtcaatttattccaaaaaaaaaaaatcgggataagggtcgagtaaagagacatacgatgttgcgaagatggacaattatgtcggttttgtggtgcgtacgacaagtatttgcagtctctcttacaatatcatcaagtgctctaaaaatgatattgccgtaacttttaagctcttctccttcccatctatcatttaagcgcaaacaataattcaatcaagaatcaacaaaataactaaattctgatgcaacgtaaaattaagataatataggggttttgggatcctaattaaaattaagataactaacttgtcttcatctacatttaaaaaaaaattaagataatataggggttattagttaggatctctctaatcgccccagtctaaccggataataattaatttaccttaaaactgctttagtaagaccttccaagtcattgaaggaacctttttcatcgaagaagtcatcggcaattgtgatgaggatagcagtttttgctgcaagcttaccaaatttaatggcatattcatagggcaacgaagtcacagttgcaaagtaacaatatgttgtcttctctctaccgaaaccaatatcactaagtccccatttctttacccacctgtctcaaattgctattgttagctagactatatatatttactttttatattagagtttgtgtaccaaaaggcaattttgctataccaaaatgcttttgttctcacaaataccatgcagtgtaaactaaagcctactcacattgtcagttcctccagctcgcgacagtatttggcttgttgaaactcgaagtttcttgcagcaagatgagtcagtttgtcgctatacgaactatgtagtctgtttccagaattcacaagaaaaaaatcatccccttgaattagcttattattcttggatctaaaatttgatagatcaattacatatgtattgtgtataccttagaaaagaggctttttccatggataaaacatttgagttcttgtcctcaatccacatcctatggtcaaggtgtttgagtcgagctatccatggagtacttaattcatgcataatctaccaatcaataattatttgaagcattaggccgtgaacttttaatcactttcaccttattgagatatattggtaccattttttctttgatggaccgacgtttctcgagtaaattccgagtatattctcttgcttcttgaagatcatgctctcccggaaacatgagatccgtggctctgtaaacacttaggatcacaagcaagaaagagtctatatttctttctaaatgatttcgagtttcttgatcattcaagaaccagcaaaagcttcctgcaaaataagtatacttaggattttaaactcagtatagacaaaactaaagaattatttttgacaaatctagatgatatacgttttttctgttaatggttaatttttattgtcaattttttttttttactttaagaactacaaaacggtagtgctttatgccgaaaaaggactaccgttttatatttaagtgagaacttgatatggagttgaaaagagaacacaaacaatgaagaaagacataggaacgagaaattcttactaggtgaaacatcccgaccatgcattcttaacattcgaaatgcaagagagtctttgtgcaattgatccgccagataactcatgggcattctctcaaaatctttttcttcgtagcggcttaaaattacacaggagaaaataagatttggttacatatattaaatatttaaagaaatgaaaaaaaaggtaaaagaaagttgaccataattttcccctcacctgtaaacttgttccagaacgtgttcaatctctataccaaagaactctcctaaaccagtactctcgattagattaaccatggagagttttatgagatcttcattgagagggtacttttgtggcactaagagaaagaaatcacacctagcttgttaattaaacaattatgcacttaaataataatcatattcacgttaattatagcgtttggaataataagaatgtttttaacctccattagggcatttttgaacgagattttgaagataagctagacattttgtgttgcgagtgagcataaacgctgatgcagttgctgaaggtgactgaaacaaagagccatccatactgtcgagactcttcacaatgatgtcttcttgatttgtgacatataatttcgatggcaacacctctagataggccagtaaaggtttataattacagtcatgtaccaatttttctctggaaaaaaaagaagcccaatattttagaactattgtctatgtttatggggaaatattttggatcaagatttcttatcatgtaacgttacctttggataatctcttggcgttgataaaacatccctttgatcatttcgatacagcgactagagaaaacaaagtgtaagccaagtttttgagcaagctctaggattcctgtgaatttgatagcgaaccaacgaggataagatccttcttcgttgatgtatttcccaattatcatctccgtatttctttcgatatatctcgtccctttagaaacaaaaattataaaatggaaaaaatgtattataaaagaaacaaaaattgttttatttacaagataaagaagcaagtaaagtggaatgagtaagagtctatttgtttataatattgagtattaacatttgtgcttatatatgtatatacctacaaggccacaacctaaaaagcacatctattgggaagttcttacatgagtatctcacagtataaaaaatgaaacaaaatagaaaatgcaaagagaaatgagaagttcttatttgagatactaattatgagagatttttaagacagttgtcttgttgtgaatgttcaatgttcttttctaaattaaaatttacagtcaaatttattaaatatttatattcttttctttttttaggaaactcaaaaagtcaaaggttatctcatgaatgtagatgctttaaacttttaaacaataattcattcaacaccataacgtaaaaagacatgtccgtttttttagcgtgtgtttgtaacttttaaacatatatatatttttttgagtttgtatttgttttgctaaatgaaaattgtacctgaaatgtatagcttaaagtactgttgcattttcattataaaaaatgcatgcaagtcatgtgaacaacctttgaccaaaaaagaaaaaaaaaaggtcatgtgaatatatatatatatatatatatatatgcttttttgtgtgtgtggaaggggtacatatatgcttttgggtagaactataaaaccaaattcgtaatttgtatatatttgcacatgatatgggccatgcatgtcagtggcttacgtagtgagttatcggagtctggttacgtagtgatacgttttacatgcacgaacgttagtcaaagagtacaaaaatacaaagtcaaagtctttacacacctttgtggagatgaaaacacccaatattccatttctgaagtgctacaacacaagcaagagtggaagttagaatacacatgtccttttcgccgtcttcgtctctgccatcagccaccgttgtataactggtggagttcatccagaaaccttctctggcattttgattgcacataatccaatctagacaaccttggaacatcggtttaagctcattatcatctacgttgatgtcttcttcgatcatggataaccaagccgtgtcgtaagcggaaggagagacaaatgagtaaggatcaagattaatgttggacaactgaatttctcccttgatctcattgacaaaagcgtggagatcattagaggaagaaccgtaagaagacttcattgtttttataaaaaaagttttctgtctagaggatggtctttagattgagtgtaaaatatgggtcactaatctgcgtgtgtttttatagaaggaatcgagtatgcatatgattgagtcgtctaaatgtaaccatgtgaaaaatactttgaatagtttgaatattctaatggtctactcttctcctggtcttccaagtaataaatggagatacaacgaataaacccccatgtgataaatactaaataaatgatctttagtgagtcacatactaaataactcgtatcaataattttttgtgagttctacaataatgaaaagtaaaaaatattaataaaaattaaatgaatatcttcaatagttaaaagactcatctcaaagtttcttcaatatattttttaaatattacagatacccacttaattttctattattattattattttttattattataaataatttatacaataacaatactgagacttaaaaaaaggaaaatattgagatatgtctgactatgtcccgtatatttaccgatacatttgctgtaaattcctaatatttgattagttacattgattgtaaaacaataaaaaacaaaaaatattcgtagttagtaatctacaatgctaatgtcgctatggatccatccctgtgtaaacttgcataatgtatatcacaatattgaaaacagaaaaataatgggcattaagtagtagtaaatttatatacatatttttattttttgggtgcaaatagtactttatgtacaagaaactagtgattgccataagttagagatgtctgatagacttgcctattcatctacaatgattcataatctctaagaattagtgaaccacacaagttatgtactattacaggtaatgtacttgtccacttcgttctttcttcgaccacttgtgcatcaaatccatatctcaattcaaatctcgatacttggccgttgcatatccacatcatcatgttttcaatatcaatcaaaatacaattcatcaacctcaaaatgtaatccagttccataaagatttaagtcttaacctcagatttccttcaatcttgtcacatcctcggcagcttcctagcgtttggcaccaccgctctctcatcagtactaggaagtcattgtcaaggccatcgtttaagcgcgtttcacccggaagctctctgaagtgactaattgatcatcattggtcatttctgaaacacccgaactcggcggttccgggtatttactgtaaagaatattgggattggtacttccgaagtgactaaccaatgatttggttttctctggaaaatgaaaatgtaaaacaatttggtgcatgcaaattgtaatatttgaaacaagatctactctataatttagcctaaaattaccatattttaattgttacgataaatggtgtatcacaaagctgaaccttcgtgttcgtatataactgtttaaaaacagtctatttggttgtttcggatatgtccgtcctaactctttttttttctgtgtcaaatggcagagaagatgagacacaagagtgtaaggtaggatatgtaagacgaattaggggagtatattggatcttaaattttgaatgatttgaattttagttagtttttattagattttaatgatttgagagaagttgatatgatttattataaaaaaaaaatcaaatttcacctaaaaccatgagatttgaatttttgtatttttaactaaagaaatcttttcaaatcctcttaaatctttcaaaattaataagaatcaaatctacaaattgttttcagtaacaatggatttaaaggtagatttttaaatcattagttcaactacattgtattccattagagtttttaaaattcatgtttgaataacatataatttgtaaatattacacaaatcacttaaaatactagattgaatacaccctcttagtgtctaaaattgatatcgaaaacaaagaaaaccagtggaaactagaaatgaagatttgggatatttgatcgttttaaatcaatgaacaagctgagttcttttaacagtattataactttcatacctgctagttaaagtagttcttttgtttggccaaaaattacaaagtttgatatttgtggatgtcggatctcgtatatttgctccgacccgcgatccgtcatatttctttaatgggcctgggtcaaagccttaacgatgaatccaggattgtcaaatatggagtgggccgagataagcccaccagagccaggtcgatttgaagaatcattttaagcgttacgtaacggaaatctgcggagtaaatgagaatgcgttaatacgcgaggtggctatgtgaaacataaacattaatgagacgtgattcgcggcgtgattcgagcgtccatttacttcgcagatattcgattagtttgtataaataggattgattcgtcatttgtaaaggggacgagaaaattactatacaaaaaaattccgattaactgaaatactgttcgattcgatcttagttcgactaacaaggtttaaggcccttgcaacatccacaaattcctaattgcggattccgacatccacaatattcaatttttaaatgagaaagtatgatttaaaaaaaacaaattgatttgataagcaaaattagttctttattttctctccaatttactaaataatattaaagtatcattttgcaactttatttcattattttacaattgttttttctatcagcacttatctaataatgattacattgatgaacttaaattttataggatatcataaagacataaagactgttaaagaattattgctgtaaaacaatctttaagataaacaactaatctatcaaaatcttatagattgttagctatacgtcctagcaccatcgagtaatcgttttcatattgtatgtcaatacggaaacactaatcgacaaatccaagagttttctaactttcaactgccgggtagtggtgaaaaatcaaatcttaaggacaaaaaaaaaaaacgaaacaaaaatcgcaatgagttattagagagagagaagacagggaattgacgttgtttgcatgagacacatgattaaatacaagttcaaactaattttcataacacaaacgaaaacgtctatatattgacttttccttatatccctaaaaagaataaattcaaatacttattattgagtagaggatgcctttcccacatgaaaaaatattttaattaaaaaaagattttaataacaaatttgagggctacgtttcttaaaaaagtatgctaatattgaacaaaaaaaagttatatagtaaacagtaaaaatctaagtaattgaaatgatcaaaacagtaaaaatagataaactgatgatatctcacatctattttggttatattttctgatttttatttttttcttggttatttatatatatatatatatgcattcttttatttgtgtcttgcactaattaatagactgtgaaccaattatataaaaaaaaaagacttgtgaaccgtataaaacgtgaaacatgcaaaattcgtcaagaaataataatagtataatacgactagaaatgtattgctttgaatttttgtgatgtggaatagacgaaggggtggtcatgtactactactgtaagttgaccctgtaaccaagtgattcaaagacaacaacaactgggaaaccaataattttaaaatccgtccaattgtatcatctgacatactagggagaaggacaaatatttaaaacatgttagttcgcatagttcaccgacctacattctaaaactccgcataagtacacagtcccagcccaacattattaaaagccttagggcgaaaaaataattttggacctttttgtttgttttttaaaagaaaaaacagaatttttggacatatttttaaaattgttcgggcctattcttgactaaaaataaaaggtataattatcagggcctaaatataatattttagtaggttttttttagtgaatattataaataaataaaaacgatttgaacccttttaagtacaaaatcaataaattaaatggtctgttttatagcagaaatattttagagttgggtattaattaatccacggcggtcgcacttctttcctacccaagtgaaaaatacaattcttatcatcataagaattgtatgactgaagtgagaatagtgacagatccggaaatgatctaataaattaattggagaagaattaacaattcgtggaagagtctatttatatatgtttgtgcaagacaataatttgcagaagaatagtcatatgcaaaattgccagtaagcattaaacatgctagttatagtacttattcaaaattggaaaaatcaaacacgctaatctcatttttaggtggaaccagtcaaagactaggccacccgccactgtacacgcatcagcatacgtatagttaaatacacttcggatttacgtacgtggtttttctttaatgtcagttaattaactacaagaaaacatagtttctgaaggtgatgagcaatgaagttgacaaaacgttaacgtgttttgaattcacctctttttttcatttctcaaaggcagttcacctcatgaaataatttaaggtagtgaaaaccataaccatttaccactttcaacacaaaaatgtgtgacgtaaatttgttctcatcatcaacttttataattccatgatgatgaaaaagtgggttcgaatgaaacgaaatttaatttgatctcagtgtaggtttaatcaaagattacatgtggtacagttcgagtaacatgtaattgtggtttaaatgttggtctagactccatcgagctaaaccaaagtcgggtttgagatcttgtataacaacccaacaaagaaacagagcatttgatcctccacttataaaaagatcgagtgtatgtatgatgatgtttgaagattgatctgagctaaagaaatcctaggaatacttttagctagccaacctcaactcataaaatccggtgtgtcatcttcattttcgttttttttttgtgtcatcttcttatacttctcatcttccccatattttcatctctatttttttctcatagtttttgttcaaattgatttgtgcatgtttaaggagtggtaatgagatagatagaaatagtttggaccatgaagacgaagagtttaagttttcctaaaaaaatattcatatggaagtcaacttcatagtaaacttcaacgtaagaatgtcaacttcatagtaaaacagaaaaattatctgcatcctattcacgtactcacttatgggaaaatgaaccaaaccttgcataatgtatattaacatgttgaatatttaactttgctaaattgtatcatattggaaaaaatatacttttatattttttattaatcagcttctgttattagtacacatctttgcagccattgagtaaaaagaaacgtatacactttttcttgacgtaattaaacagatacgtatacatttgtaagaccgcgtacttgtatatatatattcccagatgatttatgtgtaaactatattaggcctgcatagatacatatatgatacacacatatatatctatatagattatgagtgccagttcatgttaggaagctgaaacgcctgtcttaaaaccccatgatcagctagagacgacgtcgtatccataacaccatttgcatgaaaccccgaactctgaggaatctcactaagcatcgaaacaaaagagacattgtagttatcattgttgagatcacctgtatgatgaaacctcttgctcgataagaaagatccgaatgaagatgatcctgaggcctcgtggcccattcggtattgaccacacaaggaacgtttgtctgaagaaacgaccataccgtcgaaaaagtgttcttcgttattgttattattgttgtcgttgttgtctagtactgatgtagaagaagaattagcagatgattttgagagcatgccttccattagatcctctctaagtaatactctctccattgttggtctttgtgaactattcttcttatagatcctacatagaacccaatcgtctagctgcaaaattttgatttgtggtacaaatcaacacaccaaactatataataataatgtcagtcgcattaatccaaccagaagagtatcttgagttttcccaaaaaagaaaagattttggtatgattttcccacgtgaaacaatattgtagattaaaatagtagtgtataatggtggcttagtgagtttggttaatatcatttttcacatacccgtagtgagtttttccttgtcgtggttaagtcaggcggcttagccgcagtgctaaggttaccatcagtgaggcgatattcatgcatgatccaatctgtttttatccctttaggaggctttccaccgtaaaaaacaagcgctttcttgacaccaaccttgtgactattgcacgtaaatatcggtttatcggttcccgttgctttccaataaccggaagttgctgcccggtttggcctaaccccatttggatacttccgatcccgaggactaaagaagtaccactcgtgctctccaaaactcgccttgcctaaaccattcaaaatattattatccacaagatagttactatatataccaaatttaaatagtggctagattacagtggtcatagtaaaattaaatcgtacattttaatcatatcattaaagcataaattaggaaatataaatacttggaagctcccaaggatcaaacttgtaaagatcaatctctgcgatgattgagactggaagtggaacagaatctgctttcttcttgaggtaatgaactactagttcctcatcagtcgggtgaaaccgaaacccgggagggagatgcggatggcccggccctatgctcgaatcccccatgttttccatcaacttctaatttgatataatgacgatattttcacgaaatcagtctcatgatcgtcaagagaatatgtaggaaaagtatagattattttggagagtgaatgtgtttcatataagatgcgagaagaaataggtgttaggtttgtgtgagcatatgagtaccgaactgggtccctcgacgaggaaattacacgtggctaatcgtagggcccaaaattagcggccaatgggcattaaattttggagaaaaggcagggttttttcgaactgccttatgtcatgcctttcttatgctacacatcacgcacatacctcattttggtttttgtgtaagattttataaaaactagaaatgtgggaattctctataaatatattttaaaaaattatcgtgttaccaaaatgtgtttttcgttcgcaattgaactctagtaaactatgaagataattaatacaaagaaaatccaaatagtcgactgtagtagttatatatatatatatatatatatatatacatgtataaactttgggtactagcataattttccaagttagtaatattatcaataatcaagagtttcaaattactgatgatgtttttaggaatcgatcgactcgttgcatggaactacacgaggtgtacgaagattcttcgtcgtcgaaggacattgttcaagagatatggtgaggtgactttatcaggagtcaggagatatgaggtcatggggtctgctaggatgttttgttacatttcggtggacatcactaggacgtggtataaaaagactggctcaccttgatatagattgaatctagtggacctcatcctatagtagtaggcccggccataggcatgcatgcgatgctaagactcaaaaggtaaggcccatgatcctttcatctaaattcctttgaagcctaactttaagagtttgggtgatagaattgaggatttgcttctgagatatggactaggctaggattttaggcctctaatggctaaatttttgagaaatttcttcttcttccccctcttcattcttgtgagttgtgacaattctttttgacactatgttagcaaactctccaaattcttcttcttccaactgttccatgagaggattcgaggagactcatatattagtattacacacggttgtggttcagattactgtccactcccagcccagcccagccccgacatctcgaacattaattctatatatatttcgtctcttttttttctgtacgaacaaaatagtttagtatttcacttataaaattaacgagagtaaaaactacgatataatacaaatggccattaaagattaaataaatataaacatcaaaacatatcaaagcggactggttagttatgttacgttgtaccacctttttataactttttttaaaccgttttatttatatataagctgttgactaaactgaaaacatcaaaacatatatcttcctaagaaattggtgtgtctatttaaatttaatatctgagttaatatgaaatttaattttattgatgaatttgtattttgatttaatatctttattctagatacagttggtcatttctctttgcttttactatgttactttttgagatggtgaccgtttcaaagatgtttacacttttacttacttctttcaacggggtttagtataaaaaagaacaaaggaaaagtagcgaatactttttgacgcaaatataactaacaaatattttttgattcaaaagtatatgtacgtctttgaaggtttttttttaatcttttcttcaaaccacacgagaaaagacaaaaatgcttgcaagtcaaagataagaataaattcactcgtttcttgaagtattttcaaatagacactagtattttcttgaagtccaaatgttagaaaaagaagtttgaattcttccttgagtattagcgcgagaagaatcacaatttttatgaatatttacaaaaacaaagtggcaaaatatccaagatccgacatggagttctcggaccttattcacaaagacacaaaccatagctaactataagcgtaaaacgatcacttataaatatagagacacatatctatttcttactaatctaaaatcatttcttcttccacaatactaaaagcaattatcaaaaatatatcaaaaccagtcttcatctctaaatcactctttcgcttaattcaatcatttcatttcttcctcgtctattcaaaactcttcgatgcaacgtttgttaacaccttgctcaaaaatcgcatacacaacaagatacattgcaaatccaaccctaccttacccaaacccatgtgatattttcatcaatcatcgtgggatcgataccaagaagactatttcaggcctactatatgattgtttcactagacaacgtttgactgctttcttggatagtaagagtttaaagcctggagacaggctttttgtcgagatcgacatggcaatcaaagcatgcggggttggtattgcggttttctctcctcgttactgtgactcttacttctgtctccatgaactcgcattgctcgtgaagaacaagaaaagagtcatccctatattttgcgatgtcaagccatcggaactctgcgtaaaagacgacaagacacgtccagctgccgagatccggaggtttcaattggctctcgaggaagcaaaatataccgtaggactcacgtttgatacatctaatgggtatgctcttgtttttctacattatatatatatatatatacatatatatatatatatatatatttatcatttttaaccatatgaatgcaatatatagttcatttttacatattaaaatattaggattgcttaaaataaaaacatagcattttattttataaaacattcgactgtttttttgattacaggttcttttacgaatttgttagaaatcatacacgcaatatagaaataacaatcttatatctcataaattattatttggtaatgtaaatgtgcttgtttctaaattgagttttctattgttcagagactggtcagagttcttggccatggcatcggatgcagtcacgaagaacttgttagaagttgaagaaaggattggagattaattaaggagcatcaacaccacgtacaagctgaccattaccatcaataaaattaaaataaaatgaaggagaaaaaatacgctaattttccttgattctaatataatttaattgatgataattctattttaatttaattgatggcaattaagtattttgtgaattttaactactcatttttcgatgaacttcatcctcgtaagaagttagttaattgtgtttattgattctcttgtcacaaagtgatttattttgtaacctatctaatcatatagaaataattttaaagagaagcaaaatgtaatttcccattattatgaaatgtttctcgcatttttttttatctgtttccttatttttaaacaggtttgaaagttttcaatgaatccaaactgttgtaatatttttttttttgttgattagtcaatttaacattagaaaaacaattagtcaactaaatacttgagtaaaaacataatttattgaacataatcacaaatgctctacactgtattactgttaatcatatcaattgaaagaagctgttaaaaaaaaaaaaattgaacataatcacaatttcttttggtatatatatcgagtgatcgaatttttacaaatacaataagcaaaattttcacatccttctagaagcattctgaattaaaataaataatcttacatttaggacgaattccaaatttatatataatccattctgtattaaaatatgtatcatttaaaaccttgtgcaactaaatttgtttggattcacattttaaaatcctcacatttcgcataatgtttcaatatataaatctattcattgcttgatcattatacatttctgacgatatcttttttattctcacttgcaaatattttcaagaaaccaaaatcaaaatttattcccaatccaaacaaaactcataaccctaattccatagatcattcttgtcatggtcattcgtctctcatatgtcttttccttccaatatggacctactcatctattaaactccaattaagaataacttctacccgttgaggtgggcttacaccactttccctaaacggtactttgttatgttgtttgatatttcttttctagtgtctatgatatatcgatttaatagccgacaagagaaaaaaataacacatactataacaataacattgattataagaagatggatcgattaggaaaaataattaaaaaaaaacgacgacgaggatgagcataaaacataattgaatggggaccactaaataatagtattggtcagtcactaatgtgaatccaaccatgtgccaactcttaactcatcctttgctgtcaccgaaagcttcgaatccaccaaaaaaaaaaaaaaaaagtcaatatgtctccttcacgtctctgcctttatcttcttcttccttcttctccatcatcatcagagagacgaagacgaagaagaagaacttcactggttattctctctccgtagccaaccactatggattctagagctattctcgattccgctttgtttcaactcactcctactcgcactaggtctcacttttgatttgattgattgatcttcatttgttgttgaattttgattttcttttgttgaattgtgttttggttttgtggtttttgtgttgaagattcgatctggttctattctgtgggagtaagaaggagaagctagcttcagggatttttgaaccattcgtctctcatcttaagttcgctagagatcagatctctaaaggcggttactccatttctctgactcctccttcttctcactcttcttggttcaccaaatccacttttgatcggtaatttcaattttgataatccggcttcgattttgttgacaatttccaaattcagattcgaattatgctaattcgagtagaaatctggtgtttatgtcaagtttgtgataatgactttgtgatgataaatggtgtgtggaagatttttgttactgtgtagagacaatgttgacttgttattgattaagtttctttaattgtaggtttgtgagatttgtaaacacgcctgcgattatcgaaagatttgcgactctggagaaagagattttgcagattgagaattctattcaagctaatgaaattgccaatgctgctgatgctctgcaattacaagacggtaagctaaaaagctagcttgtaatggcaattgtgttggtttaaacagcgttcttgacattatcttaatcctgttttgcttatcatttgcagggagtaattctggagatagcagtaatctaaagaagtcgaatgagtcctctaaggtaactcgtgcgcgctttcaagtggtactgtgttattttcgtaagggctggtttggtgaattgatttttttcgtctcaatgtattacacagaaggaatctgagaatggcaatgaggtggtaggagaggaaacctctaagtaactcttttaactatggaacatttcttttggtgcattatgcaactgatggtgagtgttgctttgactaatttctttttttgtgtttgtttcatttattaggattcaacttcaacgtcttcttgaaactagaagaacattgcttcgaagagagcaagcaatggcttatgcacgaggggttgttgctggttatgaaattgatagtattgatgatctcattttatttgctgatgctttcggggcttcaaggttaaggtatgtaatgtaactactactaaacatttcatcgtttcttaacctctttcatttgctttactatgagatcagtttgaaatctaatgtccttttccatcattatgcagagaagcatgcataatgtataaagaactatggaagaagaagcacggtgatgggctttggatggcggaattagcagctgtgaaagcgtgtgctccagtggacatgtcattgttgggttcctcaggcatcatcctcactaatgaaggtgctgctctatcactaaatgggacagactcaatgccatctaatacaggttcggaaaataaaccaccttgtagtatttcatctcagagattccaataaaggttagattgctaatgtgaagaagttttgatttgtagatgacaagtcagttaatttagagcaacatccgtccggtgttccaaactttcaagcaccaatgggatggccaaaccatatgcctcaatacttttacccgtctccataccaaggctatccgtaccctcctatgcaacacatgccaaatcaaaaccaaggaaacatgccatggccttcaaggggcaaaacatccaagaaaaaagggaagggggattctgatggagatgagtctagtgaatcaagtgaatctagtgaatctgaatcggccagcgatgattctgcttcatctttggaagatcaaggtaaaagacactctcgtacaagtaaaaactcacgccgatcaaagaaaaaccggaagaagtcatctaaaactgttatcatccgtaatattaactatataaccccggagggaagaaatggagacatggagggaaatgagtttacggacaacggttccatcaaagagactgtagatgctgctgttggaatgctcaacgaaaaaagagctcatgagggagaagtttctggtgaagaaaaacgaagcaacgagaattgggattcatttcagaatattttgatgaggcacgatgatggctcagatgtgcattcaatggatgtcatcggtcaggagcatttcacacatagaggcgctagtgtgggtgcaaattctaatggcttgcaaacaaagaacactgcctcgggtgattccatcatcacaacgcataagtacatagaagatggaggagatagctttgatcattttgaaagtgaggatagtgctcgcaggcttccaagaacgagggactcgactgaagaatgtatgttactgcttaagagatcagaaatgttaggagatgaaagcaaagacatgtataatgctacaaggggtgaatcgttggtgaagaagtcagggagtggagaggattggtttactgcttcgggtaatcgtgctgggaaaccggaaatcaactacgggagaatgtcatttgatgacagcattttgacatctcaaggttctgataagagcaagaaacaagaattcgttgatgattctttcatggtccattcatcatcgcttgctgctgatgatctttatgactctcggtggagaccagacatggctgctgatattgttttagcctctgacgttgacaacgggcatgctaatgaaaaacacgattcatgggaaccaaatgatctttgtatgattcctgaacgcaattcaggagactctttggctaatgattattcgattgatttctctgctgaagcaaatgcaaggctatccagtaacggaacagctcaggagaaagaagataagagcggcgagaagaaaaacaatgtgaagaacccggaaactcgtaagtctaaaactccaagtagaaccagagcggaaacaatgtccaagactgcaaagaaaccaacagtagctagcagaacaatggcacagaagaacaagtttgaaaaggtaagatcaaaaaaatttacaatcgcagtttctttagcggtttttatccgataattgaattagtttcttgctttgggattgtaggaagaagagatgcggaagagaatagaaaaccttgtaatggaaaggcaaaaaagaatcgcagagagatcagccatgactgcatctcgtaaagtttctctagacaaaggttcgagcagagctcctttggttcgcgaaagggctacataagtgaagaaaaccgttggagctgcgtcaaatgagatactcaaaacgcttttctttggtcacttcaaaaattcttttacattcatttggtggtgatacaagctcttcttgattttgcttgtgtcacgactatttatttattattttctcaaacgtttttcttttctgaatattaatttgtaatttatttgggtaagacactgagatttatatatttgtaattttgattatatacacaaaagatacagaatctcttagtgcaaattaaattgcgacaatgaagaaagtttatgagcaagtaacatttgcgacaaagtttctagggtcatctagactaccttctcaagaaattgtgattaaccaacgaatataataattttcgtgacaaaaaaaaatcagttgatgttttgtaactacatccaagatattttacattaaaagcaacactaataattaataaagaaagtttataacaagttatgagtttgtgattcatcttctgtttctttttgggttttcaacgttggaaaatttgggtagatacttaaatgggaaggttgattctttttttgtaaacatattttcctagttccaactaacccttaactcaattagcaaattaaagagacgtgaacacaatgctttgccgattttgcctagaaagcaaagcgagtactaaacacatcgtaagattactcaaaacctttgtttcattggtctctttcttacacatttcgtgtcaatcaaaggtaattttttagtggatcccaggtatgatatttgtttcttgcgtaatgggtcatgaagttatgcctataaaaaacagagctagtagtaaacatattcacacattctattcttactaaacaatcctcgtttcattgctcaattttctatacattttcgtgttttttcttcaatcaaaggtacgttttgaaatagcagagcaaataccaaacacatccctcgtttcattgctctctttcttatacttttcttcttcaatcaaaggtaacattcttttagttggtctcagaaccaatctttgtttcttgaactttatgggtcttgaagtcattttccaaattttgctgcttattaattttcttgaatgtgcatctttgaaatcgacacgttttcgtaacttttgtgatctgcaaagagatttttctgagggtatttgggatggtaaactaaatatggatacagttttgtcttttacaatgctttactctcactttagtaaggttttgattattttctcactttttaataatcttgtgttaaatcatttgttttgttctctagaatcatcaattcatcttggtaatcaattttgttggtgtcattgtagatgaatcctgaaattctcgaggcaattcagaaaaagctcaaggctatggaggcggctaatagaattccgggagacaaagatgaaaaacaattcgttgatgagtacatgttctgtttcagaaacagctacactgagaatgaaactgtgtttcacatgaaaaataagtttccgtctttagtacctgcggatgcggatgtgagaaagttctttaaattgttgatatcagcgaccggtaaagagtcaaaaaaggcgtatctcaaggatgctgaagcttgttggtctcgaagatgtagtcaggggcgtgacacttctgaggaagctaagaacagtcaaggtgaggccagtacatctcacaaatgtgaacgtaactgcaagaaacgttatcccaaaattccgaaaaattaatactttgatcaaaggatacgttgtctaaataagagtggtttttgtgttcctatacaaccaaaatccatgtttatatatgatgtacctttgtttaggagttgtactccaacgtctttgtgattcaccaataaaagtagtataatgaaataccaaaaataattttatctatcttttcattttattcgtaaatgaattgattacaacttaagagtcccacttgaggatccaatcttgtgtgttttgtttatgtacaaagataggtattggttagtgactctggatcttcttgaataatgtcaaattgagtaaacataaataggtcaggtgcatgtggtatagatgcataaacgatgtatatatattttgtaatgtggattatatactccgaatataaatgtatacttaatgttttaatagtgcacataaatgtaaatctaaaaaaatctcgacttgcatgcaaactcaaaaagatacttacggcacaacgcgttttaaaaatttgagtgatccacgtaaaaattgggatgcacgaatggtttactcaaactgaatccgcctcatctcttcgtcaatagtttactttaattatttttcacctttttgttaatcttttttagttttcaaagagtgtttaattagataacaactttatcaacttttcgtagttttggcatttcttgacgatgtaaaatttcaaactctataacccttcccatatatggcatgcaaagagtgttataactcaaagtatacatcaatttctgtactccactaacatttttaacgtattgattcacgcaagaggttgataaataaatatgatgaattccgaaggttttttaaccaatggggatgattattattaaaatccataaatatataaaactcaattctgtacagcaattacaatttattttattttttgttattgattgaactctataatgtaaatatgtaatacactctataatatatatggataatatttttatatggggaaaattatgagcaaggaactattgcactgcatatcaatgaattgtgattaaccaacgaatataataatttttatgacactaaaaaaactttctgtaataatatccgagatagatattttagatataaaaaaattgtaataataaagaaagattataacaagtgatgatgagtttctgatgctttgagattcttctttttctgtttctttggttttcctacgttgcaaattttgagtaaatactttaatcggaatttgattctttttgtttttctgtaaataaatttccttagttccaactaacccttaactcaattagccaattagagagacgtgaacacaaagccattgccgattttgcttgtaaagcaaatcgagtagtactaaacacatcgtcagattactcaaatcctcgtttcatttctctctttcctacacatttcgtgtcaatggtattttttagtggatcctaggtctgatctttgtttcttgcgtaacaggtcatgaagttttgcctataaaataacagagcaagtactaaacatatgcacatatcctacgcttactttcaatcttcgtttcgttttcgtttcgtttcttcaatcaaaggaacgtttgttatttgatctttgaagaaacagagcaaatattaaacacatccctcgttccatctttcttatacattttttcttcaatcaaaggtaccatattttaagttgatatcctgatttttcaaattttgctgctttttgatttcagtcttgatcattttttatttctcgaatgtgattctttgaaatcgaacacgttttcgtaattcttgtgatctgcaaagagatttttctgatggcatttggataatgtctgaaatatggacaaacttttgttttgtgtaatgctttactctcacgttagtccggttttgattattgtttcagttttgatgatcttgtatttgatcctaagataatcatttttctcttgttggtatgattttagatgagaccagaaactctcgcggttattcagaaacagctcacagaaatgaaagcgtctcagagaaatatgaccgaccacgaagtaatacgagccatgaacgagttcatgttctgtttcgaaaactgttacacagagaatgaaactgtgaatcatatagttcagaagtttccttcttacgtacccaagagtgtaagaagtttctttcagaagtccatagccttgatcgatgaagagtcaagagaggcgtatcttacggatgctgaagaatgtgctagtgtaagaaggagtcaggctcgtgatacttctgaggaagctaagagaagtcaaggtgaggccagtacatctcacaaatgtgaacctaactgcaacaaacattaaaattaatactatgatcaaaggatacgttttctagatctatatacaacaaataagagtgggtattgtgttccttatacaacaaaaaccacgtttatgttttccctttgtttgtaggagttgtactccctttaattcccctttgtttaggaattggtatttgtgatcccaaaataaaaacagcgtaatgaaaaactaaaaaaaaaatttatctatattttcattttattcggaagttataattgattacaactcaagaacccacttgaggagcctgtgttttcctttcgcctaagttcttatggaaccaatcttgtgtgtttatttacgaacagagacaagtatatattcgttagtgactaaagattgttttacttctttgttttttatcataatttttgccaaggaactaaatatttaggagtttctattgtaattcctaactatttcatttttatgatatttactgacttagaaatatatatatattagtgactcgggatcttcttgactaatttaattttgagtaaacataaataggtcagatgatatacataatacatgcatacacgattttacataattttttgtacttgtgattatatactcagaatataaatgtatacttgatcatttgtacttttaacctttttgttaatcattttttcgttttcaaagagtgtttaattatataacaacttttcgtagttttggcatttcttgacgatgtaaattcaaactatgatccttcccatatatggcatgcaaagagtggtaacttttttttttttttttttaagagtggtaacttatgtacatcagtttctcactccaccaacatttttaacgtattgaatctcgcaagacgttgataaactaataaatatgaaaacaatttgtttggaaaaagtaaaaaaaatatgagttccgaagctttttaaccaatgggtgattgttattaaaagaattattaatatagaaaactcaattctgttaagtaattacaagttactttttgttatagtatattctatatttctattgaaatatatatatatagacagtatttttatatgggaaaaattatgagcaaggaacaatatttcgacgatgatgtttctagtggaagacgagtaatacaatatttctgaggcattagactatagcatctcgaaaagtttgtattgcacttgcatgcatatcaataaattgtgattaaccaacgtatataataataatattcgtgataataaaagcagttgatgttttgtaataacatccgagatattcattttagattaaaaccaatacgaataataattaaaaaaaaatattataacaagtacatgatgagtttttgatgctttgacattcttcttgttctgtttcttttcggtttttcaacgttaaattgttttgtgtagatactttaatgggaaggttgattcttatttttgtaagtaaatctacctagttccaactaacccttaactcaattagcaaattagagagacgtgaacacaatgctttgccgattttgcctagaaagcaaagcgagtactaaacacatcgtcagattactcaaatcctcgatcgtttcatttctctctttcctacacaattcaaagctacttttttagtggatcacaggtctgatcttttttgtttcttgcgtaatgggttttgatgttttggctataaaaacagagccaaagcaaaggtctaaatacattctctactctttcttacaatcttcgtttcatttctctctttcctatacatttccgtacttttttctttcaatcaaaggtacgtttgttatttgatctttataaaaacagagaaaatattaaacacatccctcgttccatctttcttatacatttgttcttcaatcaaaggtaccatattttaagttgatatcctgatttttcttgcaatatgggtcttgtccttatttttcaaattttgctgctttttgatttcagtcttgatcattttttgtttcttgaatgtgattctttgaactggaacacgttttcgtaattattgtgatccgcaaagagatttttctgattgcatttggataatgtctgaaatatggacaaacttttgttttgtgtaatgctttactctcacgttagtccggttttgattattgtttcagttttaatgatcttgtatttgatcctaagataatcaattccttttgttggtatgattctagatgagaccagaaactctcgcggttattcagaaacagctcacaaaaattaaagcggctcagagaaatatgaccgacaacgaagtactacgatccatggacgagatcatgttctgtttcgaaaactgttacacagaggatgaaacttttactcatatcgcccagatgtttccttcttacgtacttaagattgtgaaaagtttctttcagatctctaaagccgtaaccgatgaagagtcaagagaggcgtatctcacggatgctgaagaatgtgctagtgtaagaaggagtcaggctcgtgatacttctgaggaagctaagagaagtcaaggtgaggccagtacatctcagaaatgtgaacctaactgcaacaagcattaaaattaatactatgatcaaaggatacgttttctaaatttatatacaacaaataagagtggttattgtgatccttatacaacaaaatctacgtttatgttttccctttgtttataggagttgtactccctttaattcccctttgtttaggaattggtctttgtgatcccaaaataaaaacagtgtaatgaaaaaccaaaaaataattttatctatattttcattttattcggaagttataattgattacaactcaatgagacccaattgaggatcctgtgttttcctttcgcctaagttcttatggaaaccaatcttgtgtgtttatttacgtacagagacaagctaagtatatattcgttagtgactctggatcttcttgactaatttaattttgagtaaacataaataggtcagatggtatacataatacatgcataaacgatttactgtacatattttttttgtactttgggttatatactcagaatataattaatgtatacttgatctcttattagtgcacattaatgtttaaaattggcatggtgaaaaatcttatgatgatttaatctcgtgttgcatttaaattagtttagtggtccacgtaaaaattgggatgcatgaaagagtttactcaaactgaatccgcctcatctcttcgtcaatattttacttttcacctttttgttaatcttttttagttttcaaagaatgtttaattagataacaactttatcaacttttcgtagtttttggcattatcttgacgatgtaaattcaaactataacccttcccatatatggcatgcaaagagtggtaacttatgtacatcaatttctcactccaccaacatttttaacgtattgaatctcgcaagacgttgataaactaattaatatgaaacaaatttgtttggaaaaagtaaaaaaaaaatatgaatttcgaagctttttaaccaatgggtgattgttataaaaactataattaatatataaaactcaattctgttaagtaattacaagttactttttgttatagtatattctattgaaatatatatatggacaatatttttatatgggaataattatgagcagggaacaatacttcgacgatgatgtttctagtggaagacgagcaatacaatatttctgagtcattagactatagcatctcgaaaaggttgtattgcacttgcatgcatatcaataaattgtgattaaccaacgtatataataataatattcgtgataataaaagcagttgatgttttgtaataacatccgagatattcattttagattaaaaccaatacgaataataacccttaactcaacgtatatattataacaagtacattatgagttttttgatgctttgacattcttcttgttctgtttcttttcggtttttcaacgttaaattgttttgtgtagatactttaatgggaaggttgattcttatttttgtaagtaaatttacctagttccaactaacccattagagaaacgtgaacacaaggctttgccgattttgcctagaaagcaaagcgagtagtactaaacacatcgtcagattactcaaatcctcgtttcatttctctctttcctacacatttcaaaactacttttcttagtggatcacaggtctgatcttttttgtttcttgcgtaatgggttttgaagttttggctataaaaacagagccaacgcaaaggtctaaatacattctctactctttcttacaatcttcgtttcattcctctctttcctatacatttccgtacttttttctttcaatcaaaggtacgttttcttcaaacagagcaagtactacgcattactgtgtctttttacttacaatccttgttttgttctctttcctatacttttctgtgtatttcttagatcaaaggtactttttctgtagttatctcaggtttgatagttagggatttatggtcttgtcttgatttcgaaattttactacattttactggctctgtttcatgttgttttctgtctggatcttttttttgtttcttgattgtgcgttgaaagaatcttcgagtttcttaattcttgtgatctgcggatgatctgtctgagggcatttgtgatattatctgaaatcttgaaagtggatagacttttgttgactctctatagtgttacttagaataaatccattttttgttggtgtgattgtagatgagaccagaaactcgcgagatcattgagatgcagctgctcccggctatgaagttggttaaggaaaggctcgagagggaagtagagaaacaaagcatggatgagtttatgttctgcttcgaaaactgctacactgagaaggaaactgagatgcacgtgacccgcaagttcccttctttaaaacaatcggatgtgggaattggctttcagacgtttataggcttgatcgataaagagtcctcaagagaggcgtatctcaaggatgctgaagattgtgctaatgtaagaaggatagaggcacgtcaaggtgaggccagtacatctcacaaatgtgaacctaactgcaacaaacattaaattaatactatgatcaaaggatacgttttctagatctatatacaacaaataagagtgggtattgtgttccttatacaacaaaaaccacgtttatgttttccctttgtttataggagttgtactccctttaagttccctttgtttaggaactggtctttgtgattccaaaataaaaaatagtattatgaaaaacaataaataaattttatctatttgatgcatattgttgaatttgcaattttattgagcctgttttctggaaatgtatggaattc

SEQ ID NO: 103 - DNA, 97789 bp, Arabidopsis thaliana
aagctttgatcatcttggggatacactgctacatacctcatccctgacgtataacctcgccaccgctgagaagcgggtgttgacttcttggaaaagttacaccgatccatcacctggcgactttgtgggccagattacacctcaagtgccatcacaggggttcgttatgagagggtcaacgccttactggagaagcggtccatgggctaaaacaaggttcactgggataccgtttatggatgaatcatacacaggtccattcacccttcaccaggatgtaaacgggtcaggatacttgacttattttcaaagagactacaaactttcacgtataactttaacatcagagggatcaataaagatgtttcgggataatggaatgggctgggaattgtactatgaggctccaaaaaaattatgcgatttttatggtgcgtgtggaccatttgggttgtgtgttatgtcaccttctcccatgtgtaaatgcttcagaggttttgtaccaaaatctgttgaggagtggaaaaggggaaactggactggtggttgtgtgaggcataccgaactagattgtctaggaaactctactggcgaagatgcagatgacttccatcaaattgccaacataaagcctccagacttttatgaatttgcaagttctgtgaatgctgaagaatgccaccaacgttgcgtccacaattgttcttgcttggcatttgcttatattaagggaatagggtgcctagtgtggaaccaggacctaatggatgccgtacaattttctgcaacaggagaacttctttccattcgtcttgcacgatctgagctaggtatggcttaaaaattaaaatcacagaccttccttgatatttctctttctttttagtttaatttgttgtcttacatttctcagatggaaataagcgcaagaagactattgttgctagtatagtgagcctgactctattcatgatcttgggcttcactgcgtttggtgtctggagatgcagagtggaacatatcggtaacatattgatgactttactatctaatgatctcttgttgctcttcaattcatttgcttgcaaaagaaaaaaaggttttaggctcttttacatttgttagaaattaccgattactaaactagaataaaagggagtgtttccactaaatcgacgcactaatacatgttctttaaacgacaatttgttcttttggtacattgatttcggctttaaaaaataaaaaagcttaatatgctcacatacgattataacgccatgttttgaattgcagctcatatatcaaaggatgcatggaagaatgatctgaaaccacaagatgtcccaggtttagatttctttgatatgcataccattcaaaacgccaccaataattttagtctatcaaacaaactcggacaaggtggatttggttcagtttacaaggtcagagaatttatcctttttgctcttctcgattctctgtttatactctcaaaatgaccttctgcaattctgttttagggaaagctgcaagatgggaaagaaattgctgttaaacggctttctagcagctctggacagggaaaagaggagtttatgaatgaaatagtactcatctcaaaactccaacacagaaacttagtcagggttttgggatgttgcatcgaagaagaagagaagctattgatttatgagtttatggtgaacaaaagccttgatacctttctctttggttggtcccttcttgcatccttcctttactattcagtaactttttatatatatgtggaaactgtttgtctgacagttttatttcttagattcaagaaaaaggctggagattgattggccaaaaagatttgatatcattcaaggtattgcacgtggacttctctatctccaccatgactcacgcctcagagttattcaccgagacctgaaggtcagcaacatccttctggatgagaaaatgaacccaaaaatatcagattttggattggctcggatgtatcaggggaccgaatatcaggataacactcgcagggttgtaggaactctgtaagaatctaatttcaaagacatgattaactaagattcaaagttaatatcagatattaacttgggagaaactatttgatatatgtgcagaggatatatgtctccagagtatgcatggactgggatgttctctgagaaatctgacatctacagcttcggagttctaatgttagaaatcatcagtggagagaagatctcaagattcagctatggcgtagaaggaaaaacccttattgcatatgtaagtaagatttataggcattgacacagtaagatcttgtatttgattctcattaagtgcgcagatctcgctgactgtttgaaaacatgtattgctcttatattcgcttggtctgaaatcacaacaggcgtgggaatcttggtctgaatacagaggaattgatcttttggaccaagatcttgctgattcatgtcacccattagaagttgggagatgtattcaaatcggcttgctctgtgtacaacaccaacctgcagacagacccaacacacttgagttgctggctatgctcaccacaacatcagatcttccatcaccaaaacaacccacatttgcatttcacacgagagatgacgaatcactgtctaacgatttgatcaccgtcaatgggatgacgcaatctgtgatccttgggcgttaagaaaccatttgtgatggaaattgtggaattgaagtgtgttaaaattgttctcttaaagagttcatttttcagtgttaatgacttcaccattgtttaaaataaaaacttcaacattgtttaatccaaataaaaaggtttttaacttaaacatctcacgaacttggaagagattgaaggcaacccagaagagtcgatggatccttcgacctatatgttggctcattcagtggttctcgacccatctcctattctggggtttcttcggttccaatgtgtgtcgtctcacaacttctgctctcgccggtgacaccaatgttaaatttgggggagaatcacttaagcccagattttgggagttggaatcagccatacttccatgtgtagtttcggtctcgatttggggaactagagttcaacgacattagcgattatgcactctaagtgttcggtgaaatgcttgaacgagatttaacgtagtttgcagtacaagaacttgttccggtatatctagtcaacaatttaaactgtgttgtaagataaaaacaacgacttcagaaaccaataagaaagatttgatgttaattcatctgatttattcatatattcatctttcaattgttgcagggaatgtagatttggttcttggactccaagacctggcaaggacatggaaacaacacaatatttcagtctgaagtcgatcgattggattcttctagccaggctataaattctcatcttttgactaatgcagggtatacatgcctaacattcactggttctggcccaacaacttaacaatgacatgaaaaatgttgctttgtgaggtcaaatgttgattgggtaaaaggttagacttcttggaaattattgaaatttttttggtattatgagataaggtttagtaaagtttcatggaaattactactcacaatgccaagtggggaacctagactgttttttgctgagatattgcagctttgaatcagtcaatatgtcaagactctatattgcagaccttttgctcatctcttgtggtcaacattgcttataggtcccagaaaacagttcccacaagtccctgcgattttgcttttcctggctaactttctcacttcgcttcataaactaatgttgaaaaatctgattgattgatattttcatctcagagtgtagatgtctaactttcattggttccaaggtcaacttgaatggttgattgggttaaaaggttagacttctccgtgacaaactgaaaacataattaatattatttttatactaataatttgattgtggatgaagtaatgcagaattttggaacacaactgcggtcaggcagtcagcattgttttaaggtcctcacaagcccctgactttgttattgtgacttactttcttgctaaataaataattctttgttttttaaattaatcttaagaaaatagttcttgtagacacatggggaagaagaggattgtgttctttgcttgtttgctcttgtttaccgtcctattacgttttagctatgcagggataacgacagaaagtcctttgtcagtcgaacaaacactcagctcctctaatggaatttatgaattggggtttttcagtcctaataactcccaaaatctgtatgtgggaatctggttcaagggtatcattccccgggtggttgtgtgggtggcaaatagagaaacacctactacagacacatcggcaaatcttgctatcagcagcaatggtagtcttctattgtttaatggcaaacatggtgttgtgtggtccatcggagaaaattttgcatctaatgggtctcgtgcagagcttacagacaacggaaatctagttgtcatagacaatgcttcgggaagaactttatgggaaagctttgagcactttggtgacactatgctacctttctcaagcctgatgtataatctcgccacaggtgagaagcgggtgttgacttcttggaaaactgacactgatccatcgcctggcgtatttgtgggtcagattacaccacaagtgccatcacaggtgcttattatgagaggctcgacgcgttattatagaaccggtccatgggctaaaacaaggttcacagggataccactaatggatgacacatatgcaagtccattcagccttcagcaggatgctaacgggtcaggattctttacttattttgatagaagtttcaaactttcacgtataattatatcatcagaaggatcaatgaaaaggtttcggcataatggaacggactgggaattaagctacatggctccagccaattcatgcgatatttacggtgtatgtggaccatttgggttgtgtattgtgtcagtacctttaaagtgcaaatgcttgaaaggatttgttcctcattccactgaggaatggaaaagaggaaactggactggtggttgtgcgaggcttacggaactacattgtcaaggaaactctactggcaaagatgtaaatatcttccatcctgttaccaacgtaaagcttccagacttttacgaatatgaaagttctgtggatgctgaagaatgccaccaaagttgcctccacaattgttcttgcttggcctttgcttatatccatggaatagggtgcttaatctggaaccagaacctaatggacgctgtgcaattttctgctggaggagaaattctgtccattcgtcttgcacactctgaactaggtacggcttaaaagataacatagacgatcttgtctgttaattataactttgtcttcaactctagtgttctctttgatagcaatatggtttattgtttaatttatttatgtcttaaatatctcaggtggaaataagcgcaacaaaatcattgttgctagtactgtgagcctttctctgtttgtgatattgacttctgctgcatttggtttctggagatacagagtgaaacataaaggtacacactgattatcatagtatctctttgtcgttacatttattacaaattactgaaaacttaaattgataaaaagcgaagtttttcccactacgtcaaacctacactaaatcgacgcactctatgttctttgaactatcatatgttctctttgcttcaaaatatctgaagatattatgacctaacacgcgagttctaactcaattttcagcctatacgttaaaggatgcctggaggaatgatctgaaatcaaaggaggtcccaggtttagaattttttgagatgaataccatacaaactgccaccaataatttcagtctatcaaacaaactcggacaaggtggatttggttctgtttacaaggtcaggagaagttatcctttttgctcttcaagatcctctgtttatgccctcgaactgaccttctgcaatctgtttcagggaaagttacaagatgggaaagaaattgctgtaaaacagctttctagcagctccggacagggaaaagaggagttcatgaatgaaatagtactgatatcaaaactccaacacagaaacttagtccgggttttgggatgttgcatcgaaggagaagagaaactactgatctatgagtttatgttgaacaaaagccttgatacttttgtctttggtgggtcacttcttggtctttctctttttgttttgcagctttttctccctataccggaatttcttatctgataacttgtatatggtagatgcaagaaaaaagctcgaggttgattggccaaagagatttgatatcgttcaaggtattgcacgtggacttctttatcttcaccgtgactcacgcctcaaggtaattcaccgagacctgaaggtcagcaacattcttctggatgagaaaatgaacccgaaaatatcagattttggattggctcggatgtatgagggaacccaatgtcaggacaaaactcgcagggttgtaggaactctgtaagaacctgtctttaataacatgcttggcaagattcattgtcatgttagtccaatattaaactaggtgatatgatactattttatttttgaccagaggatatatgtctcctgagtatgcatggaccggagtattctctgagaaatcagacatttacagcttcggagttctactgctagaaattatcatcggagagaagatctcaaggttcagctatggcgaagaaggaaaaacacttctcgcatatgtaagttaattctttatgttttcacacatttacaaaggatttcaaaagtggttcttgctctgatactctttaagatatgaaactaaacgtctaaacaacaggcatgggaatcttggggtgaaaccaaaggaattgatcttttggaccaagatcttgctgattcatgtcgtccgttagaagttggaaggtgtgttcagattggtctgctctgtgtacaacaccaacctgcagacagaccaaacacacttgagttgctggctatgctcacgacaacatcagatcttccatcaccaaaacaacccacatttgtagtgcactctagggatgatgaatcatctctgtctaaggatttgtttaccgtcaatgagatgacacaatctatgatccttgggcgttaagaaaccaccgtgatggaaattgtactactgatgttgataacttcaattttattatcatttttttttatgaatgttgaaatcttcagaactgatccattcttttattgcgtttttttttcgttctttaagaaaccatttagttggtgtattacccatggttctttaagaaaagctttaaagttgcgctttaggcttacaagttactgattctgaggctgacacagtgtttcaagctaaggattcatttcgttgggtccaactggtgaaaattgtttagaggtgcttattttagacgagtcatcactcatcactacttcattattgtctaagaaatgtctgattaattaaacattgatgtatctttcacagattaggtcaatcaatgcgtgattgattgggttaaatgtcgggttcttaaagtcagattgaccattcgattgatgcaagagtatatattcctatcattgacaagaacatgaaaatgacaatgttgctatgggagaaacagattgggtaaaaacgttggactttttcgtggccattacataagtattatatttattttctattactatattaagcaatgcagaattttcgaacataagtctggtttggtcaacatatttgtaggtgtttgagaatatagtactcacaacgtgactttgttttcttggtttactttttcttttgttaacatgtttgtttcttaaattgatccaaagatatagttcttgtagacacaataacacatggggaagaagaggatcatgttctttgcttccttgctcttaattaccatctttttaagtttcagctatgcagggataacgagagaaagtcctctgtcaataggaaaaactctcagctcctctaatggagtttatgaattgggattcttcagttttaataactcccaaaatcagtatgttggaatctggttcaagggtatcattccccgggtggttgtgtgggtggccaatagagaaaagcctgttacagactctgcagcaaatttaactatcagcagcaatggaagtcttctgttgtttaatgaaaatcatagcgttgtgtggtccattggagaaacttttgcatctaacgggtctcgtgcggagcttacagacaacggaaatttagttgtcatagacaataattcgggaagaactctatgggaaagctttgagcattttggtgacactatgctacctttctcaaacctgatgtataatcttgccacaggtgagaagcgggtgttgacttcttggaaaagtcacactgatccatcgcctggcgattttacggttcagattacaccgcaagttccatcccaggcgtgtactatgagaggctcaaagacttattggagaagcggtccatgggctaaaacaaggttcaccgggatacctgtaatggatgacacatatacaagtccattcagccttcagcaagatacaaacgggtcaggatccttcacttattttgaaagaaacttcaaactttcatatataatgataacatcagaaggctcactgaagatttttcagcataatggaatggactgggaattaaacttcgaggctccagaaaattcatgcgatatttacggcttttgtggaccttttggaatttgtgttatgtcagtacctccaaagtgtaaatgcttcaaagggtttgtaccaaaatccattgaggagtggaaaagaggaaactggactgatggttgtgtgaggcatactgaactacattgccaaggaaacactaatggtaaaactgtaaacggcttctatcacgttgccaacataaagcctccagacttttacgaatttgcaagttttgtggatgctgaaggatgctaccaaatttgcctccacaattgttcttgcttggcctttgcttatatcaatggaataggttgcttaatgtggaaccaagacctaatggacgcagtgcaattttctgcagggggagaaattctttccattcgccttgcaagttctgaactaggtattgcttaaaacataacacgaaagagagacttcgccattacaactttatcttccactccattggtactgttctctaactttttttcgttttatatatctcaggtggaaataagcgcaacaaaatcattgttgctagtattgtgagcctttctctttttgtgatactggcttttgctgcgttttgtttcttgagatacaaagtgaaacataccggtacacaccgatgatcttactatctttctattgatttcgagttttttgtttattcatttgctagctaatgcatggtaacacactgactattattgaaagtctagtttcagcgaagatatcaaagattgcttcaaaagaggcatggaataatgatctagagccacaagatgtctcaggtttaaagttctttgagatgaataccattcaaactgccactgataatttcagtctctcaaataaactaggacaaggtggatttggctcagtttacaaggtaggagattttttttcttttctttgcttctatgtattcgcctttatgttcacgagatgactttctgcaatctgttttagggaaagctgcaagatgggaaagaaattgctgtaaaacggctttctagcagctccggacagggaaaagaggagttcatgaatgaaatagtactcatctcgaaactacaacataaaaacttggttaggattctgggatgttgcattgaaggagaagagaggctgttggtatatgagtttttgctgaacaaaagccttgatacttttctcttcggtgggttccttcttgcctcatttcttttctacaagcggctttttttctacatggaactgtcagttctgatcgtttctatacggtattattgcttagattcaagaaaaaggcttgagattgactggcctaagagatttaatatcattgaaggcattgcgcgtgggcttcactatctccaccgtgactcatgcctcagggtcattcaccgtgatcttaaggttagcaatattcttctggatgagaagatgaacccaaaaatatcagactttggattggctcggatgtatcagggaaccgaatatcaggacaacactcgtagggttgcaggaactctgtaagaacatgtctttaattacatgcttgtgaatgattcatagttataatcatatttaaactatttgatatatgtgtagaggatatatggctcccgagtatgcatggactgggatgttctctgagaaatcagatatctacagttttggagttatactgttggaaatcatcaccggggagaagatctcaagattcagctatggtagacaaggaaaaacccttcttgcatatgtaagtaaggcttttaggtttttatacacttgtagatgtttcaaaaatgtttcttgctgttacattctgaagacctgaaacctaaacaacaggcatgggaatcttggtgtgaaagtggaggaatcgatcttttggataaagatgttgctgattcatgtcacccattagaagttgagagatgtgtgcagattggtttgctatgtgttcaacaccaacctgctgatagaccaaacacaatggagttgttgtctatgctcaccacaacatcagatcttacatcaccaaaacagcccacatttgtagtgcacacgagagatgaagaatctctgtctcagggtttgatcaccgtcaatgagatgacccaatctgtgatccttgggcgttaagaaactgtgtgatatggaaaatttttacagttgaaatgtttggattgtacattaggttcttggcctaacacgctagctaacagggatatgaaaatgacaatgttgttatgtgagctcaatgaaaaagaaacgtttaatgatagcagtctaacgttctcgtctaggttccccctcctccacttgacgttttgagctatatccatggactttataaaccgctatttttgcagctttgaatcagtcaatattgctgaccttatgctcatctcttgtggtcaacattgcgaataggtgcttgaaattagttcccctgcgtacgttattattatttttggcttatattctcttgttcaaagttcaaaccatcacttttaaaaccaccaatattgtctcttgttcaaagttctctgatttgatcacatatttttgtgtttttttgaagtagtcatttgaaaatcgtattacacgtcttagaaatttacatcaaagggatcaatgaagaggtttcatgcttaatataaatggagtgagaactaaaactacgaggctctagtacttaagtttgctttcctaaggatttaatagtgcgctgaaagcgttcggtatgttatgtttcaaagctgatcagagcaagtagaccaggacctaatggacacagtgcaattttctccaggaggagaaattatttccattcgtcttgcacgttctgaactaggtacatataacaggaaagagctactccgtcaattaaacgatgatagtgttctctttggtagcagtatgacttgttgtttatttttcttttgtcttataaatctcagatgcaaatgagcgtaacatgatcattacagctagtattgtaagctttgctctgtttgtgataatggcttctgctgcgtttggtttctggagatataaaggtacaaactgatgttcttgctacctttctattgatttcttgtttttttttatttacagtactcatatcttgctatcggtaacacactgatgacctatattataatcagctaagatatcaaaggatgcttcacaagttgcatggaggaatgatttgaaaccacaagatgtatcaggtttaaatttctttgagatgaataccattcaaaatgccaccaataatttcagtatatcaaacaaactcggacaaggtggattcggtccagtttataaggtcagagattttttatttataacctctttggtcttttctattatttgcttatgctctccagataaccttctgcaatgtgtttcagggaaagctgcaagatgggaaagaaattgctgtaaaaaggctttctagcagctcgggccagggcaaagaggagttcatgaatgaaatagtactcatctcaaaactacaacataaaaacttagttcggattttgggatgttgcatgtcgcccattagaagttgagagatgtgtgcagattggtcttctctgtgtccaacaccaacctgcagacagaccaaacacacttgaattgctgtccatgctcaccacaacatcagatcttccaccaccaaaacaacccacatttgtagtgaacacggtagttgatgaatcaccgtctaagaggttgatcactgtcaatgagatgacccattctatgatcctagggcggtaagagattatgtgatgaaacctgtagagtgaatgtgtgtttgattgttcacgaaaggaatcagttttcgaatgtatataacttaacctttcatgctttttgtaaaagatttttcacttaagtaaatagagaaaattactatagatgagcttccaatttggttgaccaatgatttactatagagtttgcatttccagttgttctccagcagaattgtctaatcttgtgaggagcttatctgcagagccaaatgagctcataattttgggtttccattggttagatactatcatatcctcatagtataaaagtagaattagtcaatgccttaaatctaaataagggagccatgattgaatttgcacgtattaaaagtgaagaagaaactcaagtccacaggagaaaagtgtgacactccaaccaaaacaactcataattggtactaacaaaatatttcacatagattccaaattttgattagtgtatagcgaaaaaggaaaaaactgggcttgttacatatcttcagctcaattcggaggaaactgatagatagtaattccaagacaaagatgttacatgagaggcttttgagtagattctaactttagattcattaaagtatttactaaagagcaatagtcataatattgagagaattgttttgatggacaataaaagctgaaagttaaatcctaagcatataaagaaagaatttgcatactagcaacaagacatgctaaacattgagggatcacaatacgtagttccttccttggaccggtatcgggatgtaacatctagtcatcataagctgttgctgatgctgctgctgctctagttgatattgctgatcatcagctcttcttccagtactctcctttctactattgaccaaatcgaaaatcaacttagtgaagacacgagccgtcaattcgctgtctgatccagcgtgatgagcttttccaacacgcctcatctgcaacacatccgctattctctgtagtccgaaacggctacttagtccgctgcataatccagccattttcttcacatcataaacaaaccttcccaaaagctgctggacggtttcatcaaactctttcgaagtctcgggtaatggttttctagttaaacctttaagtagataagctttgtcgtaagagccttgaaaagtcacccatctcatttttccatgtttctcattgagaatctgagaaaactccatgaagaactcttcgattccaataccttcttctctgatcttatccagatccaaaccattgttttttaaaaacgctatagatttatcatttttcaagctcttagattcgttgaaatctgacaagttgatctcccaggttttagtgattcctttgccgaatagcgttaaccctaactggatgagatgggtgttgtccacattgaatttcatgtctctataacgaatttcatcacttgcgtccatgggagtctcctttaagcatccgggaaactctgtgtcgatagcgatggaattacaatgtttcaaacaatctcttatcgaattcatctctgcttgcttgttccatctccaaacttcaccgctcatctcgaacgaaactaagaaactgtttgtttatctgaaagagaaagtgagataacaaatgaattttatttggttggcgttatattattagagaatttatagggattagattaagacaccgacttcagtttccttatttttaggatactataaagttttcattttttttccatcaaaagttcgtgttgacttttttgactcctaattcttgttaaacacgagttttcaatttttctcttaaaattcaaaaacaaaaaaacgcgtggttccgaagcggttttcaatttttaacactaaaccgaattaaattccttgcccgaaccgaattaaattctaatttctctctcaaaactcaaaagccttgtttccgaagcggtttacgatttcaacgctaaaccgaattaaattcctattacaaattaaagtctaattttccatcccgaaatacacgaaattgacaaaagactttattttaagtcttcccggaaggttcttctctgggttagtggcttgacgacacaagtcaagcaacctgtcatacactgacacaagtcaatcttgactgttgaattattcggctgcttttggatagtgacagttaagcccatatggttggagtacgaatcaatcgattggggtcattaaggtcttcaagacatcaccgaagctctgactttttgttatgcactgcaagtgttcgaggaaatgcctaaacgagataattcatagtctgcagttcaagaaaaatataggttcttctgggcctaacaagctagtaaggactggaacaatgaaaacgttgcgtatctgatacggtaatgacttcttcgtgccaatgtatctatcatgtatttattaaataatgcatatttttggaaaataagtaaagtagttctgacaagacacagtgttttttttttccccggctctcttgcttcatacacactaatccaaaaaagatagttattggagaaagaaaaaaacaaacaaacggggacgatgaggatcacgttctttgcttctttgctcttatttaccaataccatctttataagttttagctttgcaattgcagggataaacaaagagagtcctttgtcaataggacaaactctcagctcctctaatggagtttatgaattgggtttcttcagttttaataactcggaaaatcattatcttggaatctggttcaagggaatcattccccgggtggttgtgtgggtggccaatagagaaaatcctgttacagattccacagcaaatctcgctatcagcagcaacgcaagtcttctgttatataatggaaaacatggcgttgcatggtccagtggtgaaactcttgcttctaacgggtctcgtgcagagctttcagacaccggaaatcttattgtcatagacaatttttcgggaagaactctttggcaaagctttgaccatcttggtgatactatgcttcctttctcagctctgatgtataacctcgccactggcgagaagcaggtcttgacttcttggaaaagttacactaatccagcggttggtgactttgtgcttcagattacaacgcaagtgccaacacaagctttaactatgagaggctcgaagccttattggagaagcggtccatgggctaaaacaaggttcacgggggtaccactaatggatgattcatttacaaatccattaagcctttagcaagatgcaaacgggtcaggatcccttacttatttaaacagaaacttcaaacttccacgtatagtgataacatcgaagggttcactggagatttctaggcatagtgggactgattgggtattgaactttgtggctccagcgcactcatgtgattattacggtgtatgtggaccttttgggatttgtgtcaagtcagtgtgtaaatgcttcaaagggtttataccaaaatatattgaggagtggaaaagaggaaattggactgatggttgtgtgaggcgtaccaaactacattgtcaggaaaactcaactaaaaaagatgcaaacttcttccatccagttgccaacataaagcctccagacttttacgaatttgcaagtgctgtggatgcagaaggatgctacaaaatttgcctccacaactgttcttgcttggccttttcttatattcatggaattgggtgcttaatatggaaccaagacttcatggacacagtgcaattttctgcaggaggagagattctttccattcgtcttgcacgttctgaattaggtacggcttaaatgatatcaagaaagagctacttcttcaattacaactttatctagaactccattgatactattcgttccggtagcagcatggctagttgttcaatttatttttgtcttatatctcaggtgggaataagcgcaagaagaccattactgctagtattgtcagcctttctctttttctgatattgggttctactgcgtttggtttctggagatacagagttaaacataatggtaacactctgatgatcttactagctctatatcgatctcttattgtttttattcatattcatggccttattattatctctttatctattcctgaaattctagcttcacaagatgcaccgaaatatgatttggaaccacaagatgtctcaggttcatatttgtttgagatgaacaccattcaaactgccaccaataatttcagtctctcaaataaactgggacaaggtggatttggttcagtttacaaggttggagaattttaatcttctttgctcttttgtattttccgcttatgttctcgaaatgactttctgcaatctgtattagggaaagctgcaagatgggaaagaaattgctgtaaaacggctttctagcagctcagggcagggcaaagaggagttcatgaatgaaatagtactcatctcaaaactacaacacaaaaacttagttcggattttaggatgttgcattgaaggagaagagaggctgttgatttatgagtttatgttgaacaaaagccttgatacttttctcttcggtgggttctttcttgcctcattcctttactatcggcagctttttttctctatatggaattgtcttttctgattgttttcacgctgtattgttgcttagattcaagaaaaaggcttgagattgactggccaaagagatttgatatcattcaaggtattgcgcgtggaattcactatctccatcgtgactcatgcctcaaggtaattcaccgtgatctgaaggtcagcaatattcttcttgacgagaagatgaatccaaagatatcagattttggattggctcggatgtatcagggaaccgaatatcaggacaatactcgcagggtcgtaggaactctgtaagaatctatttcaaaaacataattgactaaagactcaaagttataatcagatattaacttgggagaaactatttgatatatgtgcagaggatatatgtctccagaggatatattagaaatcataagcggagagaagatctcaagattcagctatggcaaagaagaaaaaacccttattgcatatgtaagtacgactttaggtatacagttgcaaatatctcaaatcgtttcttgcttttataattttaagatcaaacaacaggcatgggaatcttggtgtgaaactggaggagttgatcttttggataaagatgttgctgattcatgtcgcccattagaagttgagagatgtattcagattggtcttctctgtgttcaacaccaacctgcagacagaccaaacacacttgagttgatgtctatgctcacgacaacatcagatcttccatcaccaaaacaacccacatttgtagtgcactggagagatgacgaatcatcgtctaaggatttgatcactgtgaatgagatgacaaagtctgtgatcttagggcgttgagaaatgatgtttgattgaaactttagtctgttttgtaaacgattttttctatttatgaaaggtatattccaacagatgaacctccattttggtgcaccagtgaattactgtagagtaagaatttaccatggttaaagattaggtgactaataatagtacttagattcgaagccaatggctaaaagtttcatatttccagaaacactaatcagataatagattcatcatttcatcttccatgtaagccaaaatagagttcttcacatccatgttcttctcttccaacatccgaacttcgttttccagacgctccttctcagccaataaactcctgaattcactgtcttcaatctctctttggaatccaaaacacatcttcacaaacccttccctgtgtacaagtttccatataaatgcttagtaacttcaagattagacaaaatcaagaacaatgcagttattgatgtttaccgcttctcggttagtctttgtaattagctcactgtgctcacttcttaagcaacaaatctcatcctccaatagcttcagagagtttcttgaatcagcttttaaggaaataaaaccatagtgatcaaaattacgaatgtgaatattgaacaaatccttcggaaaatttagacacctgtaacggagatcaaaccgctgatctcgaattgagaagcaaggaacgatctagtaagctcaggttccttgagagacagagaagattcaatctcagaacacgctccgatctgtgattcgatctctcgcgtcacctgaatgtttgcttcgatttcccgattgacctgtttcattcgatcacagctcagattaagctaaagacgagagataccaatccagtgaagaagatgaagaatagtgaaacctgatcaagcatgtccttgaaaatggagatctgacatagaatcgctcctgaatcctccatctccgcagaaatcactctctgtctctctctctctctcgctcgctcttgcttccgcttcttttcaaaattcaaaatcaatatcgttatgagttaggggaagataagattttaccgggcctttatgggcgtttaccaaaatcggcccaatcggatttcggatctttcaatatttgtaaatacgaaccgactttttaatttatttcggatctagtttggttcggttcagattcgagttgggtttgtaatctttcaatatgtgcgttcgaaatggtagaattgatgatcgtcttcttctctctggtgacactggcacaccaatgttgactgttgaagtcagctattttggacaaaaacagtttcacgttgggaatggctatatgtactttcaattgtgtaatcggggcattagtgtcaaacgacattatgggagctttgagcgttctgataatgcattacaagtgttcggtgaaatgcctgaacgagatttcacgtagtctcccacttcaagaaagctcttccggtgaatccactaacatttaaaccgtgtattgtacgggtaaaaacaatgatttcagaaaccaatgtcatctgatttattcatataccaagagttttgatgtatatcattggcacgttctggatttaaagagctggcaagattatggtcaagcaatgcgttctgcatcgaaaaatttcttatctttagattggtggagagtaaatttgcacatctttcacttgttcacgtcatgaaatatgactatgttgcgtaattgactgggtaaaaaattggactttgtttgtggcatttacgtttccattgaaaaatgagtattttggaacattagtgcggtctggtcaacattgtttatagtaggtgcttgaaaatagttttgacgagtccctcgaagaaaaaaaatccctgagtgtttcttcacttggctttctttgtcttgttatatgttcgtttcttagttattagagaaaaaaaaatacacatggggaagaagaggatcgtgttgctcttatttataagttttagctatgcagagataacaaaagagagtcctttgtctataggacaaactctcagctcctctaatggagtgtatgaactggggttcttcagttttaataactcccaaaatcagtatgttggaatctggttcaagggaatcattccccgggtggttgtttgggtggccaatagagaaaagcctgttacagactctgcagcaaatttagttatcagcagcagtggaagtcttctgttaattaatggcaaacatgacgtcgtgtggtccactggagaaatttctgcatctaagggatctcatgcagagctttccgactatggaaatctaatggtcaaagacaacgttacaggaagaactctatgggaaagctttgagcaccttggtaatactctactccctctctcaactatgatgtataatctcgtcaccggtgagaagcgagggttgagttcttggaaaagttatactgatccatcgcctggtgacttttgggttcagatcacaccgcaagtgccatcacaggggtttgttatgcgaggctcgaccccttattatagaaccggtccatgggctaaaacaaggtataccgggataccacagatggatgaatcatatactagtccattcagcctacatcaggatgtaaatgggtcaggatacttttcgtattttgaaagagactacaaactttcacgtataatgttaacatcagagggatcaatgaaggtgttacggtataatggattggactggaaatcaagctacgagggtccagccaattcatgtgatatttacggcgtatgtgggccttttggtttttgtgttatctcagatcctccaaagtgtaaatgcttcaaaggttttgttcctaaatccattgaggaatggaaaagaggaaactggacaagtggttgtgcgaggcgtaccgaactacattgtcaaggaaactctactggcaaagatgcaaacgtcttccatactgttccaaacataaagcctccagacttttatgaatatgcaaattctgtggatgctgaaggatgctaccaaagttgcctccacaattgttcttgcttggccttcgcttatattcctggaatagggtgcttaatgtggagcaaagacctaatggacacaatgcaattttctgcaggaggagaaattctttccattcgtcttgcacattctgagctaggtatgaattagaagataattcaaggatcttctttatctttttcaattatatcttctacttcattgatattgatgttttcaatagaagcatgacttattgtttaattcttgttctaaatttttcagatgtacataagcgcaagatgaccattgttgctagtacagtgagccttaccctctttgtgatcttgggctttgccacgtttggtttttggagaaacagagtaaaacatcacggtaacattattgatgctatcgaacaatctctgattgtttatctactcatttggttgtcaacaaaattactcttttacctttgttacgaacttacgatatatcgtgaaatacaacaaatctacactaaactgacggaattttctatgttctctttggtacattggttttggctggttttaaatactcttaatatgctcatttggcactgactcacaaattctaacccaaatttcagctcatatatcagaagatgcatggaggaatgatttgcaatcacaagacgtcccaggtttagaattttttgagatgaataccatacaaactgccaccagtaatttcagtctatcaaacaaactcggacatggtggctttggttccgtttacaaggcgagaaacgttttatcctattcgctctttttcttttctgttttttctgaagatgacatttgcaacttttttcagggaaaactgcaagatggaagggaaattgcggtaaaacgcctttctagcagctctgagcagggcaaacaggagttcatgaatgaaatagtactgatatcaaaactccaacacagaaacttggtacgggttttgggatgctgtgttgaaggaaaagaaaagctattgatttatgagtttatgaaaaacaaaagccttgatacctttgtttttggtgggttacatcttgcctctttcttgtaggtttcctctggaactgcttattttatagtttttacatggtatttttgcttaggttcaagaaaaaggctcgagcttgattggccaaagagatttgatatcattcaaggtattgtgcgtggacttctctatctccaccgtgactcacgcctcagagtaattcacagagacctgaaggttagcaacattcttctggacgagaaaatgaacccgaaaatatcagattttgggttggctcggttgtttcagggaagccaatatcaggacaaaactcgcagggttgtgggaactctgtaagaaccattcttcgataacatgataaactaattcccttgtcatgatagtcatatgtgaaactatgtgatgtttgcacagaggatatatgtctccagagtatgcatggactggagtattctctgagaaatcagacatctacagcttcggagttcttctgttagaaatcatcagcggagagaagatttcaaggttcagctatggtgaggaaggaaaagcacttcttgcatatgtaagtcagcctttatgttttcttgcactttccgattttgtaaaaggtttgttgctcttgtattgttaagatctgaaaccaatgcaggtatgggaatgttggtgtgaaacccgaggagttaatctcttggaccaagctcttgatgattcttctcatccagccgaagttggaaggtgtgtccagattggtttgctctgtgttcaacatcaacctgcagacagaccaaacacacttgagttgttgtctatgcttaccacaacatcagatcttcctctgccaaaacaacccacatttgcagtgcacacaagaaatgacgaaccaccgtctaatgatttgatgatcactgtcaatgagatgacagagtctgtgatcctaggacgttgaacatcaatgtgtgatggaaaattttagaattggaattattctccaaaggatcaaattttctaatgttgctaacttcaacgtagattatttcattatgttaaaacttaaaagagaagatcacatccaaaattatgcaaaaaggcttgttcaaagagaagagagaagagttggtcatttcctaaacttccaatttggttaaccaaagattatccagttcctgtttcgtaagcatctcttgtgttttacttcgatttcccgattgatcagtgtcattcgatcacagctcaaattaagctaaagacgagaaaccataccagtgaagaagaagaaggagaagagtagaacctgatcaagcatgtcctagaaaccataccagtgaagaagaagaaggagaagagtagaacctgatcaagcatgtccttgaaaatagagatttgacatagaatcgcacctgaattctcgatctccaaatctctctatctctctctcaactctcgtgcttacgcttgttttcaaattcaaaaacataatcgttaagagttgagttgggtgggggggggggggaataatattttactgggccttatgggcttatattggccattcgtattttggaccttttaatattcgaaaatacgacccgattcggaatgtgtttggttcggtttgtatttttttgtggtccggttcagatttcgagtttggatttggagaaaagcttgtgttcgaaattctagtgttgtagaattgactgttgaagtcgtcttcttctctccggcgaaactggcacaccaatattgactgtagaattcttcggctattttggagaaaacagtcacgcccagtcgcccagatggttggagtcttggagatggaattgggcactagtggagctctgaaagttttgattatgcatttcaaatgttcggtaaaatgcctgaacgagaattaatgtagtctccaattcaagacagctgttccaatgaatcaagtaacatttaaagacgagtgttgatgtttatcatttgcagattctggaaactaagagctggcgacaagaacatgggaacatcacgggatttttaatctgcggtcaatcaatggattcagacttgtgaaagttctcgtctttcgatatggttgcagagtatcggtggctatctttcactggttctcagcgcaagaagctaaacggacatggaaatgacaatgttgcgtatttgaatgggtaaaatagttggactttgtttgttgaagttatgtaactattttgataaaattttgtttgtattcattaaatagggtttaacttgatcctgtataaagataagtgtggttgatctggtcaacattgtttataggtgcttgaaaatagttctcactaagtccctctgtgtttttgttttggctttcttactctgtttgcttcttaaaataatctgaagaagatagtttttggagaggaaaaaaaccagatggggaagaagaggatagtgttctttgcttatttgcccttttttaccatctttatgagttttagctttgcagggataaccaaagagagtcccttttcaattggacaaactctcagctcctctaatggtgtttatgaattgggattcttcagtcttaataactcccaaaatcagtatctcggaatttggttcaagagtatcattccccaggtggttgtgtgggtggctaatagagaaaagcctgttacagactctgcggcaaatctcggtatcagcagcaatggtagtcttctgttatctaatggcaaacatggcgttgtgtggtctaccggagatatttttgcatctaatgggtctcgtgcagagcttacagaccatggaaatcttgttttcatagacaaagtttcgggaaggactctatggcaaagctttgagcatcttggtaatactctgctccctacgtcaattatgatgtataatctcgtcgctggtgagaagcgaggattgactgcttggaaaagttacaccgatccatcgcctggcgaatttgtggctctgattacaccgcaagtgccatcacaggggattattatgagaggctcgacacgttattatagaaccggtccatgggctaaaacaaggttcactggatcaccacaaatggatgaatcatacacaagtccattcatcttaacacaggatgtaaatgggtcaggatacttttcatttgttgaaagaggcaaaccttcacgcatgattttaacatcagagggaacaatgaaggtcttagtgcataatggaatggactgggaatcaacctacgagggtccagccaattcatgtgatatatatggcgtatgtggaccttttgggctttgtgttgtatcaattcctccaaaatgtaaatgcttcaaaggttttgttcctaaattcgctaaggagtggaagaaaggaaactggactagtggttgtgtgaggcgtaccgaactacattgtcaaggaaactccagtggcaaagatgcaaatgtcttctatactgttcccaacataaagcctccagacttttacgagtatgcaaattctcagaatgctgaagaatgccaccaaaattgcctccacaattgttcttgcttggcgttttcttatattcctggaatagggtgcttaatgtggagcaaggatctaatggacacaaggcaattttctgcagcaggagaacttctttccattcgtcttgcacgttctgagctaggtatgacttacaatataattcaaggaccttttgtatcttttgtaattatatcttccacttctttgatattgatgttttcgatagaagcatgacttattgttcaattcttatcctaaattcctcagatgtaaataagcgcaagatgaccattgttgctagtacagtgagcctgaccctattcgtgatctttggatttgctgcatttggtttctggagatgcagagtggaacataatggtaacacattgatgactttactatcgaacaatctctcactgttcatctaatcatttggttgtcaataaaattgctctgttacatttgttataagatatcgttaaataaaaaggtgttttttccactactaaattgactgacttgtatattatttttctggtacattggtttcggcctgttttaaaaactctgaatatactcacttggcactgacacacatattctaacccatattttagctcatatatcaaacgatgcatggaggaattttctgcaatcacaagacgtcccaggtttagaattttttgagatgaatgccatacaaactgccaccaataatttcagtctatcaaacaaactcggtcctggtggatttggttctgtttacaaggcgagaaacgttttatcctctttgctctttttcttttctgtcatttcttgacatgacatttgcaacttgtttcagggaaaactgcaagatggaagagaaattgcggtaaaacgtctttctagcagctctgggcagggcaaacaggagttcatgaatgaaatagtactgatatcaaaactccaacacagaaacttagtccgggttttgggatgctgcgtcgaaggaacagagaagctattgatttatgggttcttgaaaaacaaaagcctggatacttttgtctttggtgggtcacttcttacccctttcgtgtagttttcccctttatatctggaatttcttatctgatagcttgtatacttagatgcaagaaaaaagctcgaacttgattggccaaagagatttgagatcattgaaggtattgcacgtggacttctctatctccaccgtgactcacgcctcagagtaattcaccgagacctgaaggtcagcaacattcttctggatgagaaaatgaacccgaaaatatcagattttggtttggctcggatgtttcagggaacccaatatcaggaaaaaactcgcagggttgtcggaactctgtaagaaccatcccttgataacatattaaactagattggtagtcatatattaaattgggtgaaactatttgatctttgaacagaggatatatgtctcctgagtatgcatggactggcgtattctctgagaaatccgatatctacagtttcggagttctgttgttagaaatcatcagcggaaagaagatctcaagtttcagctatggcgaggagggaaaagcacttcttgcatatgttagtaagactttatgttttcatgcatttgcagaggttgcaaaaggtttgttgctttgatattcttaagagtggaaactgaaaaacaggcatgggaatgttggtgtgaaacccgagaagttaattttttggaccaagctcttgctgattctagtcacccatctgaagttggaaggtgtgtacagattggtttgctctgtgttcaacacgagcctgcagacagaccaaacacacttgagttgctgtctatgcttaccacaacatcagatcttcctctgcccaaaaaacccacatttgtagtgcacactagaaaagacgaatcaccgtcaaatgattcgatgatcactgtcaatgagatgacagagtctgtgatccaaggacgttgaaactgtagaattggaattattctctataaggatcaaaatttctaatggttgtaaaattacatcccttcctttattattcagaaactttttatctatgtggaaactgtttggtaaaattgactaaggtatattttattaggcatgattacatgattccacttcccactaaattgacaaaatactttgctcaaaaacaaatcgttgactctacttcattttaagacttcccgggagattattctcgggcctagtggcacaccaatgttgactgttgaattcttcggttcttttggacagaaacagttaagcccatatggttggagttgggaatcagtcgattagggtcattacgggtctaacgacattagcgaggctcggaggttttttttatgcactgcaagtgttcgaggaaatgtctaaacgagataaaacatagcctgcatttcaagaaagttattgtgttgtaatggtgaagcaaggattggattctttcgattgatgcagaactaataaggacttgaacaatgacaacgttgcgtatctgattgggtaaggacttcttcgtgccaatctatcatgtatgcattgtttctattattgatgcagagctaataaggacttggaattgtctcccactcattcacgttgttatttgtttagtgagcagttactttctgaacaccttttttgtgtatttaagtaaatgattgtctttgaatggaatagaagaaaatttgcagtaacttattctaaagtctttgataaccaaagtcttcttctttttgttcttgatagcattgaacaatgacaacgttgcgtatctgattgggtaaggacttattcgtgctttgacacttttgttctctattatcaaataacgcatgatttttggaacattagtaaagattattaaataacgcatgatttttgttctgtattattctcacaagtcagtccctgagttgacaaaacaaaaaatgtgcaaagagagtttttttttttttttttcttgctttctcgctttatgtaaagctaatctaaaaaagatagtttttggagagaaataacaaatatggggaagaagtggatcgtgttctttgcttatttgctcttatctagcttctttataagttctagctctgcagggataacgaaagaaagtcctttgccaataggacaaactctcagctcctctaatggtttttatgaactggggttcttcaattttaataactcccagaatcagtatgtcggaatctggttcaagggtattattccccgggtggttgtgtgggtggccaatagagaaaagcctgttacagattccacggcaaatctcgctatcagcaacaatggaagtcttctgttatttaatggcaaacatggcgttgcatggtccagtggagaagctcttgtttctaacgggtctcgtgcagagctttcagacaccggaaatcttattgtcatagacaatttttcgggaagaactctatggcaaagctttgaccatcttggtgatactatgcttccttcctcaaccctgaagtataacctcgccactggcgagaagcaggtgttgagttcttggaaaagttacactgatccatcggttggcgactttgtgcttcagattacgccacaagtgccaacgcaggtgcttgttacgaaaggatcaacgccttattatagaagcggtccatgggctaaaacaaggttcacggggataccgctaatggatgacacatttacaggtccagtcagcgttcagcaggatacaaatgggtcaggatctctcacttatttaaacagaaacgatagacttcaacgtacaatgctaacatcaaagggcacacaggagttgtcttggcataatgggacggactgggtattgaactttgtggctccagaacactcatgtgattactacggtgtatgtggaccttttgggttatgtgtgaagtctgttcctccaaaatgtacgtgtttcaaagggtttgttcctaaactcattgaggagtggaaaagaggaaactggactggtggttgtgtgaggcgtaccgaactatattgtcaaggaaactctactggcaaatatgcaaacgtgttccatcctgttgccaggataaagcctccagacttttacgaatttgcaagttttgtgaatgttgaagaatgccagaaaagttgcctccacaattgttcttgcttggcctttgcttatatcgatggaattgggtgcttaatgtggaaccaagacctaatggacgcagtgcaattttctgaaggaggagaacttctctccattcgtctggcacgttctgaactaggtatggcgctcaaatgattacacggaagaattacttcgtttacaactttatctacaactccattgatactcttcttaccggaagcagcatggcttattgtttaatttgtttttgtcttatatgtcacaggtggaaataagcgcaagaaggccattactgctagtattgtgagcctttctcttgttgtgataattgcgtttgttgcgttttgtttctggagatatagagtgaaacataatggtaaaaactgatgatcttactccctctctattgatttcttttctttatttacagtactcattttcttgctattggtaagacactgatgacctatattatctataattgaaacactagtttcagctgatataacaacggatgcttcacaagtttcatggaggaatgatctgaaaccacaagatgtcccaggtttagatttctttgatatgcataccattcaaactgccaccaataatttcagtatatcaaacaaactcggacaaggtggatttggccctgtttataaggttagagaatttttaacctctttgctcttttctattctttgcttatgctctccagatgaccttatgcaatgtgtttcagggtaagctgcaagatgggaaagaaattgctgtaaaacggctttctagcagctcgggccagggcaaagaggagttcatgaatgaaatagtactcatctcaaaactacaacataaaaacttagttcggattttgggatgttgcattgaaggagaagagaagctattgatttatgagttcatgttgaacaatagccttgatacctttctcttcggtgggttccttcttgcttcattcctttactatcagcaactttttctctacatggaactgtcttatctgattgttcatactctatattgtcgcttagattcaagaaaaaggcttgagattgactggccaaagagattggatatcattcaaggtattgcgcgtggaattcactatctccatcgtgactcacacctcaaggttattcaccgagatctgaaggttagcaatattcttcttgacgagaagatgaatccaaagatatcagattttggattggctcggatgtatcagggaaccgaatatcaggacaatactcgcagggttgtaggaactctgtaagactctattttccataacattgttaacaagattcatagtcataaactcataatcgtttattaaacattgggtgaaactattcgatgttcgcacagaggatatatggctcctgagtatgcatggactgggatgttttctgaaaagtccgacatctatagctttggagttctaatgttagaaatcataagcggggagaagatctcaagattcagctatggcaaagaagaaaaaacccttattgcatatgtaagtacaacttttaggtattcatacagttgcaaatgtctcaaaacgtttcttgcttttatattcttaagacctgaatctgaacaacaggcgtgggaatcttggtgtgatactggaggaattgatctcttggacaaagatgtcgccgattcatgtcgcccactggaagttgagagatgtgttcagatcggtctgctctgtgttcaacaccaacctgcagatagacccaacacacttgagttgctgtctatgctcaccacaacatcagatcttccaccaccagaacaaccgacatttgtagtgcacaggagagatgacaaatcatcgtctgaggatttgatcactgtgaatgagatgacaaagtctgtgatcttagggcgttaagaaatgatgtttgatcttagggcgttgataacaaacttcaccttttattctttttgtaacatattttttgtatacatgaacctccattctggtgcaccaatgatccatggtgttgaagataatgtgaccagaaacactaatcagataatagattcatcatttcatcttccatgtaagccaaaatagagttcttcacatctaagttcttctcctccaacatccgaacttcgttgtcgagaaactctctttccaacaataaattcctgaattcactgtcttcaatctccctttgaaacccaaaacacatcttcacaaaaccttccctgtgtaaaaaaattccataagcaatgctttatcaatcagaggatcaagaacacaaatgcttgtttacaacacaatcgatgtttaccgcttctcggttagtcttgtaattagctcactatgctcatttctcaaacgacaaatctcatcctccaatagcttcagagagtttcttgaatcagctttaagaaaataaaacatagtgatagagatttaacaacacagaaacaaaaaacaaattcagaaattagaagcgactcaaattcagaaacctgtaacggagatcaaaccattgatctcgaactgagaagcaaggaacgatttagtaagctcagcttctttgacagacagagccgattccgtctcagaacaatttccgatctgtgattcgatctctcgcgtgacctgaatgtttgcttcgatttcccgattgacctgtttcattcgatcacagctcagattaagctaaagacgagagataccaatccagtgaagaagatgaagaatagtgaaacctgatcaagcatgtccttgaaaatggagatttgacatagaatcgcacctgaatcctccatttcctcttgcttcctcttcttttcaaattcaaaatcaaaatcgttaagcgcgctatgggaagataagcttttactgggcctgatgggcttttaacttaaatcacggcccattgagaccttgtgtttcgtcgcaaatcgaatattccgatctttcaatatttttggaaacacgaaccgaatatcggcgactttgatcgagatcgaaacaatggttgaatcggagaaaacgaaacacacatgtctccatcttgaaatctccggcgccgatccaattttcgtcaaaggaacatggtatcactctcgtttcgatatctccgtcaccgatggctccttcacttggacttgcaatgcgacggaggaggaggtagcggagagagcagcaatgggaccagcctgtatctgagtatttagagctcgccgagcaatacttagggtttcagcagcctaattcggtctatggtttctccgatgctattgagggatctaaacggctctcttggacgtttgagaaggaagggactaaacttgagtggaggtggaaatgtaaaccatcagatgatagcaagaagatcactgttaggattttggattttcttatggaggctaacataaggctaagtgaagaagttgtgaacaagacgagatcgtttgagaagatgaaaagtgaagctgagagatgtctcgcgcaaggtgaaaaactatgcgatgaaaaaacagagtttgagaatgcaacttatgcaaagttcctttctgttttaaatgcaaagaaggcgaaactgagagcagtaagggacaaagaagattcagtgagagcagttgaggaggaagagtcgacatacaaagctgaaagcttcgagagtggaagaagtgatgatgagcagagtggggaagaagcgtcagaaaaggcaacaagcagcaaagcccgtggcggaaagagagctgcacggagctaagacttagagattcccctgccttgagatttcaggtgggagattccattcagtgttttgtgaatctcatagctaggaaatgagagttttcgttgaaaaatcgctagaatctgtattgcttgtgaaagaaaatgcaatagacttggagataaagtaatttttaatttcggatccagtttggtttggttttttaatttccttggttcagttcagaatctggtttggtttttaaatttccttggttcagttcagaatcgagtttggtttgcaatctttcacgtgcgttcgaaattgtagaatgatcgtctcctcttctatctggtgagtcggtggcaatggtacaccaatattgactgttgaagtcagctattttggataaaaacagtgaatccctgatggttggcgttggaaatggccatagtgtgtagattggggcattattgtacaacggtatctctgaacgtttatgattatgcattacaagtgttcgatgaaatgcctgaacgagatttcacgtagtctccagttcaagaaaactggttctactgaaccagtgagaaagagtgttaatgtttaccattcgtaggttctgggtatatcaatctatggtcaatcaatgcgttcagatttgtgaattttctcatcttttgattggtgaagagtatatatataggtgcctatgtttcactggttctcggcgcaacaagcttatgtagtcatgaaaaatgacagtgttgcgttattgactgggtaaaaagttgactttttcgtggaaatgacgtaactattgacaaatttagttggttttattagatatggtttaagttgatcttgtatatcagaattttggaacaagagtactgtctggtctagtctggtcagtattgtatataggtgcttgaaaatagtcttacaagtacctgagtatttgtttccatggatttcttgttcttgttattggagagaaaaaataaacacatggggaagaagagggtcgtgttgctttggcttagcatctttataagttttagctctgcagagataacggaagagagccctttgtcaataggacaaactctcagctcctccaatggagtttatgaactgggcttcttcagttttaataactcccaaaatcagtatgtcggaatctccttcaagggtatcattccccgggtggttgtgtgggtggcaaatagagaaaagcctgttacagactctgcggcaaatctggttatcagcagcaacggaagtcttcagttatttaatggcaaacatggtgttgtgtggtccagtggaaaagctcttgcatctaacgggtctcgtgtagagcttttagacagtggaaatctagttgtcatagaaaaagtttcgggaagaactctatgggaaagttttgagcatcttggtgatactctgctccctcactcaactatcatgtataatgtccacaccggtgagaagcgagggttgacttcttggaaaagttacactgatccatcgcctggtgactttgtcgttctgattacaccgcaagtgccatcacaggggtttcttatgagaggctcgaccccttattttagatctggtccatgggctaaaacaaagttcaccgggttacctcaaatggatgaatcatacacaagtccattcagcttaacacaggatgtaaatgggtcaggatactattcgtattttgatagagacaacaaacgttcacgtattaggttaacaccagatggatcaatgaaggcgttacggtataatggaatggactgggacacaacctacgagggtcctgccaattcatgtgatatttatggcgtatgtggaccttttggtttttgtgttatctcagttcctccaaagtgtaaatgcttcaaaggttttattcctaaatccattgaggagtggaaaacaggaaactggactagtggttgtgtgaggcgtagcgaactacattgtcaaggaaactctactggcaaagatgcaaatgtcttccatactgttcccaacataaagcctccagacttttacgaatacgcagattctgtggatgcggaagaatgccaacaaaattgcctcaacaattgttcttgcttggccttcgcttatattcctggaatagggtgcttaatgtggagcaaggacctaatggacacagttcaatttgctgcaggaggagaacttctttccattcgtcttgcacgttctgagctaggtatgacttggaatataattcaaggaccttctgtatattttgcaattatattgatattgatgttttcgatagatgcatgacttattgtttaattcttatgctaaattcctcagacgtaaataagcgcaagaagaccatcattgctattacagtgagccttaccctttttgtgatcttgggctttactgcgtttggtttctggagacgcagagtggaacaaaatggtaacacattaatgactttactatcgaaaagatctaatcatttggttgtcaataaaattgatctgttacatttattatgagatatcgttaaataaaaggttgtttttccactacatcagacctatactaaattgatcgactcatatatgttcttttggtacattggtttcgccttaaaaaactcttaatatactcacttggtactaacacacaaattctaacccaaatttcagctcttatatcagaagatgcatggaggaatgatctgcaaacacaagacgtcccaggtctagaatattttgagatgaataccatacaaactgccaccaataatttcagtctatcaaacaaactcggtcatggtggatttggttcagtttacaaggcgagaaacgttttatcctctttgctctttttcttttctgtcatttcttgagatgacatttgcaaattgtttcagggaaaactgcaagatggaagggaaattgcggtaaaacgcctttctagcagctctgagcagggcaaacaggagttcatgaatgaaatagtactgatatcaaaactccaacacagaaacttagtccgggttttgggatgctgcgtcgaaggaacagagaagctattgatttatgagtttatgaaaaacaaaagccttgatacttttgtctttggtgggtcacaacttgcctctttcttgtagcattcctctctctatatgtcgaactgcttgtttgatagtttttacacggtgtttttgcttagattcaaaaaaaaggcttgagatagattggccaaagagatttgatatcattcaaggtattgcacgtggacttctctatctccatcgtgactcacgcctcagaataattcaccgagacctgaaggtcagcaacattcttctggacgagaaaatgaacccgaaaatatcagattttgggttggctcggatgtttcatggaaccgaatatcaggataaaactcgcagggttgtcggaactctgtaagaaccattcttcaataacatattaaactagattggtaagtcatatactaaaatgggtacaactatttgattttttgaacagaggttatatgtctcctgagtatgcatgggctggagtattctctgagaaatcagacatctacagcttcggagttctactgctagaaatcatcagcggagagaagatctcgaggttcagctatggcgaagaaggaaaaacacttcttgcatatgtaagtaagagtgtaagactttatgttttcatacacttgcagaggttttaaaaggttcgttgccctcgtattcttaagatctgaaactaacacaggcatgggaatgttggtgtggagcccgaggagttaatcttttggaccaagctcttggtgattcttgtcacccatatgaagttggaaggtgtgtccagattggtttgctttgtgttcaataccagcctgcagacagaccaaacacacttgagttgctttctatgcttaccacaacatcagatcttcctctgccaaaacaacctacatttgtagtgcacacgagagatggcaaatctccgtcaaatgattcgatgatcactgtcaatgagatgacagagtctgtgatccatggacgttgatcaacattgtgtgatggaaacttttgatgactttcattcacaatattttcttagtggatttcattccattatgtaaaaagataaacttacatcgaaaattatgctaaaaggtttgttgaaagagatgagacaagagttggtcatttcctaaacttccaatttagttcaccaaagattatccaagttgagtttcctaaacatctattttgtgtcatttatatctgccattctcttctttgagactatagacatcattcatgtgagtgtgttttgtttcgattaaagccttaaagtcggcaactttgactagaagtagttaagcccaggtcgagacttcagcaacggtgacattagcaagcctttgaatggtatgtcttggaacgttaggattacgcagctactttgaccacatgtagattagcccagatggtggaagttgcattcattggtactatttgtctcaagagtcaagatataggtcccggcaacattagcaatgctatgaatacgcactaaacgtgtttgatgaaatgcctgagcgatatacaaagtttccaacgctggccacaaggagttggggttatgtttaaatacgtacagtgtttcaggttagcttcactttctagtttgcactttatctatcaataaagttatataacgtttgaaagaaatttctaaatctgttttgccttttggaaattgaaaaagctgcaaacttaattgctgtgtaggtttgacttatgagagaccaaaatgtggaaaaaacaaaactcatttactagattctatctttaaggaagagtaacatggaacttcttgtcaaggctgtctatacagattattttaatgcttatgtttagattatagttataattattctctttgacaaaagaaaacataatcaactagtgcaatgcttaagatatagaggataacatgaaagtcttgatttcttttgtctcattgatctctgttcctctacgtaaagttttgctcatatgtacaaacttccacaaagaaattgtgcagacaaacaggagtacactgtacacatgagaaagatgggtatggttatatttgcttgcttgctcttgctgattatatttccaacttttggctatgcagatataaacacatcaagtcctttgtcaataggacaaactctgagttcccctgatggagtttatgagctaggcttcttcagtcctaataattctcggaaacagtatgttgggatctggttcaagaacatcgctcctcaagtggttgtctgggtggctaacagagataagccagtcacaaaaactgcggcgaatctaactattagcagcaatgggagtctgatcttgcttgatggtacgcaagatgttatttggtcaacaggagaggctttcacatccaacaagtgtcatgctgagcttttagacaccggaaatcttgttgtaattgatgatgtttccggaaaaactttatggaaaagcttcgagaatcttggtaatactatgctgcctcagtcttctgtgatgtatgatattccccgtggaaagaatcgtgtgttgacctcatggagaagtaacagcgatccatcgcctggggaattcacactggagtttacgccacaagtccccccacaaggccttataaggagaggctcatcgccctactggagaagtggtccatgggcaaaaacaagattctctggtatacctggaattgatgcatcatatgtaagtccattcactgttctccaagatgtagcaaagggcacagcatccttttcttattccatgttaagaaactataaactgtcgtatgtaacgctaacatcagaggggaaaatgaagatcctctggaatgatggaaaaagttggaagcttcactttgaggctccaacaagctcatgtgatctatatcgtgcttgtggtccttttggtttgtgtgtgagatccagaaatccaaagtgcatatgcttgaaagggtttgtaccaaagtcagatgacgagtggaaaaaagggaattggacaagtgggtgtgtgagacgtacacaattatcttgccatacgaattcttctacaaaaacacaaggcaaagaaacagacagcttctaccatatgacccgtgttaagactccagatctgtaccaacttgcaggcttcctcaatgcagaacagtgctaccaagattgcctaggcaactgttcctgcacagcttttgcttatattagtggaattggatgcttggtatggaaccgggagctggtagacacagttcaatttttatctgatggggaatctctctcccttcggcttgcaagttcagaattgggtaggaatgaaaggcccttattacatttgaagtttcagctttctttatatgatgttttttccctctgcagcatggttttaagtttttgtttttctggtgattatttcagctggtagcaatcgaacaaagattattctaggtactactgtcagcctatctattttcgtaatcttggtctttgccgcttataagtcctggagatacagaacaaaacaaaatggtgagacacaggcactttgttctcactcactctctttccttgtcctcttttttaatctaactcggtaccaaatccgaagcaaattaatctcttcctcttcatctgatacacactacatttctagaattcttaagttgtgtcccaaggtacagtctcaggttgacagttcttttgggaagtctatatggtcagtttaaagctagatgtcctaacggttaatatgttcgcttctattgaaagtcaatgcttatgctaataaactgctacaaattaagcactaatacatgcacacttgttactcgtagaaccaaatcctatgttcatccacagttcacaagatgcatgggcgaaggatatggaaccacaagatgtctcaggcgtaaatttatttgatatgcatactatacgtactgccaccaataacttcagttcctcaaataaacttgggcaaggtggatttggtccagtgtataaggtaatgtatcattctgttctatttaccttttcttgttttcctattctgtattttcttcttctgtagatgactatgtgcaactattcttccagggaaagttggtagatggaaaggaaatagccgttaaacgcctttctagcagctctggacagggtacagatgagttcatgaatgaaataagactaatctccaaactgcaacataaaaacttggttcggcttttgggatgctgcatcaaaggagaagagaaactgttgatttatgagtatctggtgaacaaaagcctcgacgtgttcctctttggtcagtcctctataactctattccattgacctcttcgttcttccatcatatgagaattatgaaatgtgtcgttgtcactactatcactgatctgtactatcttattggatagattcaactctgaagtttgagattgattggcaaaagaggttcaacatcattcaaggtgttgcacgtggacttctctatctccaccgtgactcacgcctcagggtaattcaccgagacctgaaggtcagcaacattcttctggacgagaaaatgatcccgaaaatatcagatttcggattggctcggatgtctcagggaacgcaataccaggacaacactcgcagggtcgtaggaactctgtaagaaccattcttcgaaaacattctctacaagattcatagtcatgatattccatataggtgaacctatttgatgtttgaacagaggatatatggctcctgagtatgcatggactggggtattctctgagaaatcagacatctacagctttggagttctactgttagaaatcatcattggagagaagatctcaagattcagcgaagagggaaaaactcttcttgcatatgtaagttttttggtaaacttgcatatgtaagttaagacttaggtttcctacacttgcagagtttcttgctctaatattcttaggatgtgaaactaaataacaggcatgggaatcttggtgtgaaaccaaaggagttgatcttcttgatcaagctcttgcggattcttctcatccagctgaagttggaaggtgtgtccagattggtctactctgtgttcaacatcaacctgcagacagaccaaacacacttgagttgatgtcaatgctcaccacaatatcagaacttccatcaccaaaacaacctacgtttacagtgcactctagagatgacgactctacatctaatgatttgatcaccgtcaatgagattacacaatctgtgattcaagggcgttaaagaaacagtgtgtgatcgaaatttgttcgaatttgaagtgtgggttctgctcaggtaaattaaagtgatcaacttttcttcattaccttttaaaaatattttctctacttgtaaaagagtttgtactctttattgttgtccatgtgctcatgaagctccaatgttttcgttgacttggtcacaaactcaaacaaacaggtcatcatcatttttttattatattctttaacggttttataaatttaagataaacggtcgaaattaaaatcacaatggttaagttcgagtttttgaggcaattgtgaatttgtgagttcatttattcttcttctggtcaaagtttgcaacttttggctacaagcacatatttttctgagtcgtcgtcactgtctctgtctcttcaaagtcccacgatagttgaagtttactttgaatctggctcatctgaattatgcattgaatgtgttcgatgaaatgcctaaacgagaatttaaattggttttatcattcttttgttttttgctggtcttctaaggttttggatcttcactttgcaacttgcaaaacgtttgtcggtaatttccagttttgtgttgtccttctcgaagaatgcaaaagctcaacttcttggcttagtagaaacgagaaagttgacttatgagtaccacacgttattttctgtggacagtaaggttgggagattctttgtcaaggtcgtctattattttattatttttgtttctctctttgctggtcaatagggtattgtttagtacttgtaatattcaaagaagtagtgtgaaccaagatctagatatttaattatctcaggatacgttaacataaaagtttttttttctcttggtctcaatgctcactctatccccatgaagttttgctcatactcaagttatcttgcagagaaatagaaaaaagatgggtatggttttatttgcttgcttgcttttactaatcatattcccaacttgtggctatgcagctataaacacatcaagtcctttgtcaataagacaaactctgagttctcctggtggattttatgagttaggcttcttcagtcctaataatactcagaatcagtatgtcgggatctggttcaagaagattgttcctcgtgtagttgtgtgggtggctaacagagatacgccagttactagctctgcagcaaatctcactatcagcagcaatgggagcctgatcttgcttgatgggaaacaagatgttatttggtcaacaggaaaagctttcacatccaacaaatgtcatgcggagctcttagataccggaaattttgttgtaattgatgatgtttcagggaataaattatggcaaagcttcgagcatcttggtaatactatgctgcctcagtcatcattgatgtatgatacttctaatggcaagaagcgtgtgttgactacatggaaaagtaacagcgatccttcgcctggggagttctcactggagattacaccacaaatccccacacaaggccttataagaagaggctcagtaccttactggagatgtggtccttgggcaaaaacaagattctctgggatatctggaattgatgcatcatatgtaagtccattcagcgttgtccaggatacagcagccggcacaggatctttctcttattccacattaagaaactataatctctcatatgttacgctaacaccagaagggaaaatgaagatcctctgggatgatggaaataattggaagcttcacttgtctctcccagagaacccatgtgatctatatggtagatgcgggccttatggtttgtgtgtgagatctgatcccccaaagtgtgaatgcttgaaagggtttgtaccaaagtctgatgaggagtggggaaaaggaaactggacaagtgggtgtgtgagacgtacaaaattatcttgccaagcaaaatcttctatgaaaacacaaggcaaagacacagacatcttctatcgtatgacagatgtaaagactccggatctgcaccaatttgcaagctttctcaatgccgaacagtgctatcaaggttgtctaggcaactgttcttgcacagccttcgcctatattagtggaattggatgtttggtatggaatggggagctagcagacaccgttcaatttttgtctagcggagagtttctcttcattcgtcttgcaagttcagaattgggtaaggataaaatacatttcttccgagattatgaaattcaactttctttataatgttttgtagcagcatgatttagcgtttttttatctgtttctggtgaatatctcagctggaagcagtcgaaggaagattatcgtaggcactactgtcagcctttccattttcttgatcttggtatttgctgcaattatgttgtggagatacagagcgaaacaaaatggtaagagactgagaaacttagaagctttctctctctctctctctctgttactctcttttcctctatatcgaaactgtagtaaaagacacttctatatatacacactaattagtctataatctgtcaaatcttgacgttaagcctttggttgttaaactgctacaaatcaagcaatacaacatgcacatatcttattcgtatttctgttgtctttgatactttataagatgcatggaagaatggttttgaacgacaagatgtctccggcgtcaatttctttgagatgcatacaatacgaactgccaccaataacttcagtccttcaaataaacttggtcaaggtggatttggtccagtttacaaggtatgtgaaattatgttttagttcctcaaatggaaagtttggtgttctctagataactttctgcaactttttccagggaaagttggtagatgggaaggaaataggtgttaaacgccttgctagtagttccggtcagggtacagaggagttcatgaatgaaataacactgatctcaaaattgcaacacagaaacttggttcggcttttgggatactgcatcgacggagaagagaagctactgatctatgagttcatggtgaacaaaagtctcgatatttttatatttggtatgtcttttattccatacatctctcgttattccttttccttccatcttatgagacatttttaatgtgtcactttcactaatctgttctactttattggctagatccatgtctaaagtttgagcttgattggccaaagagatttaatatcattcaaggtattgcgcgtggacttctctatctccaccgtgactcacgcctcagagttattcaccgagacctgaaggtcagcaatattcttctggacgacagaatgaatccaaaaatatcagattttggattggctcggatgttccagggaacccaatatcaagacaacactcgcagagttgtaggaactctgtaagaatctgtccacaacaacattcttaagaaaggatttatagtatagtcttatatattgacattttagtgaaactatttgatatttgaacagaggatatatgtctcccgagtatgcatgggcaggattgttctctgagaagtctgatatctatagcttcggagttctgatgttagaaatcatcagcggaaagagaatttcacggttcatctatggtgatgaaagcaaaggccttcttgcttatgtaagtgaaacaacttactgttttaacaatctaatatttcatcaaatgcagacacttccctgtttccttttctaaaacacttcttcacattctttagacatgggattcttggtgcgagaccgggggatcaaatctacttgacagagatcttactgatacatgccaagcattcgaagttgcgagatgtgttcagattggtctgctctgtgttcaacacgaagccgtcgacagacccaacactcttcaagtactatccatgcttacttcagcaacagatcttccagtaccaaaacagccaatatttgcagtgcatactctaaacgatatgccaatgttacaggctaattctcaagatttcttatctgtaaatgagatgacagaatctatgatccaaggaaggtaagcctaaggatcttgttatctcactacagaagtagtagtatatacttgtaaattcatgaacatttaaagcttaagattttgatatctcactctattttcttaagcatgtgatctcataaagccccaatattgcgttgacacgtcatcattttcggtataatattgttattaagcgtcgcaaagataaaaatatgctttttgatgacttctctggcattctcttctctgcattttataagatcatgttgatggaaagtcttcgactttggttacaagcgtcgatgcccagttggttagatttggatttctccgctatactttgtttctttgtaattaaaaaccatgttgcttcgaactttggaacgtttgggttatgcactgaatgtgttcgatgaaatgcgtgaacgagaatttaaaattcaaagttttgggcagtgggggcccaatgtttgaagccgcccatgaaaagtcatacctccactataggaaatcggagctagaactctgcactcttcttcaggtaagcttctcctaaatccaaagtctgttgctttcgatttcatatcagggtaacattctttcccaatgaattgaaaagttcttgtgttggtatttattccccaaatttgattaatctacagaggaaatagaacttttagctgcaagtaaaatgttgcaaaaacgttcttgtgctctgttactttctagaaaatggagaaagttttagctgcaagtaaaatgttttgcttttgtctttctgttactttcctagaaaatgtgttggctttatttatggttaaggcccagagatgggaatatacaaagttatcttctaaagcaacatggaatataaaactagtaaaacatttagttttttgacttctaatttggtgtcaccgtgtgattttgtgaatggaaagatgtgactctagtggtcaacgaggtctatgatttttctttccttttttatattgcggtcacgatggctttactagttattataataatataagttaggagtctccatagatataccatccaagaggtttcatattttatttgttctgttattgcattgactttataaagattcatacattcaaatccttagaagagctcttgcatatcgtatgggaaagattggtattgttttctttgcttcgttgctcttcttgctaattatattcccaagttgtgcctttgcagctataaccagagcaagtcctttgtcaataggacaaactctgagctcccctaatggaacttatgagttagggttcttcagtccaaacaactctcggaatcagtatgttgggatctggttcaagaacatcacccctcgggttgttgtctgggtggctaacagagataagccagttacaaacaacgcagcgaatctcactatcaacagcaatgggagccttatcttggttgagagagaacaaaatgttgtttggtcaataggagaaactttctcttctaacgagcttcgtgctgagctattagaaaacggaaatcttgtactcattgatggagtttcagaaagaaacttatgggaaagtttcgagcatcttggtgatactatgttacttgaatcatctgtgatgtatgatgttccgaataacaagaaacgtgttttatcttcttggaaaaatcccaccgatccttcacctggagaattcgtagctgagcttacgacacaagtacctccgcaaggctttataatgagaggatccaggccttactggagaggtggtccatgggcaagggtaaggttcaccggcataccagaaatggatggatcacatgtaagcaaattcgacatttcccaagatgttgcagccggcacaggatctttgacttattcattagaacgaagaaattcgaacctgtcgtacactacgctcacatcagcgggatcgttaaagatcatttggaataatggctctggttgggttactgacttggaggcccctgtaagctcatgtgatgtttataatacatgtggaccttttggcttgtgtataagatctaatcccccaaagtgtgaatgcttgaaaggctttgtaccaaaatcagatgaggagtggaataaaaggaattggactggtggttgtatgagaagaacaaatttatcttgtgatgtgaactcttctgcaacagcacaagccaataatggagacatcttcgacatagttgcaaatgtgaagcctccagacttttatgaatatctaagtttgatcaatgaagaggattgccaacaacgttgtcttggaaactgttcttgcacggcattttcctatattgaacaaattggatgtttggtatggaatcgagagcttgtggatgtaatgcagtttgttgctggaggagaaactctttccattcgtcttgcaagttctgagttaggtacggcattaagctgagcataaagtaattctaaaaaatttcgagtttcttcgtgatgttcttgtttgctgcagcatggtttacagttttattttatggtgcatctctcagctggaagcaatcgagtgaagattattgttgctagcattgtcagcatttctgttttcatgatcttggtttttgcctcttattggtactggagatacaaagccaaacaaaatggtgagacactgaaatgcgtagtagcccttatttctctgttttcttttcaatcagctacgttagtgtagcctttgaatgctaattttctacaatttagtactgacttggatacttgtaaatcatagattcaaatcctataccattggagacatcacaagatgcatggagggaacaactgaaaccacaagatgtaaatttctttgatatgcaaaccatattaactatcaccaataactttagcatggaaaataagcttggtcaaggtggattcggtccagtgtataaggtaaactttatcatgctttatctactctttttcttttgtcatcctctttcttgttcaccatatgactatctccaactgtggatccagggaaatctacaagatgggaaagaaatagccataaaacgcctttcgagcacctctggacagggtctagaggagttcatgaatgaaataatactcatctcgaaactccaacacagaaacttggtccgccttttgggatgttgcattgaaggagaagaaaagctattgatttatgagtttatggcgaacaaaagcctcaatacctttatctttggtcagtcccttattgtgcatatctctgcatctttccaattatattcatcatgtggaactcttgtacccttgtttatgtgtgaagctgaccaatctgtttttaatttggctagattcgacgaaaaagcttgagcttgattggcccaagcggtttgaaatcattcaaggtattgcttgcggacttctttatcttcaccgcgactcatgtcttagggttgtacaccgagatatgaaggtcagcaacatccttttagacgaggaaatgaacccaaaaatatcagattttggattggctcggatgtttcaaggaacccaacatcaagccaacactcgcagggttgttggaacgctgtatgtatctctgcctcctctatagatagataacaagcgtttacttgtttaaataatcaacctgaggaatttttgtcaaaatgaacagcggatacatgtctccagagtatgcttggacaggcatgttctctgagaaatccgacatctacgcatttggagttctgctattggaaatcataaccggcaagaggatttcaagtttcaccattggagaggaaggcaaaactcttcttgaatttgtaagccattgccctctatatcctccttgaatctgagtataaatcaaaatgtttctaataggactgtgttcatcgaatttgaaggcatgggattcttggtgcgaaagcggtggatcggatctactggaccaagatatctctagctcgggttctgaatccgaagtagcgagatgtgttcagattggtttgctctgtattcaacaacaagccggggatagacccaacattgcacaagtaatgtcaatgcttacaaccacaatggatcttccgaaaccaaaacaacccgtattcgcaatgcaagtccaagagagtgattcagagtctaagactatgtactctgtcaataatataacacaaactgctatagttggtcgataaaagcaatgatcacacatgtctacaaaagaatctcattgtaaattttagaggttttaatattcaaaaaaaggtgaccttggttattgtaaaacaacaaaacaaaaaccatttaatccttatgcacgagggatagagacagagatattacttcaacagtacggcacaaatctccaaaggcacgacgaatatttgtgttatttgagttttgacttaatcttcccaagccaatacaaatcgagagtgtggcttgtttctcacggcctttgaattcttttttatctctaaagttgttgtctttcttttatcatcaattgtgtgttgttgacattgtttctcagccaaagtttgagactttggatcgaatcacttatgcccagatgatctctgcatgattaatcacaatttctttttaaaaaattgtttagtcttgcactatttaaggtttgaccgcttctacaataagatatgcactgaatgtgttcgacgaaatgactgagtgagatttaactttcaaatattttgacttcgtgcggtttcttttttcaacagatttaccaaagagacatgttgaagcgactcgagaaagtaggtacattgaattgctcttaattgagagaactgtaagtaaactaaaatttgtgtactgtgttattattattaagctggcttatctaatagtggttttgtcattatatcactcttaggagattattcgagaaatggaaagcttatgtaacatccaggtaaattctgcaaatgggtcctgtttaattgtgttaatctctttcatggaatggaaggtgacaagtgtgaaagcttaaaagtatttttcagaggttggagaaaaagttgacttctttttagacttaatgcaattggaatgtttcaatgttttattgtttattctgtttaatattagaaaggaacatattgcattattgtaccagagagagagctgaactttgaataagtcaagttttgtgaacaaaagcttggtcaacttattaggtgtcttaagtagaagcagaccccatgaatttttatgtatatacatgaaacttgaggaagattgttctctcaattctttgagttcaccaaaataacgttttttttttgtcaacatgcgtattgttgcatgcttgctcttgataacagccttattctcaagctatggctatgcagctattaccacgtcaagtcctttgtcgataggggtaactttgagctctcctggtggatcatatgagcttggtttcttcagttctaacaactctgggaatcagtatgttggaatctggttcaagaaagtcactcctcgggttattgtttgggtggctaacagagaaaagccagtctctagtactatggcgaatctcacaatcagcagcaatggaagtcttatcttgcttgatagcaaaaaagatctggtgtggtcatctggaggagatcccacatctaacaagtgtcgtgctgagcttttagacaccggaaatcttgtcgtcgtagataatgttactggaaattatttgtggcaaagttttgagcatcttggtgatacaatgctacctcttacatctctcatgtacgatattcctaacaacaagaaacgtgtgctgacttcttggaagagtgagaccgatccatcgcctggggagtttgtagctgagattacaccacaagtaccctcgcaaggccttataaggaaaggctcgtcaccttattggagaagcggtccatgggcgggaacaaggttcactgggataccagaaatggatgcatcgtatgtgaatccattgggaatggtccaagatgaagtcaacggcacaggagttttcgctttttgtgttctgagaaatttcaatttgtcatacatcaagctaacgccagaaggatcattgaggattacacggaataatggaaccgactggatcaagcactttgagggtccgctaacctcgtgtgatctatatggtagatgtggaccttttggcttgtgtgtgagatccggtactccaatgtgccaatgcttaaaagggttcgaaccaaaatcagatgaggagtggagaagtgggaattggagtcgtggatgtgtgagacgcacaaacttatcttgtcaaggaaactcttctgtagaaacgcagggcaaggacagagacgtattctatcatgtatccaacataaagcctccagattcatacgaattagcaagctttagcaatgaagaacaatgccaccaaggctgtctcaggaactgttcttgcacagccttttcctatgtcagtggaataggatgtttggtgtggaaccaggagctgttggacacagtgaaatttattggcggaggagagactctttcccttcgtcttgcacattctgaattgagtaagccctcataaattcttaaatctttacaatgttcattttgggtaacagtgtggtttacagtttagtttttttgtgacctttcagctggaagaaagcgaatcaagattatcactgttgccactctcagcctttctgtttgcttgattttggtgcttgttgcatgtgggtgctggagatacagagtaaaacaaaatggtgagagtccaaatagctgatctctcttttacatatcatcttatttttctacatattatcctgatatggttccatgtttacttgggcatcacttgtttcggttttagctttagactttatttgagctttagcccaatgtatcaacgtctagaaattctgtgctaacactttgatacttgtaacccgtaggttcaagtcttgtatccaaagacaatgtagaaggcgcttggaagagtgatttacaatcacaagatgtctcaggtttaaatttctttgagattcatgacctacaaaccgccacgaataatttcagcgtgttaaataaactcggtcagggtggatttggtacggtttataaggtaagagatatggttccttctattttgtcttctctattctgatatttcttgttctttatatgactgtctgcaactatgatgacttcaggggaagcttcaggacggaaaggaaatagctgtaaaacgtcttactagcagctctgtacagggcacagaggagttcatgaacgagataaaactcatctcgaaattacaacacagaaacttgcttcggcttttgggatgctgcatcgatggagaagagaagctattggtctatgaatatatggtgaacaaaagccttgatatctttatatttggtaagtcccttcctgcttttctccttccatgacgatagagagttctttatgctgatcgatttctgccatactctgtgtgttgtacttttggccagcagatttgaagaaaaagcttgagattgattgggctacgagattcaatatcattcaaggaatcgctcgtggacttctctatctccatcgtgactcattcctcagagttgtacaccgcgatctgaaggtcagcaatattctcttggatgagaaaatgaacccaaaaatatcggattttggattggctcggctgtttcatggaaatcaacatcaagacagcactggtagtgttgtaggcactctgtaagtaaccactaccattcttatgacatgcttaactaaaagtcgttcatgtatataaatactcaacttgactaactattgtatgatatgaacagaggatacatgtctcccgagtatgcttggactggtacgttctctgaaaaatccgacatttacagcttcggagttctgatgctcgaaatcatcactggcaaggagatttcaagtttcagctatggcaaagataacaaaaaccttctttcatatgtaagaacctatcttaatcacttgcaaggtctaaatttgattctaaattcttacgttttcgcgcgttttttatttgttgtgacaggcatgggactcgtggagcgaaaacgggggagtgaatctactggaccaagatcttgatgattctgattcagttaattcagttgaagcaggaagatgtgttcatattggtctgctctgtgttcagcatcaagctattgatagaccaaacatcaaacaagttatgtcaatgctgacttcaacaacggatcttcctaagccaacacaaccaatgtttgtattggagacaagtgatgaggattcttctctgtctcactctcaacgctccaatgatctctcctctgttgatgaaaacaaatcttctgaagagctaaatgcttcctcatgaatgttccaatcggattcgttcacgtggacttgcgttgttttgtacaaattgtcagttgtggaataaatcagtgatgtaaattggcttcataatctgtaaatttacatttacccttctcttataaacctttttaatattcttataggtaatttttgggctacaaattacttggatttggttagactggattttgtttgataaaatatattcatttagtcaattcatcatctttatgaaaaacatttttttccctacatctgttgtgatttagattttaaaaacagatacaaattacttgactcatttagaaatgtggcatacattacacatatcattgtttacatgatataaaatgttatacatataacatggactgttatatggattacacataaaacagacacaaattactcgaatcattcgtaaaatgttataaaacaaattttaaattttaataacatgatttaggatataatataattatgtaacataacataacatgaatataacttttggtaacagagcataacatgatatagttttaaataacattatataatttaaacacaaacatactaaattttattaaaactattatggcaacaagccaataacaataaaagtcaaagttttcataatattttaatgtgatataaaaggctgatgtagcctaactgttcatctaatttgagttgaaccaaatataatttgatatgtaagtacatggcttttttgcaacttgaggaaaagttttgtagaaactgtgttgatatgtgaattgtgtgatacaaaatcctgaaatggctgtaaagttcatcttattggaactacaccaaacctgaccaatattgaaaactgaaatagttgacattaattgaatcaaatcattatatttctcaaaaaacaattgacaaatataatgattcctgaccaaacaaaacttaagcatacatagccaaattgatagtccaatataaggtccaatataagtgaacagaaaatgataaaccagtttgattctccctaaaaatcaaactaattaattaccaaaccaaacttaataaattcagttcaacttcatttcatactttccccaaaatgaataagcataaccataacaaatcgaaccagaaatcggatgagccgcctctacttgggaccatcgtttctaggatttaccaagctgtccttagccaaactagagttagcacaaagcatatttgtttgtcaccaaacgcacatggcccccaaatcttactcacaacactataagtttaagtaacaagaagacacaatttttaattctcatttgatccatcactctcacttatctctctccatataattgaattgtggtagatgcgagagatcactctatctctacacaacctcacatgcctctttatcacttgactccatgtgcttccccatttcccatatacttccaagattacatgcatttatacaaaactattccccatatttagtttcgtttttctaatcaaatcctctaagcttggatcttaatgtatgtcttatatcttatttagaagttttgcccattcaagaacgacttttatgattttatctaatgtttattctgccaaaaagctataaaaggatcaatgtaaggaaatgtttgatttaatcattgaacaacataataaaataattatgtttatagcaatttggttgcgaattgtcatcctaaaagtgttaaacattgcagcttctaagaagaatctctttagtctatattaaagccttaaagaaaacttttgataagatacccactgcacaccaaaataacttctttttgtttgcatttcaccaaattaaaaaagagagaataatattaagaaagaagaaaaagaaagaagaaaaagagatattctaaagctatcttaatattcttgtagttgaatttggaggtcacatgggattgaaattgggattagtggaaagagaactaacaaaaacacctttgtaaaaatatacactcaagaaaaattcacaaaaaaaaaactataaggaaacaaaataaaattaggaatgccaaataccactgagtatgctgcggaatctgttcattgatagcttcttcacaagtttcttagcatctgaaccttcagtttctgctagcttctctatgcttttcaaataccctgaactcgcaatctttcttctcgcgctattgcagctcgttaaagacatcaatatcgatatcaaaaactttgtgttacctgaatcgctgctcacattgctcccatcttcatggtctagcaactggagaatgtagctaatgttaaagtcgtcttgtgcaaacttcttcctgttccttggaaccgagatcaaacagtacagtgccacgctcgccatttctcgtacatctatcgatttggcgtcgagaaatttaactagctcgggcataaaacccgcctctcccattatcctcttaacctcttcttgtaaactacatagcctagatgtgaccttcaaggctgattcttgaacagaaatctccccatttcttagcagattcagcaaatgatccaagaatttgcaacccatcaatgcattcaaacaacccgcagacccgaaacataagttatcaatcgcccttaatgctatctccttagatttcgaagaagacaacgaattgggatctgataacacactcactagctcctgaattcctccttctctaaccaagatgtcccgggtttgttcgtctttacaacacatactcaacagtaaatcaatagaatttacctgaacaatctcctcctttgatccaataagcttgatgaaagtagcaacagtatgatcttcttcaatcataaacctcttgatctcttcaacaccaacgagatttctcaacacaccacacgaagtaccaatcaattcaccaccaaaatcactacaagaacaaatcttcaacaaagctgaaacacctccatgagcagaaacagaccaagcattctcagaattctcagttaatttcatcaaacaccttgcagacgcttctctaccaacaccattcccattctcaagaaccctaaccaaaggaccaatcacacctgatctgatcaaaacatccctataagaaccaaacccagatataaaaaacacagctttggcagattcttcttgaatcccaatctcagaatcaagaaacccaacaagaacattaaccatatcactaatctcaatcagaatcttaacatatctatcatcttcctccatagcttcattcagcttaaccaaagcttgtttcttcatctccagatctccaatcttcattctcgttaacaaatccctaatgtaaaacctcatgtcatctttacaagcattaccattaggcttcaacacaacgatcgcaaatccatgacttagaatcccagctgagtaaatccgagatagattcctcgtatgtccatcgaatttccccgccataacatctaaatcgctttgcatcagaagcttaccactgaaggagacgttaacgcagcgagtagcgagatcgtaagtgtctttgagagagattagaatggcggagattaagcttgagagagatgggtcgaatccagaattgagatttcggagagaatcgagaccagagtaaagctcttggagtttggttcttatgagttgccatttgatgttgaaggatttgattgagtgagagagtgaaatcaatgaagatattgcttcgattgctttctctatgcttgcttttgatgattcctcacaagcttcttcacccattttggttgataaagtcttcttctttcttgttcttatcaaagtggttttaaagcaaactcatcttcagaaagtgaggatattagagggaaaatgatgggaagacgaagactttcacaggtaatctcgttgggttatcagtaatggttaatgggttttgaggaaagagagagaggggaagagagtttggtaatatttgacggagctggcgtttctcggtggggttggaggcagtgacatgtcgaggaagatgaaggtgagggtataatggtcattttgattatttttggggttagatgaaaaagcgtatttgggaaaggtaagttggttcttaaaatggttttggtgacgagcacgaggtcctcgagaattcgattctttttctcttcttttcctctttttttctcttttccaattcaacattttggtgttcttatcattttattattttggttcttattatgcttttgaaaaaatgttctttttcaatgtgaaaatgcatgcgtttaataaataacaagtgaaacttaaaaattatacggaagagatttgtaatgaaattcataatgtggagttggacaattcgattacataaactttcagcataattaccaatctcataaactttctgcatattttttggattttgattattatattattttacgtaaaaatatttcacttcaaagcactcatataaaaatcaattatattagatagtttttggttttcatgatattagatagaagcttaactctaaaggaacaaccaatatctacacaagtacgagaaagccggaaatagaaatagttgaagctggtagacaatagtatatattagtagtttaagtttactcatcctctttcttattactttttgttataaaaaaaatatatttttttggacgacaagattttataaatcactactctccatcaaaggagggaatggttacaaaagaagaggccaaagccaccaatgctaacaaattcgctgcaccaaacgtcaagcaaatatttttgttataatctaaaatgtcaatacactaggcaaacacaagttattgttgtaaaaagggtggaggatatataatttcacgggaatacattagtaaatgtattaaattgaataagatgtatacaagctattttcattcaactactttggtattaaattacagaatatatacgtatataatatttgtaaagactataaattttcaaacagttgaaacttataaatatatgtataacagttgactcaacttacgtatattaaaggaaacaagaaatggtccgtgacgaaatatgaagagccaaaaatatatatggcaaaattgaatgtaaagcaaaaggattggctacctttcacatgattccaaatttagatcgtagttgatattatacaaatttctccatgtaaaataaaactttcaaatttgattttattgttcaacctaaattttacatagcactcatctagcttatattttgtttgataccatccatggtgtgagtgggtttttcttttttcttgtttctttgttctttgcgatccgaaatgtacatctatcgaagaactaatttgactattggtattatcattaatgctactattgatatcaatcacatgaaattttattgactttctgagttttcaagtttaaagcgactcgtagattgaacacacctagctacacaaataagtcattggaattttgagcattttcatgaaaaccaaagagcccgtaaagttatatagattaatgctactattaatatctctctttttctggttttacggttctaataatcagaaaaatgttacttgcagtaaattgtctatgcaagagtgtggttaatggttttaagatgtttctatcatgttaataaccacatgcatgtggtatttgtttatatatatggcactttgatggatggaaaacaagacacactaattagtgtactttttcaaattagattatgcgattaaagatcctgtaaataagtaagtgtaatgctaaaaaaacaaaagttaggtgtggaaactggaaagacaaaaaaacaagcaaagaaagtgatccatgatatcgacgtttgagtagttgagaagggagatattcatatgtgcaaacgcattacaacatattccttagttttcacgaaaaatataataatcaaaatatataatcattattcaataacaaaaagctattataaaaaagaaaacctaacctttgttatttatatattatatcatctacttgtttattggtcatcgatttactagactggaacaaataatcaatttttcaccaagtgattgtgtatcataattgtatatatttcaaagataatattgaactataatctgaatttccttacacgctttttgtttaaatgaagcatactaataggttatatatttaacataaaatatctgataaaaataataattgaaatgtcatatttttaaataggaacacaagcattttaacaatcaaatcgtaaatatgtcttgcaacgatactgtcgaataaatagggatcccgtgaaaaccacaatataatgttcttgcactagagaattcatcacataattggtgaaacattaacaaaataaaaactacaaaaacttcgtcattttcggatatccctatcttttccaaagtttggatttttcattttatagttgttactagtatgttacccaaattatttgtatattataaatcgaatcattgatcagaaaaatcaccgaaaaactagaccaattcaagattaatatgagtcatgtaaaactagaaaaaggaaaagtaattatttataaactcgtgaaggaaaagtgattataacttgagatcgcttgacgatgacatgttgtaatttagtgtgcacgacataaaaaggtccacatgggagtcatatttgctccaagctaggctaataggggttgataataactaaaggagaagccttgtcttaagcttcaacacataaatttcaactaactacatatattattataaattatttatgcattccgattcacttcttagtattcaaccaattgattgatttggtaatgggttgagttgaagatgatgcaatggtgtttatatgggaaaaaaaaagttttgtattattagcattacaaataattagcagtgaatagttagatttaggactcttaagactttgaatagaatttttaattattatgattgtaatgcctaatatatatcttaagtttaattatagaaaaaaaaaactaaaactatagatgtatatcaactatttatgtgagaatttatgttgtaaattatattagttttgataaacatttgtcaaatattgtgataacttctagtacaagagtcatttcagtatttaagaatatctttgacatgtggttttactcctaccaaggacaaacatttttttttttaatttagaatcatcttgttccatggacatataaaattggacaattcaaaagggtttacaaccacccacatagctaggttagtaaatcatctaaacttaattttaacctaattatctagtcataccatctatatttagcaacctaaacctctatgttgcttaatccaatttacaataacattgatcaagaagatggtaaatttgtatattaagataaaattgatcaagaagatggtaaattaacaattacttgtttatatctgatatgctttaagttttatgtatcaacctaaaaattttggagaaagaattagtaaaactcgctcaaagacaggattggtaaggagtttgtataactgaagccaaaaaatatgagaatatgagctgggctacttgttaagggcccaatatgactcaggccgtttgggcccaaatggattctgtttatactctctagaatgagaaatgcgttttttttttactgaaatgtctctttatgaaagcaaattatcttaccaagccactgttcttgagacaaaggctcaaacaggttatacgaatccagcatcagagacaaatgctgattacgtggtgtgtgtgtaatcaaataaagactttagattgaaatcaagaggctaaaaactaatgaaataaatatgcatctcttattattaatccactttgtaaaaaccaaataaactatattcacactacacaacatacaaaaagatctataaccctcccatagagtttgtttgtgaccttctaaagaagctagcctttccaaaaccctatctctctttttgtatctaacaacaatttacagagacctatccaaaccaaaacccaaaaaaaaacataactaaaaacccctcctcttcaattaagaatcttgaagaaaccaagttgtttgattcagtggaatagagccactgagactccggaatcgtccttgttgcggtttatcctcgaaagacggtaccttttctgcaacggagctcccggagcttcaatctcttcatcatcatcctctacatcaaacggtttatcccaaccaaatctgccatggtggaaaaccgaggttttccgaggtgtactatacgcgaaatgtgactgctttgctatcattgtctgcaaagaaaaacaaagaacatttagattcagaatcaactaatggtgtatgtatcatcaaaacctactaatgatgccaaattttacttacagcttctcttattgtctttgaaacatgaaacaattgtttcaagtcttcatgctcgaccccacagataatcctcacctgtaataatgaatcacaagatctatcaacacgtgtctatgaaatgtcaaacgatcttacgcacaatgacaaaagttttccagatatggaaaaagttgaacattttctcatttccattacgattttgaatctcagagaacaaaaaggattcaacttttagctcaatctgattgacactcgctgaattaacaaagactctcagctaattaacagaacccagaaatcacaaacagataaaaataagttgtgatgaaattcttgaatctcaaagaccaaaaaggttcaactttcagctcaaatctgattaatactcagtaaattattatgaaatctcaactaattaacagaacccagaaatcagaaatgattaagaatgagtttctgatgaaatgaaccagaaatttaaacactttctcatttccaaaacgaattttgaatctcagattaaaaacaaaaggattcaactttcagctcaatatgattgatactttgtaaattaagaagaaatgacaactaattaacaaaaccagaaagagattaaaagaaagagttagtgaagaaacgaaccagaatatctaggggaagatcttcaagctctcgactctgaccctctgcaaccgaagtagttttgtcatcgcagagcttttttccaacaggtgaagtgaaaatcgaatcctccatctcatcaccagatgaaatgagaatcctctttctcccaaatcctctcttgtactgtacaaactctaaccctaaccctaatcctccattatccacatcacgacgttgcctcaaattcggcttctgggtaacgattcttttcttccccaatgccatttttatcaatctgcaacagcaaaagtacaaaaaatcagatctttccccaaatttcagagaatccccaaaacagaggaattggataaagagaaaatgaaaagtgaacctaagagcaagaaacaaacttacaaataaataagatttttccgaagattttccgagatttgttgatgtgagtcttgaaagtatatgtttgtgggaaatgaacaaaagctgagagaaaaatgagtaatttttcttttttggtgttaatattatgacaaagaaaaatgaactactacttcttctctacttatagtagattaattatctttctttttctttttaagtcaatttattattatttaaatgaaaacgagtaaagtagaaaatgctggaaatttcctaagcaaaaaaaaatatctaaattttttaaattttgttgttctccctctcttccttactttttgctggtaagcaaaagacggcttacaaaaaaactagccgttggggaaagacacgtggtgaactttgagccggaggaggaaccaacgtgggtggttcgtgtgctgacgtggcgacaagttgttcgtttgacggtttagtcgcctcacacggttttgttttgttcttaggattcgcaaaaagtaaaaatctttcgagtcactgacacaatctttgataatctaacacttatcagttatcaccgaccaaaagaaattagatgattattgtttaatttatttattattattgattactctttattttaatccattgttattgaatttttttgacatttaattatggtatatgcaattagtttcttttatgtcaatattgtatcatcaagatctatagatgttatatgtatatatcattgttatatttttctatttttatttccacattcttattggagaaaattacaatattactagaaataaaaagatttgcatgccatttgttgagatttagtctttattgattaactcttcattttaatccattatttgtttttgaaaaaaaataagaagatttgcatgccatttgttaagttttttttttttttttttttaataaatatggacttctcatttataaaggttttccccaaatatgggattggatcacggtaatacacaacgagaaacacagttacaaaaatgcaaatcggagaataataacctggcaccggaaaggaggattatatcctggagacaccgtgaaacagagagtccgacacactagcgacggcagatgcgcagtccacagttttgcagtccgacacactaatgacgacacatttattaagatttagttatcaatggttaactttcattttaatccattcttattgagtctttttgacatttttttatggtatatatgcaattgattttgttttaggtcaatattatatcaagatccaaattaagcttttaacaaataaaaaaatataagatatgcatgcataattgttatatttttctatttttgtttccacaatgttattgaaaaaatacaatattatggaaaaaaatatatgcatgccatttgttcatatttttactaacttattggctaatgtaaggatatgtttaaagtatattttaaaattggtcaatttgttttttatttctcaataaaacagtaattaataattaagagatacaaatattacattaattaaattgacaaaactaattaaattaaattatatatatatatagtattgaatttttgtacctaagtatgatatatcatatatataatttacttaagttatttactgaaaaatcaaggtccaaaaatatgcatagattaatgatcattattatatatctctatttttattcccaaactcttattgaaaaaagtgtgcatgcccattagttgaggatcttactaaattattaactaattttaggtacatctagttaagaattttttttcttattgtaagttttttttatcaacctattataaattagcaaaaagagctgaatgatattattcaccgaacctaataatatttgaaaagacaattgtatatcgaaaatattagttatttatagatgaaataatcaaaaatatgcaaaaatatataaaagcgaaaaaatacttaaaaataaccaaatatatatgtatgaaaatatccaaaaataaccaaaatatctaaaactattcaaaacaaaataccgaatcaataccaaaatttaaaaccaaaaaacctgaactgaaccaaaaccgaactaaaatattaaaatattctaattgatcataaaatctacaactgaaaagaatcaaaactgagtggaaccgaaccgaatcttaacgcctaggactattcttcaatgaaaagtttaggtatttatttaaaaaataatatgtttatatttttggtcaaaattttattttaaaaaaaaattgtaattaataactaaaatacaaatatgatatcataatagagaacacattatgtgattcaaggatcttacgatacaacttctctaaactggtttcacaccactcgaaaacagagctctaaacaaaatcactacaatactctcgaaattactttttaaaagagagaaaatgctggagaattctatttgtgtgtaaaacgatcaagttcttaatctattaaagaagacgacttgaaatatgggttttaaatagaagtttgtgttaggtctgatgtggaatcaatcaaccacaatcccccacaaatccaagagaggtaggcaacattacgagagacgatatctccataaaacccgattcacaaagatcgtgaataacaaaggagaccgagtctcacgttcaacccgatccgacttctctcggagctccaatgtgagctaggccttaagcccatttctttttacacaatttatttatattaagtccaattagatagcttaagtaaaaagttggcccaacattgaactgatcatttcttcatacataattatcagttatgagataacttgtttggccattattaagcccatctctagattggcttattgactagttaaaaacaatgacaacaaaaataggtggcgctactaaagtattccagacttctcttcacacttgatcatgtataatttgtatggtttctctataaaacttaagatcattttcacttgacaaagatttgatttattttattttcacatccaatttctttctctttcattagaaatttttgttttggagaatctattaacgatgaaggagggcctaattgataaaatggattccatgcatccacacctctaaagaaagtagccaagctggccttagtggccaaattggcctttatcatcaatgtgttgatcccttctcctacaaattcaaatttatttattaatcagcccaatattttatttgtgtggcccaattatccagggctttctctgagtacacggtgtttaaatgcaacaaattttccaagaacaaaggtgtcaaatactcaaatgacttgtttacgatttcaacaacaagctggtaaagatgacttgtgtaaactaagattgattagggtcgatttaaatcaacggatgtatacaaagtactaatatgtaagtaatcatatagctttttgtaattattccaaaagtgcatatggttaacttagtactattaattgattagtagcaattgttttcctacattttataagtgacgctaaatgactttccttttagtagttgcaggagcatgggaacatgttaccatagtctaagtggctataataagcattataataccaatgatcccaaataattaagttcaaatctgaaataaattaaattacaaaaagagttcaaatctaagataaaccaaagacagaaataagagagttcaaatctaagataaaccaaagacagaaataagagagttcaaatctgagtgaagagcaaaaaaggaaaaaaaggacatgtttcactcgctgtgatgtttcaaaacatcaaaagagctatttcatgcagtttggatgcttgagcttaaacttcggtaactttaacccctgaaaatatggtttttatgagctttatccttgcaacatctggggtgtgagcatcgttcttcgcgttcttaggcatctgtaactccaacctctttagagatggtgcgttcttgacaaagaactctactatatcaagctcatgccagtggcctttatagccaatgatcttcacgtccgtgagacacttcaaaaggtagttgttattcgaagtattctgaatctgcgccttatgatgtatctcccaaaaatacatttgaggttcaaatgtgaaattctgaatctgcacataacaatcaaaagttttagtagtaacttatatgtagaccatagggaggcagggaggggggagagagagagacttacatcaatgataaactgttcgagtttagggcactctttaaggaattcagcgatatcaaagagagtgcaaaatgttggagccttaaagaaaatcttgaattctctcaagttctcaaacttgaaaagcggcttttccagtttcccttttaagtatctatacgtgattgcctatttaaatatatgtggaaaacaccatcaaaacgagtctgaacaaaacaaaatagagacaaacatagcggaaacacatttgtgattattgtaaccacgtattatcactattcgaaaaacttgtacctcaagcaagatgtttgtcgttgtgagggcatgaactgctgaacaggctagcatactatcaaccaccgtgtcagaagaatgccttcttttacttcgactataatgaaattctgcctcttcaagtgcattaacctttaaaacgttgatggtcttggcatatccatcatacttgtaacattcaagagtgggtgcatccaaaaagatgctcaaaagatttggcatacaagacacgaccaacgacttgaacttcttatgatcatgagcgtatatggtcagtatcccattcccagacatttggcatttgactagttcaagcgactcaaggtggatgcagttgttgaaaattgaatctatcatttcattcgttacctcagtccgcatgagcgaaagtgtcttcaagagccttagaccttttggaagattattcggtatttcaaatctacaccattgcagcttcaaaacagtaagtgtctcgctggatgagaaattgagtgggatctccataaccttcttggagcttgagaaatccaacacaagctctttgatgtttttacgaagacacgtatcgacccacgaaagtatcttatcctccacgccggtatggtcgagagacaaaacaaaccggtcgatctctggtccttggtgctgaataaaaacgtcttcgattatgcgtacagcctctgattgactacgtctgacagaaaatattccgctgaaatcgaggtcgcgagatagcttccatgtgtccctatatctcttcgacaaaacacggtgttgtaaagtagattggactggaagaaatgacaagatgcactccaccaactcatcagacaatcttttgatgagtttcatctgcttattagacgcttctgacattttgatcgcgatggattcctctctagtttagattacttcggaaaagaaaattatggtttggctatgtatttttcttacaaagtatgaatttgttgctttcaattgtagcaaaacaggtgtgttgaaacttatttatattagtcaattgttgtttctgggttgtttagatgcagatatattttgaaaagtattgaatttcttaataaagaaaaaaatatttttggctatgtaaggtatatgtaaatgtttttctccaaaaatatatatttgatttaatctatattttatgtattgttatcaaataattaattaataacaactttaaatatttgtttctttaatcttacatttgctttccaaacttgacaaaatagtagatttacttcttcttttgttttaaattatgaattgttgccagatatgtgatattattaccattttttactaataaattatatttaaattgacatagaatttaattaggatttgggaccaaatatgtcatattatttaccagtaaaattaattgtttttttggtaaatttttgaatggctccatatcatatcttttagagatgacacattcgaaaatattgatagtatacttgtcttttaattgataaacgaacaacaattaaaatataaaattaaatctaaaacacaaataaaatcctattatattatttgggaagtacattttaaatataaccttaatttttgtaagtaattacataggtatgccattagatataaaattttaaggagtaaattaatttatctctttgaggattaaaaagtcaaatactaatttaattaattaaatttaattaaaaacgaaatatattattaatttccaaaaaaaataaccaatcaaaatcaacatataagatttgatatctgaattttaattaatttaatttaattagaaaaacgaaatacattattaattcccaaaaaagtaaccaattaaaatcaacaaattagatttgatatctaaattatcatattaattttttattaattattatagtttacttctcatctttatatgattctatttttgccgaaaaataatatcatcattacagaaaaataattagagttttttcgcatatgccataatttgaatttttaaaagtttttagttgaactaaaatataagcctacctgcggtatactgcaagttaatatctagattacagggcttattggatctaaagacaactcatcaaagatttcctaaactgaagcaaaatatactgaatattcaaatatctatctgttaccaaattataaacaaataagttcgtaaaacaatttaatattttatatacgaaatcaactaaatcttaatcacataaaatttgctcaaaaaaaaagtattcaacaattaaaaatttatcaaatctctatataagttttgatactatattcgaataaagtgtaatataccttttcaatttatattctttaactaatttaagcgaactaatatatttgctaatcttatacctatcaaaaccgactatcgtttcttatctctatagtatatttgcaagacttttttggtggatttggataaaagtgcatatcgttctactatattatttgggaagtacattttaaatgtaactttaatttttgtaattaattacatgacaatgccattaaaaaaatttaatcaaaaacaaaatcttttaatgacatcattaagattaccaaaatcatttaacgacaatattcatctcttaattatagggcttattggatttaaagatgggtcattaaagatttcctaaactgaaacaaaatatactgaatattcaattatctatctgttaccaaattataaacaaataagttcgtaaaacaatttaatattttatatacgaaatcaattaaatcttaatcacataaaaattagcacaaaaaaatatggtacattcgggtctatagtagttttgcaagacttttttggtggatttgggtaaaagtgcattcgggtcatatggtacattccccttattaaataaatatggtgcactcctatgttattagctaaaatgtttatattataattcagagttatatcataaataaaattaatattaataaaataaatggctttttggcaagacggatttggagggacgggtttttgaatcaacattaataaaaagtaaaatataattaattcaccgtttcaatacaggttaaatctttgatttattattttttaataaaaaataatatatataaatacttaataataattataaactgtaaaaatataaatattttataaaaataaaatttacaagttttaatatatattacttttaaaaaataaatcatcccgcggtataccgcgggttaaaatctagttatgatttatttttggtgctttgtgaacttttaccaaattaaacaacaaaacaaaaaagatgtcgtccattatagagtctcgttggagttgagatcaccaaatatggtgttttggtttctccttggagatggtcttatatagcaacacatgtgagttttattcctctaaattttctaagttaccaatttttttttgttatttcaactttttatgtttctatctttccattttctttatccaaatttaattttttttttaaaaggcctagctaactacactgtatggctcagtatcctcagacacagagctaatccggactggcgatggtcttttgttttcctccgttttttcaacctacgatctaccacctatatatgtcgtgaacgcaatgggagacgtcaccaatgtgactatacaccggctgacaatctcatatccacctttaacagagtgatctccacccgcatatcttcgttggacaacgttcttgaggagctgccatggagatggaacttactatctatgccttaattttaggctatatttcttttatttaagcagctctatttttaaatgcctctttgtctagtacttgatttactgttaaaaaaaaaaattgattaataaatttcacatttcatataaaataaatttgaaaaagagttcaaacctgaaattaaacaaaggcatacacaatagaatttcaaactaagagttttttttttttttttttttggacaaagaatttaaaactaagagaacatcataaaaactcaaaaaaaaaacataaaatctgagatgacttttgatgtttcaaacacatgaattgaagttatagtttggcatgcttgggctgggcacaacctgagtttaaacttcggtaactttaacccctgaaaagatggtttttatgagctttatccttgcaacatctggggtgtgagcatcgttcttcgcgttcttaggcatctgtaactccaacctctttagagatggtgcgttcttgacaaagaactctactatatcaagctcatgccagtggcctttatagccaatgatcttcacgtccgtgagacacttcaaaaggtagttgttattcgaagtattctgaatctgcgccttatgatgtatctcccaaaaatacatttgaggttcaaatgtgaaattctgaatctacacatagcaaacaaaagttttagtgaacttatatgtagacgataaggaagcagtgagggagggacaaggagggagagagagagagagagagagagagacttacatcgatcacaacctgtttgagtttagggcactctttgaggaattcagcgatgtcaaatagagtgcaaaatgttggagttataaaggaaatcttgaattctgttaagttctcaaacttgaaaggcggattttctagtcttccttctccgacgtatctcttcgtaagagcctataaatacatgttaaaaataccatcaaaactcgctctaaatcaagaatgaaagattatgaacaaaagaaaatggagacaaccataaggtgacaaaatcatgtgaaaattccatacgttatatatgatatcgatgagatatcatcttctatcatgatcatcaagagagtttgtgcaaactctaaaatccaaccactttaagaataatgcttgtaacaaaaaaaagtatcttaagttttaaggtataagatttagtgaaatttctcgatcaaatacctagtcaaacaaataatatttggatgcactgttatgttggtataagattataattcttgctaagtcctatatatatatatatattgatgtgatttataccttttgagaatgtattggattcttataccatgtaagtctaagaatcttatctaaatatcaattagtaagaaaaaaaagtaatacaaatacaaacaaatgaacatcaacatctgatcttatttcttaaagatgcaccatttctcatgaaaaatagagatagtaatataagtagttattctccattaatcccgataatctagataatttagatacacaatctcaaaaatacataagatgttaccttctaagtaaaaaaaacaatagagcgaaaaaataatttattttgaaaatatggaaagaaaattcaaaagtatatattttttaaaaatcgaatttattaagagcgcgaaaataatatactcattctttaaaaaacggaaaaagaatatggaaaagcatatttttatttacggattgaccacgattctaataagcgctcgaaataggaatttcgaaaaaaagttatattagattcataaataatttacctcaagaaagatggttgtcgttgcgaggacagtaagtcttgtatagaatcgcagtgtatccaccaaatcagatttttggtggtataaacgccgaatccgagtgtagtagagatttgcctctttaagtgcatttgttatcagaatgttaacacaaatgacatatccatcatacttgtagttttctaaagtgggtgcgtccaaccggatgtgtcggagatccggcataaaagacacaacaagcgacttgaacttcttatgattctgagcacgtatgcttaatatcccatccatacggcattcgattagttcaagcgactctaggtggatgcagttgttgaagattgcatcgatagtcttcaccatcacttgggtacgcataagcgagagtgtcttcaagagctttagaccttttggggaactatcaggtatttcaaatttacaccatcgcagcttcaaaacttgtagactctccacagccgagaaatcaatggggatggccataacttttctagattttgaaaaatctaagacaagctccttgatgtttttgtcaaaacatgtattggtccatgagatgattttatcttctaccccaatatgattgagaagtagaacgaatcggtgaatctctgatcctttatgttgattgaacactttttcgatgatgccaacaacttctactttacgacgtcttctagaatatattccactgaaatcgaggtcaagagaacgtacctcggtctcgcgaaatcttttggacaacacacgagttgttaacagagattggacgggaagatacgtagacatcatgagttccaacacatcttcaggaaccgtttcactaggtttcatcctcttatttgatgattctgccatttctactcttgttctcttggtaggaggagccatggattgatttttctgtggtgataagatatgatatatgaagattatatatatatatacacacacttattgtgaacaactatagatttgcttttgttttagacatttagttaaattttgcttcttctttttttcttttgtctttttaaagaaatataataaagggtaatttttattaaacatttatatttatttttgttttaaatgctggattgcatttagaagaaactcaacaacaactttacttatgttgacgaatattttttattttttctaaaaaattacatatctattaaattttatgttatttctttccaatataatttatttatttctttagaaattgtttgcatgtttgctatataaaacgttttccatataaatcatcagatacagctgaacatattgtagagcgacacatgtagtttacttgatttaaataggtgtcaggaaaaacgaaactgaaaatttgatgaatataaaagaaaccaaatacaaatacatatgatttgcttcttcttttttcaatataaaatttgcttttgttttacttaaatttagtctaattactttttaatatgaagttagttttcagaaaaaggttggttcgagctctctcgaatgaacaaaaataaaaaagaataggtcactattttcagttcctagaactaaaaccaagaaaagaacacgcaaacaacctaagcgagatgttctagtagtacttagatcaggatctaatagaagaagattccattttttctgattttagtgtgtttgagtttaattcacactaggattaggaacttaatcaatttgcttagaccactaaattttggtcacgatgcttaatatgtggtagtcataaacccgttttctaacccttagatttggtttggtctagtgaaccagattttaataacaaaaccacattgacctaaaaaaaacagaaccacacttacgcttaaaccagctcggagaataatcaaaccagccataagtaaaccacagaactcaatttcttcttcctcttccatctctcttcatcataagccacgaaaagtcccaaaacatcctggaaagcttccaaatccccaggtatgaactcgacatctcacgcattattgcagtctcaggtcaagctccactgtagtagtactcagcttcgtatttttattttattcaataaaagttttaatggtttgtactaaccaacgatataaattttactgtatgctaaaatagaagctagtcaatattttcacctaaaaacacttgttctccttttccagatctaaattgtacttagctcttcttctctcttcttcttctcattctcttcgcttgtaaccacagaactttgcagtggtcttgttccactattattagcctcgtttttgcttactaaaagtttatctctattctcatcatcatggggagttgtttttcttttcaaattgctgttggtgatcaaacgatgaatcgtatctttgattgcttaattggtaaaagttatattcgaaccctcgagaagaatctcagagctctgcagagggaaatggaagatctgagagcaactcaacatgaggtacagaacaaggtagcgagagaggagtcacgccatcaacaaaggcttgaagctgtccaggtatggcttgaccgtgtcaatagcattgatatagagtgcaaagatctgctaagtgttagtcccgttgagcttcaaaagttgtgtctctgcggtttgtgtacaaaatatgtatgttcaagctacaaatatgggaaaaaggtattcttgttactggaagaggttaagatactaaaatcggagggaaattttgacgaagtttctcagccacctccaagatctgaagttgaagagaggcctactcagcctacgataggtcaagaagaaatgctcgaaaaggcatggaaccgccttatggaagatggagtcggaatcatgggtctgcacggtatgggtggtgtaggcaaaacaacccttttcaagaaaatccacaacaagttcgctgaaataggtggtacgtttgacattgtgatctggatcgtggtgtctcaaggcgcaaagctttcaaagcttcaagaagatattgcagagaaactgcacctttgtgacgacctgtggaagaacaagaatgaaagtgataaggccactgatatacacagagttttaaagggaaagagatttgttttgatgctagatgatatatgggagaaagtggatttagaggccattggtattccctatccgagtgaagtaaataaatgcaaagtagcattcacgacacgttctcgggaagtttgtggggagatgggggatcataagccgatgcaagtcaactgtttggaaccagaggatgcatgggagttgttcaaaaacaaggtcggagacaacacattaagtagtgatcctgttattgtggggttggcaagagaggtggctcaaaaatgtcgtggtctgccattggcgctcaacgtcattggtgagacaatggcatctaaaactatggtacaagaatgggagtatgcaatcgatgttttgactagatccgctgcagagttttctggcatggaaaacaaaattcttccgattctcaagtacagctacgatagcttgggggatgaacatatcaagtcgtgtttcctatattgtgctctgtttcctgaagatggtcagatatataccgaaaccttgatagacaaattgatatgcgaaggattcatcggagaagaccaagttataaaaagagcgaggaataagggttatgcgatgctcggtacccttacccgtgcaaacttgctaacaaaggttggtacagaacttgctaatttactaacaaaggttagtatatatcattgtgtgatgcatgacgtggttcgtgaaatggctttatggattgcttccgattttgggaaacagaaagagaattttgttgtgcaagcaagtgccgggttacatgaaataccagaagtcaaggattggggagctgtaagaaggatgtcattaatgaggaatgaaattgaagagataacatgcgagtccaagtgttctgaacttacaactttgttccttcaaagtaatcaattgaagaatctatcaggtgaattcattcggtatatgcaaaagctagttgttttggatctttcagataatcgtgacttcaatgaacttccagagcagatatcggggctagtctcgttgcagtatcttgacttgtcgtttacaagaatagagcaactgcctgttggcctcaaagagttgaaaaagctaactttcctagatttggcttatactgcgcgactttgtagtatcagtgggatatcaaggttgttgagtttaagagtgttgagcctgctagggtctaaagttcatggagatgctagcgtattgaaggagctgcagcaattggagaatctacaagatctagccataactctatccgccgagttaattagtttggatcaaaggttggcgaaggtaatctctattcttggtattgaggggtttcttcaaaagccattcgatttatcattcctggcgagtatggagaatcttagttccctatgggtgaaaaatagttatttctcggagataaagtgcagagaaagcgagacagactcgtcttatttacacatcaatccgaaaattccatgctttaccaacctctcacgactggatatagtgaagtgccatagcatgaaggatctgacttggatattgtttgctccaaatcttgtcgtgctattcattgaagattcaagagaagtgggagaaataataaacaaagagaaagcaaccaatcttacaagtattacaccatttctgaaactagaaaggttgattttgtgttatttgccgaagctggagagtatctactggagtcctctcccctttccgcttttgttgaacatagatgttgaagaatgtccaaagctgagaaagcttccattaaatgctacaagtgctccaaaagttgaagagtttcgaatacttatgtatcctccagaacttgaatgggaggacgaagataccaaaaatcgattcttgcctgaaatggttagtactagtacgtcgtctaaagatccattactcaggaatgggattcctcgctgtctaaaatcagaatcaacgcttcttcttcttatattgctttatctatcttcttgtagagcatttggattgtataattgatttgcattctggaatgtgttgtgttgttcacttggattatgtttttcattttccttttgtattccctaaaaagttttgcatcctgttcagactacatttttacacaatcaacagtttatccgtttaggtaaaatccatttgttggtttctctttcatctttcagtgtccttcttctatctgttgtttccagtatgtttgtgttgttcgattaagtgacagataagtcctaagctatctctagtgtagtggctttcttaatcttgttgcatgttatggttatttcttaatccttcttttttttaacttccctttacgttctcctcctatagattccctctgtttatgatctctaactagatttaagactcagttcgttttctccgctatcccttaagcatcaaatcaaggatttgaatatgcttcccctcagaaaagagatctaggaatctctacagagccaccacaaaaccatccgaaaccaattttaagctcttttccaacattcaaaaggatgaaaaggttattaatagaaattgactcttaccgtaaaacgtagattgcattgcatgatcaaaaacattcaccacaatcctctgtaaaagtctctgaaaactgaaacgtttattttcttgtaaactgtcttaacaaaacctttaacagacatgaaatttcataaagttataatcttaataaattctgatacaaagagagggtcttaataacatgtcccaagtcaaacacatcataaagctttgttttcttccaatgtttccatgtaccaaaaattggggaaaaaaagaatttcctctcctctcaaatttgtaacaatgagcttttatatgttcctccacaaaataagcagttttgaattcaagtgcagttcttgctggaacatcatcaaccacatgttttaaatcattcttgacaagctcaaattgttcgatgtttctaggtttagccgcttaagacactttttcttcttgataactttgttaatttttcattatccaccatacatcatatatatacactaaacttaaccatataacctatggttttatgcaaacctctaaactcatttactagttgggtcttatgtacatttgtggcccaaaagaccatttatacttaaaccgaagtcttcttcttctccctcaatcttggacgcttcttcttcttacgtcttctcttgtcaatcttcttcactttcccatctagtctcaatctctggttcctcaattcgaatttagataataatcatagtttgattccaacacaaatgtcaatctattcttttgacggtagaacattctgttttcagatgaacaaatccttgacatccataccactgtatgttcaacttctcatcttctctagcttcattccacactataaagctattggatatgcaaaagattcatgagggttccaattaaacaataactcaaaatgaaggtttcgttttcttcactagtcccttgagtcatcaaattcttcattgagtcatcaattttttcattaggcatcttaaaaccccccaattatttgcacctggtttcctcaatataaatcttggtgttcattttctaaatcattcacatctttgtcttcaacaaacaaagtctgtaaaatcttcttccatcttctttctctgatccagaatcactaaagacactacttctgaagcttagtgaaggagctgcagaccttggtcctttggagcatcatctactagttctaaccatgacgatacctacatagttaggtttggatcaacatttcggcggtcaaaggttggtgaactgcatcacttcgctgcatattcatgcttttcaagaaaagctattcaatacatcatcactggctagtatggagaatcttcatcatctctatgtcgaaagtagtcatgtctaggagatgtatagattgcaggaaagctaaatggactagtctaatttaaacaatccgacaattccatgctttaccagtcgtctctcagacgtgtttatacgtgagtgcataaatgatctggcttggcttctgtttgcctgcagattagatgttcagattatgtgtcattaatttttcaaaatttaaagaaagatgcgtattctactcttttaagttttaatgatcaaatctcacaaaaaataataatcttttcttttcctaagaataagttcagcttctttagatattgataagtaattaggtagatggggtgttagggatatttctcaatttcattcagttccacaattgtcaagtgtttttttttcttattttgcttcttcttcttctttagtgatgtgggttagtcataagttgttcactagctaaaagcagagtccatggcttcttcttatgttgttctccctttcttcttgtaatttggatttttttcattacttttcttttgcatttttttctttctccagtgtgttgttcacttggattatgtttttcatcatttccgtatcgtattacttaaaagttaaaacggattgaattaatccttttcaaactacatatttatacataatttcttttctagagttcaattctatatacaatttatttagttaaaagacttgatatcagagcgacaaaggacttaaatagttctaccaaacatgaaagatactaatttccaaacatgaaagaaagaattattcaatttttactctaacagtctacacgaaaatgaaagagttgtcattttgagaagtccttagatgccatattattgccagaaactaatttgtatggactctagctaccaaaaaaagaggagaaaaatcaaagtccttcatatggaaaatgggtggtctgaaaatcagtgacagcaatgtcttttattatcttctatctttctttgataatctcaacccacccgtactggaacaagatgttatctaaaaaacttcttcaccttcagctttagcttcgttgttgcttactgaaacttttctctctttacatcaaatttatggggtgttgtttttctgtccagttttcttttgatgatcaaaccctggtacgtatctttaatttcttatgtgggaacatcaacagaaactcttttggagtggaggagaggcctactcagcctactattggtcaagaagaaatgctcgaaaaggcatggaatcgccttatggaagatagagtcggaatcatgggtcttcacggtatgggtggtgttggaaaaaccacccttttcaagaaaatccacaataagttcgctaaaatgtctagtaggtttgacattgtgatctggatcgtggtgtctaaaggcgcaaagctttcaaagcttcaagaagatattgcagagaaactacacctttgtgacgacctgtggaagaacaagaatgaaagtgataaggccaccgatatacacagagtcttaaagggcaagagatttgttttgatgttggatgatatatgggagaaagtggatttagaggccattggtgttccctatccgagtgaagtaaataaatgcaaagtagcattcaccacccgagatcaaaaagtttgtggggagatgggggatcataagccgatgcaagtcaaatgtttggaaccagaggatgcatgggagttgttcaaaaacaaggtcggagacaacacattacgtagtgatcccgtcattgtggagttggcaagagaggtcgctcaaaaatgtcgtggtctgccattggcgctcagtgtcattggtgagacaatggcatctaaaactatggtacaagaatgggagcatgcaatcgatgttttgactagatccgctgcagagttttctaatatgggaaacaaaattcttccgattctcaagtacagctacgatagcttgggggatgaacatatcaagtcgtgtttcctatattgtgctttgtttcccgaagatgatgagatatataacgaaaagttgatagactactggatatgcgaaggattcatcggagaagaccaagttataaaaagagcgaggaataagggttatgagatgctcggtacccttacccttgcgaacttgctaacaaaggttggtacagaacatgttgtgatgcatgacgtggttcgtgaaatggctttatggattgcatccgattttgggaaacagaaagagaattttgttgtgcgagcaagagtcgggttacatgaaagaccagaagccaaggattggggagctgtgagaaggatgtcattaatggataatcatattgaagagataacatgcgagtccaagtgttctgaacttacaactttgttccttcaaagtaatcaattgaagaatctatcaggtgaattcattcggtatatgcaaaagctagttgttttagatctttcatataatcgtgacttcaataaacttccagagcagatatcggggctggtctcgttgcagtttcttgacttgtcgaatacaagtataaagcaactgcctgttggtcttaaaaagttgaaaaagctaacttttctgaatttggcttatactgtgcgactttgtagtatcagtgggatatcaaggttgttgagtttaagattgttgagactgctagggtctaaagttcatggagatgctagcgtattgaaggagctgcagaaattgcagaatctacaacatctagccataactctatccgcggagttaagtttgaatcaaaggttggcgaacttaatctctattcttggtattgaggggtttcttcaaaagccattcgatttatcattcctggcgagtatggagaatcttagttccctatgggtgaaaaatagttatttctcggagataaagtgcagagaaagcgagacggcctcgtcttatttacgcatcaatccgaaaattccatgctttaccaacctctcacgactggggttaagtaagtgccatagcataaaggatctgacttggatattgtttgctccaaatcttgtctacctatacattgaagattcaagagaagtgggagaaataataaacaaagagaaagcaaccaatcttacaagtattacaccatttctgaaactagaaaggttgattttgtataatttgccgaagctggagagtatctactggagtcctctccactttccacgtttgttaattatacatgttctagactgtccaaagctgagaaagcttccattaaatgctacaagtgtcccactagttgaagaatttcaaatacgtatgtatcctccaggactgggaaatgagcttgaatgggaggacgaagataccaaaaatcgattcgtgctttcaatcaagaaggtaatcatttcttaatctcttatgcttgagttatttgtatttcttgctaatgtttctttcaaggttagcatgagatattgtccttctgcaaaatggatcacacaatagaatatactgtgcctctcaatttcaatgcatttttactaacattgtttcattttcttcttctttagtagtactagtacgtcgtctaaagatccattactcaggaatgggattcctcgctgtccaaaatcagaatccacgcttcttcttcttctattgctttatctatcttcttgtagttatggtgtgttgttcatttggattgtataaaactgatttgcattctgatatctttgaagtgtgttgtgctgttcacttggattatgttacaaaactgatttggagtctgatgcttttttatatgaagttaatttttagaaaaaggctggtttagcttttttttttcatcaaaggctggtttacctttagaaggaaaaaaaaacacgtttacttctgtaaattaattaatatatacggaaattattttttgctcaaaacatttacctatctatcaaatgttgtgctatttttttaccaattaatattttatttagaaatgtattgctatataaacatttttccatatattctatcatatagagttgaaagtatgtaagagccacacatgtagttttgattactaacttgatttcaataggtgttagaagataaattaagattttgatagataataatttgaactaatatatcaccctttctatttctttttaattagaaaatatgcataaaataaccaaatttttgaggataattaacaaaatagtcatatgctacagtaacttgtcggtaacatataacagagcacgtgtaataacgtgaacgtcctttttaacatgtttttctccgattacatgtgataacataatattttttttatcatgttattttctcatattgcacgtaatttataaagagcattcttgggaaaaaataacattctatttagtttaatatcacatgttatttttcgtattacacgttttttttttatcaaaatcacatatgatttctttaaaaaaatattatgttcaggttaaatttttccataacaatgttttttcttacaaacacaccactatgtgcaatgtttttctttaaaaaaatcactacatttttttaaaacatcatgtcttttaattaaatataacatataaaatttaaatgttacacgatattttacaaaatctcacgaaactgtgcttattgttgatcttgcaacacacaaagtatggttttgttatttcaccttttttacaaagtgtgtccattactatttcgcaacaaaaaaaaaaaaaattctctgctattttccttaatttttgtgttttatttgactatttttaaaaattaccattttttattgtttatttttttttaacttttattaccctatctaaaaaggtttcctaatagcttcagatatcactactacaaaaattgcttattttcaaataagattcttattaagattttatttttcttattgttcaaacttataaaaaatgtttagaataaaccgctgttaaaaagtaaaataaaatctacacttaccattgagaattaagatgagaacaaataaattatagacaagattctacccaaaaaaatcacttcaacatgagcatgatatgaggtaaggctggtatgagaagcaaagcgaaaacgactatgaagagaagaatggcataacaagtccatttcctcgagctcttttggtattctcttgcatcttgaagctggtctgtccctcttctcacgaacgagctcgccttcgagacgtggctttctatgtcatttagttgctgaccttgtgattccaccagagccgccatgtctaagaacacttggtgaagctctataagattcttctctatctctttgaccgcgtcgtgtctctcttgaatctctgatatagtgtctaatatttggcctctcccttgttcttgtattgctttctgaagaaaattctcgctttcaccactcgaaatcaagttctcaatcgtctgttcgtctgcctgttctccggttatcgtgaaatatctgcaacaattccaattttgttacgtcaacaaatcaaacttctttagtaaggagaaaaaaacagagcactaatgtatccttcaagaagaaaggaaaatggagaaagtttgtattcacctgcgctctacggtttctttatactcagcgttcatccgcgcacgcagaccttgaaaactatccatcaagtccttaagctttttcccgagtccactaacaacagacgtcctggtcctatcggtggaagagccagggccacaaccagagacattacggctattagcatttgctttttcaagcgcctcaagcttttgtttgatcatcttgactctcttgaggacctgagcgacatctccatccatctttgctcggagttccttcaccttcttggcattgtgtacagttttgcactcttcgttagaatcctgaagactcttgtaaagagtctctacgcctttcatgttatctttgacattttcgacatcctcaaagaacttatcgaggttcatcgtctctttacctgactcaatatcatccatttgggcctgttgcttcaggtccgtgtacttcttgaacgaactagagaataaatcattcattttttttcctttttgcttttaaaaagattcaccaagtgtatgcaattatatacagaaacaagttctttccgaagattattttgggttcaagagaatcttgatgaagatcatcatcatcatcctctgcctgttaggaggaagaagatgggaagaatttttttgtcttttttggaagaggttcgcaactagttttgttagaaaagtttgttttgtttttgtttggagaagagagactaccagttttgggaatcaccccaaattagccgatgacaaatcttttgttaaccaaattagcaaatgtgctaagaatagtttgtgaaataaacaaaacaagacaattttacttggactatgattacaacccaaaaccctatatagtagaaacattaacctgaatcgcttcgctttatcgaggttgttggtatgatgccctgtgaactgaaaccaacagagacaagtcagtgtagaaatattacgcgaaatactcagctcaatccaacacaagttcccaaagttcatatatgatgcaaagtttaagtcattcttaaaagctaaaacctctctttgttaaaactgaaccagaagaactaagttatctcctttcggcctaacccgatgaagacctccaaaagctctcttctattaaacaagtctcagaaactagttctcatccctatttatataagcaaagcactctaagaaggaaatagaaaaatggaattactagatcgcttacaaaaactccaatagctctcttcttgtgctttagctcaagtaacatattctaaataatactcaaaatcacattctctctcagaaggtctgaaccaaagcctggtttactactcaaaagcagcaaaaatgttttttcatgtaaacaccaaaaccaatatctctccacaagattctaaagcctgtatcactcacacacatatctatctacgcttcacaacaacactctagatgtaaaaatagagacatatacacacagaaacaaccatcatatcttcaactttgtaacaccaaatgatccagtttttcctttgaatttgaagaacattcatttgttcctgttacttacctaagcgaaattcgaacaaaggccatcacttggcaagatgtgaatcgaacataagatcgttgattcttgtaatatcaatgtcagagattggatctattggcctgtcttccccattcttcatcaaaggaagaaaattcacatcttctctactgtagtcatctgtcacaacaagcaacataaccaaacaactcaatcaaactccgaaagtctaacaaaactgaaatgagaatcagtaactcaccaaacaaagtattgagagaggttggttttgaagtagacatgaagttgagaccaatgtaaaacaccaaagctactaacagagtcaccatcgaatacatcggcatcgccatggcccagtacttgctcgggtagtaataaatgcctatggactctaagaacttatctggtacatatccccaaattaagaagatcacagtggcaacaacaatcgaaatagatcctacaaaaccataaacctcggaagtttttggtccgtgtacttcttgattcaagcttaacattcttctcggactatattgcaaaatcgttgagaaattgacgaagataagcgatgtgttttttcttaagaaaagaccaatttgaaggacgagacttgctaacactcgaaacctcacaataagcgaatctttcaataaatcaggaaagatgcaatcgaaatctcaaatcacagattgcttaatcccaaaatgcgattatgaaaccctaaatcccactaatggcctcaaaatcttcgaaaattcatttacttttttgcaataatcagaaagttttgggaactagggatgattgggggatgggtgtagggaggcccgcacgaggtgagttctgcaaaagtaagcagcgtcaacacatcggccagcctataacccctccataaattattgcgccaattttgtgttttacgattagcgccgcgaccggttctcaccggacgctttgttttccttactcattagtttaaggcaagtattccagatgctgtctatcactttcttatagtagtctcgataggtctccaacgagttatagttccgatgtgggacaaaaataatacttacaatcacgatactcgttgaatgaaagctactctaataacaaatgaaagcccaataatcaattcaaggcccattttcaattttcttgcaaacatgagtctatttaacataatgcccaaagattttgcaattgtcgtggtactaatatgctaatttcgacatgggataacacacgatgaacttcatttattttatttaccattttttatttttattttattttatatccctaacaacgagtataataacaatatatttgagatctatgtaaagttgtgtatctcttatgaaattttattttattttaggaaaaggtaaactaatgtgggttaaattctagtaaattgaccaattaatttaactttcttaacattatctataatgtaataatacattttcaaggttactgataagtgattcacctaattgcattcgtagaattcctacatctcagtgatgatggaccccaatgagatgtagatgagatggacacaaaaaaaaaatgggctctaaagatcccagcttataaaattctgattaaacaataataacaattatggaaattttccaatagtgacatagaatcatatacaaatagggttagtgtgtaactggtggagtcattatgaacattgtatccaatcaacgaacatttcagtgcgagaaaaaaaaatgacaacacacaaaattttaggccatttcaagaatacaaaatcaggaacaggtcatagaattaggcattagaaccagctaataaacttcagaaaatataatctcccttcaatgaggtaaaagtcaacttttattccctctctatctgtctctctatctctcgtgcacacaacttttagaaagattgtctcgcaagtcacaatattcctaagttgacaatgaaaggaatcccaagttcgtcaaaccagatcctaaaccaagatcttgttgaggtatgctatttgtgatgatcatgtttataatgaatttggaaactttggtcttgagagagtttgttccgcttttgaagcttgatgtgccgtaagatgataattttgcgtatataaatttgaggaatgaaaactctaagagacttacaggatcaatcatttgagctggaagattggcttccaattacagcatcacgaaatgctaattggtactattcagctttccacaacgtcactgccatagttggtgctggagttcttggtctcccttacgccatgtcagaacttggatggtatatatctttttcctgagaattatattttaagagtcagtctagagatataaaaattattttgttttcaggggacctggagttgtggtgttgatcctgtcatgggtcataacgttatacacgttctggcaaatgattgagatgcacgaaatgtttgaagggaaacggtttgataggtaccacgagctaggacaagcagcctttggcaaaaagcttggtttgtacatcgtcgtgccgcttcaacttcttgttgagacaagtgcttgcatagtgtatatggtgacaggaggtgaatcactgaaaaagattcatcaactttctgtgggagactacgagtgtagaaagttgaaagttcgacacttcattttgatctttgcctcttcacagtttgtgctttcccttcttaaaaatttcaactccatttccggtgtctctttggtagctgccgtcatgtctatgaggtaagtgaatctcatcctctttgtttctatgtatcatgagcttgtgctttagattaacctcgataaacatgtggtcagtaatccagccttagaactagagaatatattagtttaagcttcctcttaagccaagtctctcttatagaattaggttagttgttggaagttatttctttcattaagaggaagataccttatataggccacgatacattgcatttaaagaaatcttaaaacctaacgtgaaaaaagaatactctcaaaaccaatattaaaaggaaaagaccaaaacaccgctaatagaacaccacttctcgcgattatacaaaatcgtatatcatatatcttgtgcaaacataacattgaggtctctgacctatgttttattactttcccatagctattccacaattgcttgggtagcttcactgacaaagggtgtcgcgaacaatgttgaatatggatataaaagaagaaacaacacctcagtgccattagccttcttaggcgcattgggggagatggcttttgcgtatgcaggtcacaatgttgttttagaaattcaagcaacgattccatcaacaccagaaaatccatcaaaacgacccatgtggaagggagccattgtagcctatattattgtagctttctgttacttccctgtggcccttgtagggttttggacattcggaaacaacgttgaagaaaacattctcaaaacactccggggcccgaagggacttataattgtggccaacatttttgtgattatacatctcatgggaagctaccaggtatatataccaagaaacaccttatctattagaaaacttctaactactaaaaacccgccttcatatttcttttcctaggtgtacgcaatgcccgtgtttgacatgatcgaatctgtaatgataaagaaatggcacttcagtccaacaagagttctacggtttaccatccgttggacttttgtgggtatgtctctgtgattttcataccaagattacatattttgtaaagaaacacgatctaacttgtatatatgtcacagccgccacgatggggatagcagtcgctctaccgcatttcagtgctttgctgtcattttttggaggattcatatttgccccgaccacatactttgtaagctcttaaactctatcaacatatctttctttctttttttgaataaaatgtaaaatttttttcaaatttttttttttgttaaaacaagtgcatcgttcacttaaaagattttaaccaaattttctaggcaaagctagtcttcttggtgactatcttgaagcaaaccacattcccctacaatcttcatatcgtctatctcaatcaacagatcttgatatcttcaacaaaatatatataaattaatgaagttctctttcagatcccttgcatcatatggctgatcctgaagaaaccaaagagatttagtctatcatggtgtatcaattgggcaagtggaactcctccctttggtctttttgtcaattgatgataatcttgttatagctaataatacatgtttttttttggggtcagatttgcatcattcttggggttctagtgatgattatagcacctattgggggactcgccaaattaatgaatgctttaaagcaacccgactccagttgcaaaagcacctaaatattgtactgaattttcttgtaggtaacacaagtttttctctagtagtttgatatattgtttaatcatggcttcactataacaaactctgagtgtgaatctgtattgaaacaaatgtatgtggaggaaagaaacagaagaaataattctgatttctctcggtttggttaatcagtccggttttgcctttggttaaacagaagaaatgtatcgttggaccatgatgactaatctttattctaactatttgatttgtaccatattatatcaaacaaaacaaaaaactatttgattgtaatttttgcttctcgtaacattgccaagggttcagagtattataggtattattatttttttgtttaagaaaaaagtattatatgttattgagcgttggttttatagttctttttaagaagagtgaatacctttagttaagcagtttgttctattggctaagaattatgcccgatatataagtatcaccaaatttcactagttaaaccatgtttaactgccgctgtttgtagggcatgcattagttagtaaacattgtcacaacacacaaaccctattcatctaaactatgatcgttctttacatattgaaattgaaaccgaccaaattacaataaaaagggttacttttgggcaaagtagtaattaaagaactgattaactacctcgtacgcgtatttgacttacgaaacacacgttaaggatatttagttgttaagttattctatctactgaataattgtcgtatgttcaagttaattactttaataataacgttatcatttcctttctttgtttttaatagaaacagtcaaagactcaaatattagtatgtatcaccatttattacatttgtctccttacatactgatttatccattcccgtaatttattcacattatctctgtcgaacaaccgagaagatctaagtcgaccaaattttcaacgtcttctaaaatgacacgtatcgtatcttattagctctggccggtgcactaagtaacggatcttcatataaattctcctaaaaccgttgtgatgatactcgagtaattaccggaacaagatggcatcattcacactcgcaataccaagcgcgtgacgtctagacattgcgtcgttgaacgacacgtggagttctgttcgtaaattcgtggagcttcagaagaaactcacaacagtctatttccgttggacgaaaatgacggttacccatcactagctagaaaacagttgtcaaacttgacagttaagaaaacgttgtcgttttgttctttcacaatttctacgaaatttctatcgaaagactcctgattccgtgatgtctgagctttatggtacaaccatttgcaactttaattttcacacaaaagccaagtttatgctggtggtttatcatcaacttgtgtctataatatctctaataaattacgacttatgaggttacgcgttacttatgcatggagcatgcacacacatatgtataacgtaaacagattttagtttaatagatgagtgcgcagacatatatcgtttcgtttttattgttgttgtgcgccacaacctgtctctatatcttaaatagctatcgcaatcgattttatttaaatcctaaatacacttgcatgttaaagaaacatgtattcattgactaataattggattagatgaaataataataataataataataataataataataataattggatatttggattagagaaattattgaaagtaatgtataaactattgaaccatgaaaatatatttgcgaataaatcatcaaactgaaactatcaaaatgtataagattttgaaaaacataatttcacgaaatatttttttttttttaaatctatgttttgactttttatcaaattaacaaaagcactatctgattatctcaagctgatttagtagaccgaccaacaattttatcttttaagccaaacaagtaatatactttatcataccaaaaattaatatatttatgatactaaagaaaaaactttatatatctcctctagtatatagtaaaagcaacaaaaaaaattaaaaataaatgttaagagagcgttttatggtcggcttttcacgcgtttcactttccaattttcatttcactttataagaatagaagaactccaaaacattaaaaataaggaatcagaaaaaaaatctataataaagttgtgattaaatcattagttttttttatataataaaacgcaggtgatcctaaaagttttcaaagcccaaagactaattgtaagatccgataaattactcgaattttggtgactaatgttacttaaacccaaatagtggaattaacactctttaccagtagaccaaagcaacttggtttaatttattttcttcaatttaccagatcatgatgccgtttaggaccattggactagtccatgctgagtgaaaataattcactcaaaagaataccgtaaatcagaattttccacgtttatcaaataactgactaaaaagcacacataacaaaattttcatgcatcaacttgtactaaaatttatagaaaactggcgtatattggtaaataaatagcagaaacaaaagtggaaaagttttgtggcgccacttgcgaagtgaactttggagctggagcacagctggacacgagcagtggggctgcagctgctaagtgctgacccaaattggggtcacaacctttcctcttataacggtccaatatatattaccgttatgttacatacaatatagtaatttatatatatatatatattttttatatagtaatttatattattttttgcacactatcgatttgatttacaacaagtccttttgttttttgttttttgttttttttgcacaatatcgattgtttgaaccttcaaaattcatgatagaactcccggggtttttcctttttatttttatttttttactctcaaaataagaaaatcatagtccgacgactccatttaaaagacttaaaaaaaattatggtcaaaatatgaatattttatatagatacttaatgcagaagctatagttgcactttttcctcgacaagactcttgtctcttcaataaaaaatgcgttggtttagttttatactgtatttagtaagtatatatgcttttccccacggcccacactcatgcattgatacataccactttattggtctccagactaatctggttatatgtgcccatcattaattcaaattcattaacttacgtaagaataccacccttacaaaacaacttaaaaaaaaaaacttgaatcaacatttaattaaaatttgacaaacatcgttataaattttatataactattacttagttaatttgaaaaatccgttgcttaatagttaataattaatcaaaaacacattgatttactacatattctttttatgccctcggtttggtatcttgatatatcaagcggcttgtaacttgaattcagaatctacgttttcaatgttgtttcctatgatggtcaagtggccgctacttgatttcagaatctacgttctatgatggtgaagatattgaaatgaatgttggaatttcttttattaaatttttagttggtatgactgattagccatacaaaataattaggttgcagccacttattttaacttgtataaaaaataagtgatactactaatttaaatcacctattattactttttttttatgggcacaaaatcacctattattactaattgatacttttattgatttatttaatattattcaatcaatttggtgtaaatctatattaatttccgctaacatcatcctagtactggagaaacttgatttcgtatctacagcctttctagaacaatttttatccaaaacttaaatttgtttacgttcattttccttgttccaaataaataattttctttttttgacattatgcctttgttgaagtaatgcatgtcacatacagtacaagaaaacacgagtttcagacttcagtgtaaaacaggattacatgtattgtaagcgaaaataattaacatcaagtagtcaaaatattttacactatgtaatgttaatgatgtgtaagattagcaagacttacacgttcgcggaaagtaatctaaattatatatttccattaacaaaaggtaatctagctagaattcttaattgactttgatagctagttcttgtataaacaataattcttttctcgttgatatttatatcaaagtggttatcatctatctaaaaatctatacataagaattagaatatccttaaaaattctaccagtaactttcaatagagagttatcaaatatgaatcatgattacatcagtgtttattacacacatatttacacgtaacacataattagtttcatggtcatcgttaattactctgacgataatgtaaactaaaaccgggtggatttaaccggacccatttgccatcactctccataaatcctaaccgtccatctaatcaagcgtagatctaacggtggatatcaaatcaaaggttaattccctccctatatatattagaaaattgatcctgaagcgtgtaccgtacacacatccccatacgaacactcacaatcgttaaaaagaaagaagagaagagagagaaagcttaaatcggaaaaaatggtttcgtggatgatgacaaccaaggcggtgctaatctcaagcggcgtcgccaccgtggctctgttactgaaactctctgttccggtagctgttgatttctccgtgtcacgagctccgatcttgtggagctccttgttgtcatggctgaaaccaccgtatctttacgttgttaccaacggaattatcatcactatcgttgcttcttctaagtattaccgaagtcaccatgaccgtgatgaagaagatgagatcgtcgtgtacggtggtggaggttataagatccagacggaggagccgattgtgaatcaacatcaagctt

SEQ ID NO: 104 - DNA, 84432 bp, Arabidopsis thaliana
aagcttggccatgtttctcttaatctgtagtgaaatttagacagataagcagctgaaaaaaagagtacgaagaactggatcgtcatagatggcttaagcagcaattgtatatgattttccctcgaataggctgcataaattggaatctaagtacgataacatggttaaaacccatgaaagcctatggtatatatacatccttctgatataataatgtgacggatcatgagtatccaatattcgatataagtgtggtatcttacctgaagtttctcaagtgttcttgccaatgatgagaaaatccacagaataaagcaagcatccagtaatgccacgggaataaccaaaactatcatcgtctttcccgaaaagtcattgatgtttcccaaatgctcaaccaactcaagagcctctgttgcaacaaaatatatgactccaagtagaagtatcctcgaggttataccaccaagggtaggctttacaacaccataacccatagagactaccagaagaagaagcctagaaagcgtcttctttatagaagaaaaggtcaccgcccatagggtaacatccattggcctcatcccagtggagttaaaattaacatactcaaagtatcgaacagccatttcacacataccaagagcaataaccaaagtgatatgataatgcaactgaattatatccttccaaaactgaacaaacctcacaaaccaaactagaccaagcaaaatatacgctaacgacataaagccaaaaacgttcattaaaggagcaacctttccaggtaaataaccatcagggttcttccaaactgttctccccttgatcctagtaccatccaattccgggtcacatatcatgaaataaagataatacatcccagtcttattgataaccacagtttcaggggacatgttaacttcagtcttattccctttaaagaatgtcttgatctgtcttggccactcaacatcattagactctctcttaatgataacttccccaagactacaagatccagtatcagctagctccggcgtgcaacaaatcacttcggatttgagaaaagtaccaccgattctatcacggtcttttacctcaagtataattgcttccactaatcctgaagttgactgcattgcattctgtttactagcagattcctttgtcctcacaaatgttacatcatcaaacctaaaaggaacaaactttgaatcagtacgattccaaatgcacaaactttgaattatgaagctgattcagaaagagtgaaactgaccttataaaggacttgcctttaaaagaattatcagaagaagaagaagagtttagatcttgagatttggaagcgtaaagaccttcgctaccaccatggaagaagcgagcattgaattttgcagtgaacttttcgttgttgtactcatgaatcgagccttccgtagctccgatcaagcttccgatgagcaaaaccccgatcgcccaaaaccctaaagaacgattcttcatcgaaatatccgatctgattctagaaattgatcattcagagatgaagaaagcagaagatgctcgtcgaagatttttgttgggttcattcacctgtaacagacacgattactacttaaaaagacgagcattgatcatataccaaaatagtcacaaattaatttaatttatttatttttctttatgtactattaataaaaataaaacgaaattgatgtttttaaaatttatctttagtattatacaaatttttcgtaaaaatatcatttatcaattaaactttaacataatatgaaatatataaacaaaataatgtaatttaagttttgaattatctaataatatatctactaaataaatgtataacattattatctcgagggctatatatagtaaatgtagttcatcataaatttgaattatgtcacgtaactataattattatcaaatttcttaaactttagatattaacataaatctagcaaaaaaaatccttagaaccaaaaacctcaaattttaacatagccaaaatcatgatttaatatcatcataaaatttttactatataataccacagtgattaaaccttgagacagattcttcatctctcgtgtccaccacaaatgtgaactgttttgtgatggaagatcttccgatgctgtggtgagcatagacaaaatatatgactccaaaaagaattcaatttgtatcaaaatctcctatacactcataacactttatccgatttgaagatcaccaactgattcttttatctcgtttacttaaaactatgtaaattaaaaaatttacaataggttgtgcctataaatatattatttttaattaaaaagtttggttaacataaaaaatgttaggttatctaatttcaactacctttatatcatttaagaattttaaatatattctagaatcaattggtgaaatgactataaattcaaataaaactggtgaaaacatgtttactaaaataatttgatcaacgatatacatgtgatattcaacactgaaaattccaaaaatgttactaaaatcgcatataactaacatatatcacactctgacgcgtattgacatctgtgatatcagaataattggtggtttgaaattgacccgtgttcttttttttctatgcaaaatttttatattttttccttatgactatttatattttattttatcatttattgaatatgtataaataaataaattacgtttttatttcggaaaaaaatataataacttctgatctttgtgtaaaaaagttaaacatcatttattttggtacaaatgggagtatttattttacccgaaatatctacctgattttttttttttttaaacttcttgtgtaaaaatgagtgaaagttttaaataggtatttcagtgctagaattttataatccgtcagttgtgtttaggttaacagctgtgattgcctgtttggtaacaaatgcagctttgagcttccattcaaagaataattctatgtcaatgattatgctagaggataatgattaaacgaaaacatcattcctcaaaaattaaagcaaaagttaaacaaatatctaaagtactctatattccctctatataaagaaaagaaaaataattgacaagtgacaaaattgattactttatggaccccataatttatacaaagttccaaaattttcctcccttctttccagattttacacatatctcccgacactttccacggtttcccaaacaaccccgaacaaaaaggtaaaagaagaaagaaaaaaacacattttttgttcaagtttcaaagagacaagtttgagttttgaatcttacacaaccccaaaaaaaaaaaaactcattcatctcttgagctgaatatccatcttgcttttttctaacttctccattatagatcctacaaataaaaacatacaattattactacaaaaatattctgttcaagatcatatatatgttaccaataaataaaacacttggcattaaacactaaaacgttttgaggaacaaactttgactcaccaggaggataacaaacaggaggatcttcaaagagagaacgagagatttgtttatgagcaacaccgatatcgaagagaacaagtccagaagaaggatcattcactgcaatgcctttaacaggtaaccaaagaaaaagctcttcttgtgttaaaccttcaagtccaacaagcccaccatagcttaaatttgctttaatcacacgatcaaaatatactctgttttcgaaccgagcgaaacaaggattttgtagctgaacttcgagctctcctgtcttatcatctagactataactctccacgttgtctggaaacaaaccacctggtaaaccgcgagcttcgaggaggtttcgaatggaagattgcgaagatggagtaatgaatgggacaagaagaagaagaagaagaagcatagacatattttctttttttacgtgtgatggtgagatttgtgtttttgaagggtttaatgtttggtgctctgtttttgtcaaaagagtggagaaatgagttgtcttttttagcatatgagctggttagcaatgagttgtgttttgtgaaaaattgtgattatttcaaatatacatatatttaaataatttttgtaccatgttaatgatttgaaaaacaatccacttaatttttaataatattattatctgtatagtctcactatttgaatttgtagtcttttgccttaagtaaagccatgttgaactaattgacgttgtaacatccgcaaatcacggtttgtttccgggaaacattataatggaatatcattttcttaaaacataaattagtggatccaaagtaccaatcatggttaagtgtatcacacattattgtttttatctcttttttctaccttattttagtttacacttaaaacataaattaattgattttaaatactaatcaagataaagattgcaaaaattttacttatctaaaaaaaatccagactcattccaatagtaactcattaattgtattgaatttataaatgttgttgttgattatcatgattcatggacagtgtaaacttctcaccaaatttcgcctactgattttgattagtatgctaatgaatagtttcgttacttctttttaaaaggtttcgttaagtcagtcttccatttagacgttattcttttgtcttgtctgaaaaatggtacaaggaacttgggctgtgggatcaaaaaaggaacccaaacggaactgaaaatgacacagtttctatattgaaatatgaagtacagaaattacataaaataaatatttaaaaattattttgatttccaactaaagcttgtaatacttcctctgttttaaattaagtgatgttttagaagaaaaaattatttcaaattaaacgatatttaattttattttaattggtgtgccaaaacatcaaataaaataatgaaacagagagaacatctgagagttaaaatgatccgacattactccacattttaattcattcactagcagaattattattttcagttttaaataaatgacatagaatttaaattaaattatagcataaaactctttttctaataatttaattgcaagttttgcacacatgtatatgtgattttttttctcgccctccaaattttttaattatccaagcaaatacaaaatcaaatatcattataaccacaactcatcgatcaagtgatgatttagcggcctcttcagactattgctgaaaatgcaacaaaagaatggtgaggtataatttacaacaaactcactatatataacttcagagcatacttcagagatgcactacattgccttatccattagtattaaccacctaacttttcttcatcgggtgaatggattatggacttgtgatgttgtaatatatttcgataatgagatgtgtggtgagaagtaatagatcttgcagccaatagattctcagtttaatatatttattttggatgaaatataccagtctgaattttttacgcagaaaaaatagatctccatattcatgggatgcgcaaaatgtaaagaccaaaagtgttgagtgtgatagcatatggcaaggagacattaaagatggggttgttatggaaaatggctctagacttagtggatgtgagtcatccaaaccttgagccaacaatggattgccgaagttctgcaaaaacaatgaaaacatatcgctaataacactaaaatgtatttaacattacatgtttgtttgtattttaaaaaaagtagtggtaaaattcattgcttatttgtaaagtttatataaatttgaatgaaatataaaactatttacatttagaattctttgacgatataataaaccatttcttttagaaaaaaaaaactttttttaacacacaaaaaaatgataccagtccggaataatggcttcctaaaatttatattagtttatgaactatatagtagcaatgttaaatcaatcttgctttctccctaaaactttgtacgacgatgaacatttttcatttatataagcttattaagtatcgtttttgggtagctctgtaaataaaaaagtgtgttaaaaataaaactttggaaaatatctaaaacctataaaagtaaaatatctccatttcctcagttctatacaaaaatcaatatatacataaacaaaaccgtatgatgatcattatgagaatcaagaattaatgcacatataacgttttcttaattgaattgtagaacttcaacagtcaacaccaacaaaaagttatttattatctcataaagactatactatctaaataaatagaaaaatctcaatttataaaacgttactcaaggtcctcaagtgcttcattataagtgcttcgttaaggttctcaatttgatatcattctacaacttctcaaattttcactttaagcacgatttctcttttcaatgctcttttgattttgcggtgaggccaacgcaacaaccccattttcctgcgaagtttattttaccacaaagattcatttttttttttgcatcttctttagaaagaggaaagtgtataagtgtagttcttctcgttttatccacacgatcctctttctaaaaaattaaaaaagttgcaaaaataaatcttttcatacgtggcaaagaaaattttgtaggaaagaaggtttattatgttggcctcatcgtaagatgaagagcattcaaaagtagaaaaatgtttgcccatgcagttgcatgcaagccttgcattggacctttaacaatctttaacgtttgcagttcaaaacgtcgatgttgttcaagaaggttttatgatactatagatgattttacaagaaaaacactaagagcttatagcaaattagcaactaaccaatagataatatatatctttcctacgaacctttgtaatctttctatcgttcaaggtgaatcagaagcagccggttcttgtctttgtcttctttgttcaggaggcagaccatctatttttgtctctcatacttcttaatctggtatttcgagtttcttactcttattctatatcagctaacacagattcaaatatgttcttttttaaaaaaaaacaggcttaagattcaagaatctcaaagagcattatcaagtcaagacaagtgaagcaagatgttctagtaatttgagtggatcccaataaaaattcattggatacacatgtataattcaatatgaatttgatcaaatttgaaactgaatgtgaagatttcaaccttatttgaacccttagaaataatcatccttaacttaagtgtatgtgctgaatatgaatctgagtaaacgaaacaaattcgataatcaatagaaatcaaattaggtataaacttcaaaaggtccgacaaccgacgtcgcaaattatttatcctgatgagtacatttttttttttggtcaaactactgatgaatacataaaattcaaaagctgtataaaacgacttagtcaattatcgtgggcttcgtgtttttgatgggccgagataagaaacaagaaacatttatagtccagtccactctagatatttatgagttttcttacacaagttacaaattacaatatgaagttatgaaccgaacaaaaccagaatttagtgccttagagcaccattattggttgtctcttagattaattcttaggattttttttttgtaattgattgcaaagaacatctcattcttagcctaagaactaatttaagagttaaccaataatgatgctcttactggcatagtgcaatcaaataaattgaacaaaagaaatctaaagtcatgtgaatttgaacacgaaatttcaaaatagaaacaacaattatatgattaaactgaagatgtatcacaaatcttcttcttctcctctatgctaatattagataagatgttttacaaatttctgtgtttattttactcaaataaatctcttgaacttaaacaccaaatgaatcatatgtgttgtaaccaaatgaatcatattcatatcttttaacttaaacacaaatttcatacacttcaacttttttatacatttaaactaaaataattttcaaaaattgaattctttaagaactctaacttaagagtctgtctagcattggacacataaaaaaattaaaatcattacacaacctcttaagtataaaattttcaaaattaatattaaaaaattcattagagcttctactaaaaaaatattgttggagatggtctaatagtttgtctaaaaatagcacaattctagtagactccacatgcatgcataacccaaatcaggatctccagctttgcgagaagctcgttcacaaatccagctcattcctgatgtcacttcacaaatgtaatacacaaacttcaaccgagtaaaatgttaactcatattgttttcattacattttaaaatcagtgcctaaaaagtaagaaatagaacgagtcaaattgtattagtttttggcaacttataccggaattgacttacaacttacaagtgggaccatggagactaccacaccccgaagactctaaaacccattgacgttgtttattcatttcttctctcgaaaccttcttagaagtctgcgaaattatgatgattgctttctctactaaaacgaaaattacggagaaaatctataacaaatgaaaattaaataagtaatagagattctcaagtttaccgaatttcggcctgatgcaatcaagcatacttatctcatttcgcatctcattaaaaataatttatttgtttttagtcatagactacaagtgaaatatattgcggcaacaaaaataataattattaatgttgactacgtgttgttcttacgaatataggaaaaaaaagacataaagtttaattatagtacaatttactatgtctataaagtgaacaaaaaaagatactagtactgtatagtttatacacggttttattaattactgtataacatttaaacagattttgtaaaatgttcttacaattaatataggggcaatatataatcttattttaaaaatgatgaagatgattacaatttattatcaatgttgtagtctatcagagcttgtaaccttcttatactagtgtgaaggtgatgagttgcggatgcaaaatagctcaagaagaataatgactgcattttcgtatagagttttaaacatataactgtattttaggaacgtaggatatttttgcataacaaaggttagagaaagtgatttatatatgtttaaagaaaaaacaaaggttagtgaaatgttattattttattcaagttttattagtgtatgtaatttgacttaaataacatgctctattataaaacaacaatatttgcaaactatattctttttagttgcaaatgttatatccaagtatagcaagagatcgctctctctttatatctcaactattacttcaaaaactataggcataatcttcgattagaataaattatttttgatctttcaaatgatcctgggttttactactaactttgaattttattcatatttattagaatttttcggaaaacaaaaagaacaaatgaaaatgacaaaactagagtaaaagcgtggggcggctcttgtcgtgttcttggcacgatatctagaagagtcgtattgatcttgagttctgcgttgacctttaattgtaatcaagaaaataaattgaataagagataaactaggagtcaactttacctaaaaaaaaagtaaaacttataagaagactactacttttcactggtcaaccactaatcagtagtacataaaccaaaattttagcgtgtcaaatgattacagttttttgtttaaattactttctcagaagacaattagaagtttataagtactttttcaactatcaccagtttcacatgttttagccaaataaaaaatcattacatgtttataagttcatgaaccataaaatactgttccatatttagatgttatataatttgtagaatgtctacaaaacaaatgtgacttattacatgtgaataattccatattttctcagtcccaattaattctcagtttttacctaatcatatgtagttctcttggtgtctatgagagttctcaaaagtagtgcgcctcaaggtcacgtattcaaattttgatataggaaacatgactaatttacatatttttgtgtttggcgtccaagaaattgtgtgtcaagtttataacattttgggttcataaaaaacattagtttgatcgaccacagtattctggacaccacctactaagagtctgaccatgcttagtttttagccagttgtattgataatgtgtggtaccggtagaaccaattgcataatgatgatcggggacttcatgtaaatatttttcatgtagacggttcttggaacggtgctgtcccaaaattcgttttgctccacgaattcgtgataaaaataaccaagcaaaattacaaacacagaaacttaaaatcttacctttattgccaaatttgtttttatcagttagatgattgcatgaattgtgaacaaaaaaaaacatacaagtaaaatctaaaatgtaacaactccttaatttcaccatgacaaaataacttatattgatcgtaaatggacacaaattaatatataacatatatgaatcaaaagattcagctaagagtatataacatatttgtaacttttagttagctagttgtataataatactataatagatataagttaagtaattatatgtcacatgtaaattaatatatctatatgaaaaataagaagtagcaaatcatacacaatccattttataaatatttgaattcgatgtaaattcaggtttcaacagaaaaacaagatgcaaagtatagatgtacacaccttatgactatgtcattgtcatgtcatcaaacactctacaaatgttgtgatattacatttgcgacatctattatgagaatgagtggcatgtaataaattttaaattgataaattaccaaagaaaccataagaacattatgttgattttgtcatataaactgtaattaattaagcgaataattaaactgaccgtaaatcataattaataaccataacttaagataggagtggactaattaaagcgcttttcttttgaccgtcattgctacaaggaatacaatttcgtttctttattcatggagctcactaccccacgtgtctgtcacggccatgatgattttttccgatcgtatcatcatcgttctgtaatcgtgcaaaaaaaaaaagcttcgtttttgtagttttctgcatttcatccttacgtcagtatgacatatatcctacatagtatgagataatgagatatataatattacgatcaataaaaatttgatagataaataaaaatagaaatacaactgatatgtaaaatcggatgtagaaatggcatgtcatgagagaaatatgcgttacgcttgtattcttcgactgttattcttcagtgactttcatttcaaccaataaaaataaaacaaaacattatttgtgttctaatatcttttgcatgttaaaagcctcataataatattttatagtttatgtatgagatagcaaattatctgtataattgacaattaatggttcgaagtttttatccgcaccatcactaaaaaattacgtaactatacaagttttaacacatctcgccatgatatacactctttagtaacagtattaattgaattccaatattacttgggtttttttgttggtttatatatatcaatatatcgaatatttatatcaattttaatgattatagtatattttaatatgaggtattccttttaaatttcgatatgtttagtttgtttaaaaaattaaggctgagtttgttgcaaaagagattagtacgtatgttgttgacataatttgttatatgggacattttgagaatttgattcatataatactaggactctttttagataacttaattatttattagttttcgaacttatgtgaactacatgaaaataataattacatatgagctcccgtgagtcccaaaaacagcattacgttacttacgtgtaaaaagaatgttatcataaacataaaaacaaagaaacatgtgcttttccaaatacaaaacaaaaaattgttaggacatatgatgatttgattttggggtttgaagaaaagaatgagtcgctgacacttatccgactatctgcgccaaacaaagtctccactcatatttgccgtgtgggtcctattttttgactacttgtcgttttccttcacctactttaaattttatacatgttcatattgcttctaatcgtatatacgtgtctatatcactttatatacgtatatagcaatacgtattttggagcaattcttcgtcaactaagtttttttcatacaacgagtgcatgaatctcattgttcgtgatcaagttttactccaacatccgaaagtgttcgtatacttgcattgtgaaaagcggtatatttcaaaactagtcgttgattcaactatatatgttgccaccatgaatatactaaacagaaaatggaagaaagctgaataagattggggactataaaatttagcatatgtgtccgataataataaaatccaaatatcgaccgacaagagcttagaggagtgtcggtgtacatatcgatgggatcgaccagaccgttagagaaaacaaccgatgggctgacaaagattcttcggatttaacttatgttgtcatacggtggctgtgacacattcttttgacgttcatttcataacttttattttatcgatatcaacctaaacgaaacaagtgttttcataaataaataaaaagttagtcacgttgcaataatgaattattatttttttcatttttggcggagtggactggtgggcttaagcaaattgatcaaatttgttttgacactttcttagtttatattaaaattaattttaattgcacgatgaaaacttactagtcagtcgcatggatctgacctaactgtctctgtatttcagtgcttcaaagctcttttaagttttaagtcaaaatgcattgtgtcgcatagagagaccattaagaaaaaaattcaattagttcttaattaatattttaataataattagataaattggggcctttatagtcttcatttgtcctcaatagccattatccaataaaatattaccagtttcatttgatatttttgtgtcatatttttaccatttaagacttttcacaattcgaatagccatgaacaataaaaatctacgagtttcatttgatatttttttttttttgccgaatacatttaagactttcacttctactaaccatgaacaatggtctcccaattacaaaatatatttttgaatcattggactaccataaatgattagtgtcttttttgtattacatgtaacgtaaaaataccattcttcaagcattcataacaattttttttttgtcaagatacataacgtaaatttgaatttcgtaataacgatactagcacaatttagcttagaatatgtccaatttttttttttattttgaaaggagatagatatataaatattatatacatggatatcggtgaaattatgtttattatctatgcctatcgtttgataaaacttgtatattttatggacggtgacacagcccggttcactatgcctcgagccgtataatgatcataaagaacagaactggttactattatcaggttcaacaaatccattttttgatattttgtgtggctatcagtctatcacataaaatggaaaaagaattaagagaaagaagaaaaacaaaacaatgacttgtaattaaagtgcaataattgattgacttatcaaatttattagaagaataaaatatttacggaatttagaaaaagctagttgaaaagaataaggaccgtttggtataaagagattgtgaaaaaagtcacaaacacaataggtccagaaacggtgacgtgacacacagatcgaaactcagcatcgatcgacgatcgtcatcatataccatttatccctttagcctcaagccacaagaacaaatcttattttatagtactatttttaaccgaaagaatccgatcgacaatgaaataaatatcgaactcatatcaagtgctaactctaggttttgccattaattttgcgttttccaatcgagctaaaaacaattgatcgtctattaaaaaaataaaaattcctatgatcgctttttcgatctaaaactaatttttagtaatagtaatacctgttaaagtataaatatccctcccaagtactgaaaactcaaacctgaacgagctagcctaggactcaacttttatctcgaaagaatctttgaatattacttttgaaaataagtgagtctaatccttgaagatatatgttttaaagttttttttagcaaatgcgattgagaaaacatatattttaacttcaagataatcattactgtatgaaagtatggataattaattagaagaaacgttgttcaaaaattggttagtcgtttataattaccaaaataataaaacaattattaatacgcttgcatagactaattagtttttttttttcctaagcttactaaagtgatctgataaaaatcatgtatggaagcatgaaagtaataaaaaaatatcaagtttcaaaattttagtctttcatatttatgtacatttatatatatacgcatgcgtagactataatcagtcattttcgtgttttgtctatacaattactaaaaactgatttaatcaaaatcgtgatatgttttctatttctgaccacttaatataaacgatcgatttgtagaatttgatggcaaccaatcaaaggttaccgttagatataatgtctatatataaatagtatccccttttggcatcttgcataatagtaccaaacacctatctaatctcaaattaaatatttaaatatttataaaatgaggatcattatcacttcttcgaaaagctaagcagcaaagaaacaaatctcacaaagacagttgttcttataataatagaagaaaattgagggattaggaacactattattacaacatctttctgtcaaataaaatatttagcttaaggaaaaaatttaaaatcaagattatttaattaaaaaaatcacataggaatgttatgatgatataagtttttgtcttcaaatgtcaactaaattccggtaatttccacacacttgtccgtacttgcctatataaacatacacaccctcataaacatatatcaaaattttacacttatgctcttcatatcacatacaacaaactcatatatataaaaactttaaccttcgtatagcaacgatctagtagaaagcttatactaaaactttctgattctcttaatatggcggaggagtttaaagctacggcatcgatttgtggtggcggaggtggcgcgtggtggaactcgccaaggagcgttatgtctccttcggatcatttcttgtcaccatgcttcggagcggctatcacttccaatgattttagctcgcaagagaatcatctcaaatctaggatgacttgtacggacaacaacaacatcgttttcgggcagcgagaggcggattctgacagtggaggaagtaccgtgacgatggactcgacgttgcagatgatgggtctagggttttcctcaaattgttcttcagattggaaccaaaccattttgtaaacttcttaaagaaaaaccctaacttaattttttttgttcactttcttgatgaacaagattgaagatttttaataataatcatgagatctcttttgttcttgttttgtatttttcagacaagaagacttaaactcaagcttcataaggagctcacaagatcaagatcatggccaaggattcttatccacaactacttcaccttatatacttaatccagcttgttcttcatctccatcaacttcttcgtcctcaagcttgatacgaaccttttacgatcccgaaccaagtccatacaactttgtctccaccacaagtggttcaatcaacgatcctcaactttcttgggctaataagacaaatcctcatcatcaagtagcttatggactaattaacagcttctctaacaacgcaaactctcgacccttttggaattcttcatcaaccactaacttaaacaacacgacgccgagcaattttgtaaccactccgcagataatatctactcgtttggaggacaaaaccaaggtaaattatctcatatatgtcaaaataattttgctactatataagttttgtggctatattattgaatttatttatttatttatttttgttgagaagaatctgaagacaagagctcagagtgagtctttgaagagagcaaaggataatgaatctgcggcgaagaaaccgagagtcaccacgccttcaccgttgccaactttcaaggtacatgatcatatttcaagatttgtttaagaccttttattttaattcaatttcttggtggataaaatggattgtatatgtaacaggtgagaaaagagaatctaagggaccagataacttcattacaacaactagtttcacctttcggaaaggtgaatgatttatgtgtttactttattttatatggcttaatatatacaaccaaaagcatttattttcccttggttatgtattgagcttcttagtttgtttattttgtatatctttgggttaaacttcagacagatactgcatctgttctccaagaagctatagagtacatcaagttccttcacgaccaagtcactgtacgtttcttgtgatttctctcctaactcactgaattcataaaaccctagaaatgagcaaatttttaagcatattaatgttttttaaatacaggttctaagcactccatacatgaaacaaggtgcctcgaaccaacaacaacagcaggttcaatacacgatctagtgttttagttttgtccaagttggagtcttcgtgctataatcatggttaaataagtactaatttcagtatggattcatgtagatatctggtaaatcgaagagtcaagatgaaaatgagaatcacgaactaagaggacatggtctatgtctcgtcccaatatcaagcacgtttccggtggctaacgaaacaacagccgatttttggacaccaacgtttgggggcaacaatttcaggtagagaaggtgaattacgtatatcatacggttcttaattagcattaagatattatttaataatgcttagcataaaaataaaagaaaataaaattcacaagtcatgatcaaagattgaatcattacttggagaaaaagtagagatgggagaagaagaaggtgactcttcaaaggtgggcagaggcaacaatagtgttggaggggaccaactacgaaagcaagaatgatttagggcttagaaaatttgggataataatctatcataaactaatagatagatatatttttaaaaacattaacttacatactctcatgttatatatgtaataattaacctaaatttcactttttaattatatataggtgattaaagagagagggttgtggttgtcaagacggatgggaacatatgctaaattcagcttggagactctaaagcataacaataatttttaatgtattttcttcttctttcaatattttaaggggggtttattgctgaatttagcatatatgggttgtttttatgttgaataaccttttgttcctgtcattgttcttgaatatatatatatacatatttttgtcgttggtaacatctttgttaatcacttattaaagttagagaacataataattggtggtttgtcatatgaagttctttgttgtttttatagagttgtttttttcatgtttaatcataaattttaattttaacaatcacaaaaccaacacttataacctaattgtttgtgatagtgccgttactcttacatagttacatttatgtccaaacttgcaaacttgcacattttctggatacatgcatgtatttatgttcgtacatatccatgtataaatatgtgtccatatggattcaactttttgttggttcgattaagaactatatattatggaaattcagtagtggaagccagtagaatagcggcccacactgcttcctactttatgatttgaatatacatatatgattttagtatagataccgataaatatatactgatttgcattcaacatcatttatgtttacagaaaaaagattattcatatgttactataaagacatatatgtgtgtctaatctatcaaatgccactcaaaaatatatgcaatgcaagaacagaattcttaccttagatctcaatatcgataaaatactcaacaagtcccatgcatgattagtacgtatttattattaaaaaacaaaatctcaaattatgccctattggaaattaatgttggttttctccaaagtacaaacaaattaaaagaacatagcatggagtcaggattcaagattctaaaaagtgaaaatggagttaaggtcgaaagtgaacgtatggaacggtgaatctacacattcaaatatggttctcggaaccataaattaaagaagtactaggcttgattaccacaacatgtctctggccattggaaagagatcattccgcgactaaaggagaaccggcaaatgtttgtttatgaatgtttttcatgttgcaactaagattatcgtcgttgatagagagaagttaagatttggttgcaactcatattcggctatatcctttgtctcaggatcaacaaaagttaccgtcctacgtagattttttggattcatgaggtgcttcggctcttgtcattggtttaatatgtaacttggattcatgtaaatttaagttgctaagtttgtgaatctagtgacatcggtccctcttctagtcttcttaaatcttaaccaataaattacagaaaatggtcgattacaactatatatgtggtggctcatataaatttttcgtacctaacaaataacaatcttcgacataaacaacatataactagtctaaaatattggatattatatgagaaagatagcataaacttgagtacatttcaaatcaaatttaacttctacctgaaaattcgattcactagtttcaactgtagatcgattagaatcaatgttgtaatagagtttgacaaaatatgccatgcgccaaaagaaaggaggatcatgtataatgtaatatgaatataaaaggcaaaagaaaacattatgagcataaatttttagtcttttagatgtacaataaaggacgaacaagtttcatcttttttgctttatgtgaatacaacaagttcttaatatcttcagctataagcttcgtttgattgaagcttaaaagccttattcctttttctataaataaatcacattgattctaatattgtttaagtttccgagtatcacaaagacacacggcttattttcctccaaagagtttatatattctctactatcatgaatcaaaatatatccgttttatattgatatcctttatatattgatatcatttacagattttcttttgaaaatcttttacgtgaaggtttttttccataaaacattcgaatgaaattgctcatatagtttatgaagtttgttaattgttcccaatatatttagaatcacagaagtaacctttaaattgtgacatagtgttacaaagataacattggtaaaattactttatttttggctttttttttatatgaacggtaaaataaaattatctatttaaactagaactgtacggttttctttggaaaaaaatcagtccaaaataaaagagcttacatgaaaaagataaaacctcgtgctattgccttttttgcaagacaatcagcacgtatattgtttataagagtcctctttttaaatgctagtcatcatgcatgggattaactatatatcaactttctcttatgttacatcatttttaggtgtattagaaggaatacaaatcagaagaagatacttgggagccgtatgatggattggggtaaggttttttaaattactgctttggccttctcatgttgtcctctaatctgtatatggtttcattagaaaatacaaataaaaacttaaggaattcgtaacgaagggtttcaagtcaaatttattgccacttcttgtaagctaagtcatgttaattacacatgtaaatcctccaaatatttcttgttccccacttttcgtaacttttcgaccttgtgtcgttcttttaggaatatgtgcatcttgtatgtgggggtcttccatgccagggacttagtggttttacaccgatttagaaataaagataaaccacttcaagatgaaaaaaaacaatgaagtgacggtttcatgaatatcatagactatacttgaagcccaaatacgtcttgatggagaacgttgtaaatcttttaggtttcatggaaagatttgttggtcgttatgttgtagctcgtcttgtaaacaagaattaccaagcaagatgaggcataatggctgctggtgcatacaatgttcctcaatgtaggtacatggtgtattagtatcggtagattaaggatcccaaatcaattcatgaagaggaaatgaggactaagggaagaaaggctagagtttgggagaagatgaagattgtggaaagtggcatgttgttgctgttccagtcgggattgccttaggatacatgtttgggatggcgagtcaaaggttgtgtgatgataaacctgtcatagactaccctttcatgtatccctgaatgtcttaagagaaaggtagattctgatagattaaagatcccaattcagttcatgaaaaggaaattgaggactaaggggagaaagccgagagtctgtgagaagaagaaaattatggaaagtggctaagtgtcgagtaaaggagtattgaagaaacctcttcctgagctagaggattttttcttcttattatcttcctttagaggattccaaaacaactgttgtgatctcatctcttaataacttcttcattgtttatcttgctttgacttggatttatattaggatttaggactgtttattttttttcttttaaatgatttcattaataactctaaattatctgctaggtttcatgatactatggggatcctcagcttttgttagataggtttgaggaacttagtgaagaaagtacacatcttgaattatgggtggatactaagaattaaattatgaatttcgtatttattagattagttgctgaggacgaattattgttggagtgactaatacttgacgaaatcttgatgcactctattctttcctttttatttgctctacttcaacatgaagactaaaactatcaaaagagagtttagatccatggaaatatggaatggatgtatttagggatggtagagtgtacaccaagctagggcatgtgcagaacctaacctaaagcttaggcagcaactgttttaagattttacaaccaatttttttttaaatagatcatgggatcataggggccagagagtgattgcgcctatctacccgaactattaacatcagataaatcaatcgtgtctctccatcttttgcaattaccatattctcttttaaggtttttttttttttgtttaactggtcaagttacttattactctatctgttattttttaattgattttctagaaaaacacacaaacacatattaaaactaattataaatatattagtttttgtgatgtagatttttttataattctaaaccaataattatttgtcttaaagtttaaaattcatcaataataactaaaaatagtgtctagaaaacttaaaaatcaactttttaaaaacaattttttttctaaaaaatcaaataataatgaatagagggagtatcgaccaaaattaaattttgttattataaaaatgtgaaattattttttcacaacaaattatttagcactttcagttgggaaaatggacacaaaaacaattgataatttctttacggaaagataagtatgttttcatataaaataaataagtcaaaataattaaataaataattcgaaattagtgaattacctctgtgaaaactatggaaaagtagaattttccatatatttttaatttctatctaccaagctttttatttcaaaaacattcatccaattaataaaataaattgaaatgtcaaagtgaatccaataaacgaataagccgacaaataaaattttagcgtgaagcccacgaggttttttttatgggccccacttttctccgcaccaaatcactgacttctctttctccgtatctttcttcagctcctaaaacccagaaccttctttttccggcgagggaagagcttcctcagccctaatcgctaaatcgatgaaattatgctcccaacgtttaacggtttaaagatcattccaaaaactcaaccttttgcgtgtctcctctcgccatgaccctaatctcaaggttcgtctctaatctcatattcagggtctctcgtgaatctctaatccgattaattttgattgcccttttagccggagattgcttaaattgattgctatgtttaaaaattgaacctttgtttataaagttttgaacttttctccaaagtcttcgtttgattagatcttcattgggtgggtttggttttggtttcttttgcagatttttgatctctagagtgattagtagaactctgttttcgaatcagaataatagaacagctattaatgtttctgtaaagttgccacaattcagaattcagagtaatggatatcacacattgggtcttcttcataatgttaaaggaaggtttttaggtagtaatcatcatcagcttgcgcgtaggagctattcgattgcagttgcgagtaatgtagttaagcaacatgctcaagtctcttggggaaggcttgtacagagagtaactctgagtcgtagttggaacttacctcggataagtcagattgctcaagcgtgtagcttgtctttagcccgttcgcacttcttgttacctggtttattggctcttacctatagacaagtggcgtatgcgcaaagggtggttccaaatcctgtggtctattctccttcacacatttctccttataggagttcgataaacttccctatcgttctctcgtctttagtgttttctgcggtcaagggtgttgttctgatcgggagagctctttatttagcaattttgttttctccaaatgttattatggcgttgttgggatttgcttgcgggcctcgttacagacagctgcagtatgaggtcctccatcgaactctggagaaagcaggtcctgcttttatcaaatttggtcaatggattgctacgcgacctgatcggtttaataaggatttgtgtttgcagctttcaaagcttcacagtaatgctcctgagcacagttttgcgttcaccaaaaagagcattgaaaatgcatttggtcgtaaactctctgagatatttgaggaatttgatgaggcgccagtggcatctgggagtatagctcaagtacaccgagcttccttgaagtttcagtatgcaggacaaaaggtgaagtcctcggaagttgctgtgaaagttagacatccttgtgttgaggaaacgatgaagcgagattttgtgataattaatttcgtggcgaggctaaccacttttattccggggttaaattggcttagattggacgagtgtgtgcaacagtttagtgtctacatgttgtcccaagttgatctctcaagggaagcttctcatttgagtcggtttatatataacttccgtggatggaaagatgtctcttttcctaagcccatctatcctctaatacatcccgctgttttagtcgagacgtatgagcacggagagagtgtggctcgttatgttgatggctccgaaggacaagaaaaacttaaggctaaagtagctcatatcggaactaatgctctcttgaaaatgctcctggttctgtctctttcttcacagtgtatctttttattcatttcggttacttatgtaacttatagttgctttgattcttgtttttcaggtcgacaacttcattcatgctgatatgcatcctgggaatattcttgtccggccaaacaatactagaagaggtctattcagatcgaggaagccacacatcgttttcctagatgtgggcatgactgcagaactttcaaaaactgaccgagataacctactcggatttttcaaggccgttgcacgtagagacggccggactgctgctgaacgaacacttaaattatctaaacaacagaattgtcctgatccacaggcctttatcaaggtaagatctctgctctgtgtttctcttacatcattcaaagtttcttcatttttgtagtgtttatacatacatacacacattttgacaggaagtagaagaagcatttacattctggggaacagaggaaggggatctagtccatccagcggattgtatgcacgaactattcgagaaaatgaggagtcatagagttaatatcgacggcaatgtgtccaccgtcatgtttacaacattagttctcgaggtgagtttaaatctcttatcatcccatagaaccacgaagaacactcgccttttggattattattgacctatgaactttagctagagttgattacatcagtattttagagccagtctcttgatggtttaaagtttgcttcaaatctaacaacactgaggtttgtgcttaactttccacgttttcagggttggcaacggaaactggatccaggatacgatgtgatgcgtacgctacaaacaatgctgctgaaaacggattggatgaaatcactttcttacacgatcgatggacttatggctccgtagattgaaaaggttcaatctttgattcttttacccatttaacacttgagagccacatttttgttttgttgccttaggatgtgaagaagaaccaaaacatatattttagagaaaaacaaaggaaaagtcctttactgttttgtcttcttcttatcttttgcttattctttgattattctttttgctagaaattggaattcttcatcattctaaaacagagaatttgtattttgggtatatatcagttttgaatttcctcgaagctcaaagaacaaccagtgataaattttctaaattcattcgacctataaatatctctccttcatttgaaaaaaaaatatactcaactgaacataacttgtttcatccacactagttacaatagagataaaaataaattttagacaaaaccctgaagaattaatgtcaaaaaacacattcaaccgttaaattgtaatgagctgaattttaataattttgcgcttggcagcaaaaaaaaaagaaaatagttatatgatctctaaaacgaatcgttgccaatgagccaaagccaacccaaacaaactccagcgaagatccctcccaatagaaacacacacatcaaattccctaatgcatttgcttccggtccctatacaaatttgatcgaaccaaattaacataaccgatcaaatattaaaccaaatcgaaccgaggttgagttttgtaaggagagaagtaacttacattgtagccctttggtgcagtgctgaagatacaaacggttaaataaccgttactcaatcccaagaaagaggtgaggaaaagcatccatccttgatctgcgtatttagcagtaaagtaaaaggccggaacgagcaaaagacgtgccacaacgcagaccgtgatccatttcctagactccattgctaacggtttgatcgagggaatgaacctcgatatcgcatcccacccgttgtacatggctactagaaccggtgcatacctttcaacacatcaaaacataaatggtaatttttatgtaaccaatatgagcatagaatggtttaaaaaaaaaatgttaatgttgcataccaatcgcccaatctatgttctcctgtgttctcgtaaagaaaccccgggaaaatcgatagcgtcaccacgtaaatcaaggaaagattgattccaagatctatgttttcccgtagtaactgcttcttggttagtttttggatcttggactcatccatttggtgaacctgttcagcttgctcttggaggccagctgcggcaagatccgctgaaacagttttggccccttctttcccagcttttgcgcggtagtacttcacgatagggagcttagcaaagactagtgtatatagaaagacacaggctaactcgatcaatgtcgctattcctatgaacaacactgcaaaaaaataaacaaacacataatgattaaaattagcttaacaaagataacactacaagcgcctataagaatttgtaggagaggcattacaagcgccttttcgaagaccatcaggcgaattgtcgaagattgctttagtaataagccttaataccgaggttagagctccagctatgcctaaaccggccatgaacgcctgacaaaataatcaaacattttaacaagtaacaacattaagttaaatggatattaccattgcaaaaatacaacaaagttttaacctggatgaagtcgggggacatgaaggataaatctccaaccattgcaccttgtacaaaagcatcagcgagaccgaaaagagcaacgatcaaacataacaacacatatgctactacgcttccactgccatgtgaagcaagatccaacttcaccaaaccgaatcaaatcaagtcaaaatcacaactttatatttataaaaccaacgttacaacagaaaaatgagagtacttacaatgatgagacaaaaggtaccagcggtataaaggctatacccaaaaatgttacgaagtcgagtattgagcttagcttctttagtagcaagtgttattataaacacattcgcaaccaattggtaaactattgtcagcaccctcgatggatggtatttctgttgttaaccaagtaaacatatcaaattaaactgatttatatatccactgaaacaatttgtcttaataccgaaaagttgcttagagtcatactgggaaaagttgataatagtaatcagtgatggtcagcatcgcattccatgccacgagagaccctactccaaggaaacaacacacaagtcttgctacattcttgccctgttcatcatcaaaattatttcagaagttgcatatatcactatatataataattactatgtagtgtgtaatttatgaatgattgattaatatgaaactgtacactaacctcgatcctgctagggatatcctctggattagtcatcaggcgatcacaaatcccctaaatcttcaaaatctttaaaacaactgtaaatatataaaatttagttactagcaaagaaacttcgtctattattgaaacgactaacaattcaacctcttagggtttcttacatatgaataaactctaactttttgaatcacgttcttcacaattttcgagtatttcacccaaaaaaaaaactcctgatattcatgagttggtctagggtcactgatcaaagaaaaataaataaaattctacgagtaggaaaaaaatgctaaccttagggaaacttattcaaagttggcagcaaacgatgtaagaaatcccccaaaacctaagaaaatatgagattttataaaaaaaaaagattctttgattccgaaatcaatggatttatctgaggtagaatcgtaacaaatttaatccgaaaaagattcgttgacaaaaaatgagagaaacaaaaattggaaaaaatattcatcagtagtagttaagaattttttgctcaaaagtaaatttaaatctgataaagaagggaatatatatttaatttaattatagaagatttggttttactccgctgaatgcgtgtgattatctaaatacatatatagttataaatatttgtttgtttgacattgatagaaataagaaattattttcttatggttgaaaattgctatatttattttaggatttctttagttaaaggtatataccgtatattaatttacttcctatataacacaccaaaaaaaaaaaaattacttctaccctgttcttttgttgatcgctgcgacaagcaccggcggcacaaaatataaaagaaaaaagaaggagagatgaaggtgagatgaatgaaagagtcgcagcgatagatctgaagagataggaaaaagggaatttgagacgctgaaaattccagcgtctacggaatggtcgaattatagttgctgcggcagagatgaaagagaggagaaatgaaagtgaaagagagatgagagctttttttggatcgcaggtagctgacgcagcgatcaatcaaagaacagggccttcctatatatatttatacctttctgaggattatatgttatttaagacaaaaagaatatgatcttaataaatatatagattggactgatttttttttttcaaatcaatttgtcagcaactaataatctagtaattgcacctagtatcaatgaagaaatgagtttacaccacacaaatagattcttaaaaataatttcaaatttcaaatctaaaccttaaataattgactactctcaataagttaacacccccttaatgatttgattttcatctatacctgttatgagaaatgtaaaaaaaaaaaaaaaatgtaatttagatgtgaagactctagtcccaaatttctttgctttttttatcccatacgaactatcacttttaaaaaagagtgggagagttaagtttatattacttaatcacatctaccagaaccaatatactttttttcaaaccaaactaaactagaggcaaatttgtcttcgtgattcttggtttcataatatcttggtagttaaacatcgtattcgtatggtaagactacatttttaacttaaggaatattttataagcatatggaactagagaaagtttgtgtgcaacaatttcacaattaaacatcgatgaactagtagtctagtactattcataaatcaactaaaatgtagtacttttgcggtgatgggaaaaagcttacctccaattgtgagagcatgctattcttatggatggtaccaccggtgacggtgttccaattgtttcaatgattgatctaatacgagaaataatagtctaatattatacaacaaataataagctaactaaaatttatcagaaccataacttttttaataaaacttaattaacaacagttaaaaaaaactgtgttttgtaacagaagtatcatctaatattaaaattattttacaggtttactagggttgattaagttacggagttgatgcaaaaacaaaagaagaactaatattatttttgttattttaatcaagatatgtataatgatttaatcctagaaattaaaacggatcaactaaaaatttaacacaaaacacaaaaaaagaatcatcctgatgagaacaaacaaacaatagccgccgcatcatcgaaacaaacgaaattaaacaactaaaagagattaacctaaatcaataaaatcctaattaatgtttacatgaatatttttcgcagatcgtagttagaattagtaatcgctgcttgatagcttccctctccgccacgctcttcctcgccatagctctcctgatataaagtttccgactattaaaacgatccacagaggataatgcctgtgacatggaagttagatcgaatgcactttttttctttgtcgggacattagttttcacaagaagagctttgtcgcttggtttgttgatagcttctttgagcgaacttagatcaaaagtagaacctccatcatcgttgatcttaactagttttttctctgaaattttctttgactctggcttcatcgtttcgtcgacagagatcaaaagtaaacaataggtttagagagagacatggaagggaatttcctttatatatagaagatgtaactcgtttacgacctaaactaggcccaacagatgttttcgtggtgggcccaataaaattaggtcaaataatattatttctaaaggaaattgatggagctaaacaaaattagtttccattctttgtttgcgctagttttaaattttgatatatattttttaaccatcattaaaatagtttttatattcaatacaaaaacagaatcctctagattttagaaaatcttcaaaactttttgggtgataaaattgcatttcaatcatcttgttttaattacatttttgatgataaatttacaatctattaattacatttccattttataattaatcatactttataagtaagccaaatctattaattaagaaataaaattaaacaaagaaaataaagaacctaacaaacaataaaaagaatcatcaattatctttttttaaatcaaatatatatacatcaatcctagaaattaaaacggatcaacaaaaaataatattaaattaaaaaaaaaatctccaaaacctaataataaagagaaattatcattgatgagaatgaacgtaacaacaatcgccgcatcatcacaacgacatgaaaattaccaaactaattccaagaaattaacgtgaatcataaactattttttttttttattgaaatatttttgttgtaacacgacactccttagaaatcgaaactggttctgctcaaaaaattccttatcctccgttgatgctagacgtctcttcatcgcattcacataacatctccgtttatcacactgacgattcacagaggataatgcatgcgacatcgatgttaaatcgaatgaatcttttttcttagtctttgggacaatggtctccactagaagtggcttctcgcttgcattgttggcagcctctttgagcaaacttagatcaaacgaagagtcgcaaacgccatcgttgatctgaatccttcttttctcgttaattttctttgattctggcttcatatttttgttgagaatcaaaagtattaggttatagtgatatctaattgcttatatagaagatgtaatccgttatgggccataatggacccaaattttgtttttatgaacaaaggccgaaataggcatatatgtttgttttttttgtttttttttgaagttttaaaagtctttggatttaaattttcgaaaagaaaatcattcattaaaataaatcttagattctctactaaaataaaaaaaaatgttactggattctctagattttaggaaagcaaaaacttgattggataaaagagatgcattaactcatattatttaattaataagaaaattatctaggattaaagtggaaatttttagtttttgatattataattaatagatatactagaatcttaaaaacgaaaggagatcaattaattaagaaataatttacctttttttattgttcaaagaataaattatttacctaaaaaaagaaaatccaaacttaaaattgaatagaatcatcaatgacagtaacgaacaaataatttgaaatatatatatatatttaaattttcactaaacaattatttagattttaattattgaaaattaaacgttaacatgaacaaacaaataaaatgtttaaataccaagtaaatatatatgagaagaatatttgtatgaaaaatatatatagtcagacaatttggttttttacacttctataaaaatttatgcaaaatgagacttacatgcaagacttggtactaataatcaaaaatggtgaggattgtgttccatgctagtgctacaagttttcttattcctaggatacaacataccaccactactttaaacttaccctagtccatatattcacccatcataatccaaatcaattttaatttacattgatgaaagctaagcacattatgtaaatttactaacctggagcttccttgtgatattctgtgatcctaaacgtacgtatcagccacaactacaagagaaattgaaacaaataataatacggggatggacattataaactgagatcgtaacaacctgtcttatgtttgagataatttatgggccaatattttgaacagctcattgatcatttctatctctgcatgttcatagcctaaaagaagaatatttgaattgatcaattacttaaatgttaaatttccatttgatctccgtagggaagaaacacaaataggatccgatcaaaaggacaaaccaagagccaaaatggagaaagcagcgtctcttagttgtagcaaaggatacaagccataagtattacaaaatcaaggatattttctgtaactggaacagaacatttgatgtggttacatcatgtcttaaccggcctcacaagccccaaaccagatccactacccaaatgcttgtactccttagcctcaagatgatcgtcgtgctcagcgaaacccgtgcctcctttctttaacccaaccaagttcctatccttgcaaggtttgtcacacacaagacagactttgtcgacgggcataaacttctcagcacacttcttgcagaaaacatgtccgcatgagctaagtgccacgagggacattgtgttggtgagagtgactttgcagctcgggcagatgtaggatttatcataagagcttgaagatgctgattttgtcttggtctcttcctcttcgctgttgtcttctgtgaaacgaattgcaaagaggttcttaagcttgagcttctctttgccctctggacagactgtgtgagtttctggagcatctactctgaccgaagctgctggtgtagctgatgggagccagaaggctttcattgtcctaagcgcttcttcttcaaaggaagtcgtcttcacactgtttgccccatgaaaaccattcttatcttcgttgtgattcttgtcactgtttcgaggcattgcactatggttttgctgatcaaattcgtcgagctctctcgccttttgtaacattagcctctcttcttcttcatccttatcttgcttcttttgagacgaatgtgcagcaagcctcctatagacatctcagcactacatatcagtatcttaaatatacagagcaaagataaatcagacacaaaatctttttaaaatatgtaattttaaaattcccaacaggtcctaacaagtgaggagagtcagctccaacagtttctacaccggtggttatttatatacaaactcaaacaatcatatgcaaccataggctaaccctgagacccgtactcattaaacccaaaacagaagcatcaaaatcaactctaacattactttagttatcactccatacgtttatccaagctttcatgccaaaactcaagtaaagttaccagcttctccttctcaaaaactgtgggactagtagtaacaaaaccagtactcctttaaacaaacactattcaagcattaaatatcagatctttgttatcagagtgatgctaaagagacttgatctaatccatgacttgatctaagaacctcaatcatccaattcacaccagattcatgaggaattcaacaatcctatatagatactaaagctagaaacttcaatcacaaatccaaagtgtttcataaatacataacaaaggaacttaaagttccaaacttttgaaagaaaactccaaaaagtttatacctttggatatctttcttctgagcaaggaaacattcaagtatacactctctgcaaaagacatgacccttatggcaacacatcggatcaatgaaaggcttcaagcagagagaacaagcatcaaagggtttgatcgagtctctccccaatctctctctctgagttccataacctaacttcttcttctcgtcgtaagtgaaatacgcaagatcattgttgttcttcgagtgtctttgcggcatattggcgacgaatattgaattgggggtaggatgagaagacgagtcaggtgtctgaattaaggatccaaatcggaaaccctattttctcagattggagaaattggggaattgagttttccagtgtttcgttctcatgtaagtcggtgatggtatcacagcctttaccgtccgatatgaatctaatctaacggttcctaattattaccatttgtttttttcagcaagagttattaccacttttttggttatgtttactaggagagataggtaaaataaaatcttgaataaaggttttggtgtgatttgtattaaaatcttgtgttattcaaacatgaatttaaaaagtttgtaaaactcaagtgttattggattattaattttaaaatgtagaatcaaatcaaccaacattgttcacaaatgagaacttagttataaatgaaaattttctcttttaaataggatttttacaaatgggtggaaaaatataatttataatcaaacataaaaatgtagataactccacttcaagagtgttgatttcattactagccctagggatgggcataccgtttttcggtttggtttcacttcggttttttggttttacggtttttagttttataaaagctataatcatatagaaaccgtaaataatttttttttttttatggttttacagttttttaaaaaagaaatatgtgagatgtcaaaaaaaaaaaaattaagaatacaaatgtccaaatcatatgatttaagggaagatttttataaatttaataacaaattttctaattccctaaaattcaacaaaatcatcttaaaactcattaaatctcaaatcactggaaattcctccttcgatgccactacctttgtccatattccaacttctccaattcatgttcgaacaacaacgcttttttcttcacaattaagtatgttgttgagcttcttctcttttgttgctaaaagtatgttgtgtacaaatccgattagtttttcatcgtcaatgtacatgtattataatattttcaacgaagaatttaattatgtataaaaagttgaaaactatggagaaaagagttcgagaccaaatggatagtcaaagagcgttttggggaaaaataacttctggtcagtgagtcatctaccaacaattgttgtgaaagtaacatcgttaacggaggcaacatcgtgaccgtcaaagttgagttcaatgtcaccagagttcaagaacgagtggaaggtcggctgtctcgggggtggaagttgactggtttgactctccaacatcaacaaaaccgaacccatgtttggtctgtgaatgaccgagtcttgtgtacacaacatacccacgtggatgcatctcatcgcttccgtcacgtctctagtgtccttcacaattggatctatcatctcttttgtctttccttggctccataaatgccacgccttatttttttttttccgtttagaacattcattagtaacaaatattcgaatattttagttagacctgaaaatttatggttaaagaaaagagacgtacataaccaatgagacttccatgatcagtccctcgaaagctaacgttttttcttccactcacaatctccaatatcaacactccaaagctatacacatctgatttctctgagaatatcccttccattgcatactccggagccatataaccactacacttgttgaacatcaaaatcattaaaaattgatagagttcgatattgtttaatttagaggagataaagaggtttgttaagttactatgtgccgacgactcggattgtgttggcatggtcttgtcggtagttgaatatcctagccataccgaaatccgagatctttggattcatttccgtgtctagcaagatattgctagcttttaggtcacggtgaatgatctttagtcttgagtctctatgtaagtaaagtaatcccctcgcgattcctccaatgacctcccatcgttttctccagtccaaacttccttgtttactctcatctgcgcagagtcattatatactcaatccgaacattttcaaaacattttaattgaaattgtttagaaaaaaacataccaaaaagaaagcggtccaaactcttgtttggcatatattcatagagaagcatcttctcattgtcttcaatgcaacatcctagtaatctaacaagattccgatgctggagtttcgcgattagtaagatctcgttcttgaactcctctagtccttgtttagatttccctgatagtctcttcactgcaatctctcttccttctgaaaagtttccctgtccaaacataacacataagtttttgcatacaaagcaaagttttattatccagtattattgtcagaaaaaaaaaatcattttctaccttatatacagtaccgaatccgccctgtccaagcttgttctcttcagcgaaatctccagtagctgaggctacgctgtcaaaactgaatattggtaaatcgggtgtgtcaacttgatcccctactagaactttgatcggcgagcttgagtaatctctgttctctatgatatcagaaactgtgatatctttcttcttccacaagaaagctgcagatcatggagtaattgacagtctcagtagtttaattcttgtgaaacaagactatgtacgaatagagactttacctttaaggcttttcttaaacttccataagatccaaatgcataatcctagtaagaatgctcctataacactgaaaacaattatccaaagtgttgaattttccttcccaccacctgtatacacaacaaaagaaacagattagtcatgtttaaatctttcacaatgttatatgatagcttaaacatttttccaaacctagtttagaacccgctagccggatgttgatagagtttccaccgcgttcaaaatgttccatatcgatcaaatcacgggtccaaatcatgcatccgatccctactactaacgcataagccttacaagaacagtcccttgcgcatacatctttacaggtctctgagttgttatgtaaaacaactgatccaaaatcaggcacctttattcccttaagtaccgtaaacccatcctcttgacctgcaaccagactctgattacagttcaaaggaactcttctttggcagccacctgagaagtccctgttgttccattgatcctgatgaaccggctcaaatccatcaatgcaactgcatttaccggaatcaaactccttactatcatcacatacactgtaattaccacaacggttatacttctcacattccgtgcttggtttccattgaagcaaattccagttcctgatatccttattccatctgaactgctcttctacgccatcaggcctaatccaaaacctcaagaaatcggaactatctgaggcaacatacgtgaagtacacgctaccatctctatcaggaggagaagagagcttaaacccgtaaatataatttgtgaaacggagcatatcaggtataccggtaaagatagccgaattccacggtccgctacgccattttctcttttccccttcccaaatcacaatctctagtgctcccacaggatcaatccccattgaatactttcctggtgaaggatcactctcggatttccacgggataaatgcgcgattttctccaagcgaaggattcacccgaaccctcataccgggcaagaaagtgtcggttggattgttaaaactctcccaataccattttcttctgtctgagtctgaacacagaaccaaatcccctgttttgaacagaacagcaaccgtgttgtttgactcgggctcgacatttgtggaccaaatggtttcgttttgaccgttcacgatcaccaaatttccgtcatctgcaatctttagagctcccttgtgatccaacaacggcttctctctattcgcaacccaaacaactgtttgaggttctatgttcttgtaccatattccaacataccttaacgtcgaatttttgggggtgaagaatccaagctcgaagctttcatcctcgctgatcagtgagtctccctctcgtattgtgtggtttctagtgaatgagttgcttgtggagcaagatacgttgctacatagttgatggaatatcaaaagagtcgtcaccaaagtaaggtttctgttaaatcctgccatatttgagatgatttgagcttcagagatctgtatataacaagaaggaaaagaaagaaaagaacaaaaatagtggctatcgaagtttcatgtagactagtttggtctttctcaatttaacgagaaaagtcgtctttaaaattgaggaaaatagtggaaatcatctccaaaaacaaataccaacgaatgaaaaggacaaccgacgaattcgtgttgacaagaatatgaactttcacgttttatttaagacttttgattttatagtgcaaaattgtgacttttaaggcaagaaaaggatatatcaattgatttttatctcttattgagaatacgaccttcttcatttgggtggttgaaaacatccaaaataaataaatattctaaatacataaaaatactaatgtagaatggtaatcaatatagattggggcacaacagtacaattttatttttatgagttcaaaaatttattggtgaagaaaaactgtaaattctattgttgagtggcgttttcaccttacaaaacgcaattatggaaatatgcataattcaaattttgtgatgaatataatctagctgcattacgaagcacaagttcctcttgcgcagattcactcattgacatgcgtgtgaggaagcaaataaactacattttccgacagtgagtgacatgatactggcgaaggcatgacttttggagaattatattgccccaccacttattactcgtgtaagtcctcgtcttatagcctagtttggtacaaacccattttaaacatggctttatcatatgcttagatttttatttttatttttattttggtttatagataagaaattttcagcaaatttgttattaaaaaaaaaaatatatatatatatatatagcaaaaccttaaataaatggtgtgtgtgtgtgttttgcatttgatttgaagaaataatgtgatttcatatcaaacagtgtgatatcggttaaaataacatgacagttgttatttaaaaaacactaataaatttcacgttattgataaataaaaaaagtatgtaaaaatgaatcaacttttacaatatttctcatccatcatttttgcaactggtaaaatttggagatcttggccctgaatggatgctgattttcgattcagtttttggatttagattttagtttctagattttagattttagttttagatttttgttattatatatttgttttaaaaatcccaaaaattggtttttagtttttgagataaataacgttgatgaagtaaaaactaaatttcctaaattttaggaaaactaaaaaactaaaatcataaatggaaaattacaacaaaatagtttttctaaattgtagggaaaccaaaattttaaaatcttgattggtatgaaaataagtttttgaaaaacaaaatccaaaaactcttacaaaatctacgaaacattcaaagcccttgtaaattttacacatttataaccaaaactttaaacactagtcctgcaggtttgaaatacgctctacccaaaaaccaaagggtgaaatacatagataacgctataaacctttgtacattgtcatgcttttcatttttgaatcaataattctcaacgaaagaaaaacaaagaaatcaagattgtcaaatgcttcaaatgaacacaattctttctaatggtttgtggattcttcagtcgtaccaaacccgtattagagtcatttcctatgtttggtaagaaactacaaacacggaaacaccaatcattcagtattgttttggtctccgtcgaccaaaagagagaaacatgagttttaaatatgaaactaaaacgccaatattgaaggaacacaatgacattcacagatggtattttcttatattctgaattccatacatgtatgatattttaataaacaattctttaaactgactattatttcggctttagactaagttataaagtaaagatattgtgggacaaaccaaaccaaacaaagataggtttatgctcaatagagcatgagcttattaaaatagataaaaatgagactgaattgaaatagcttattaaagctttatagtttgggcttgttgaaatggcttgtgttaagaatcctctaatagatataacttgttggctgattttatttaatgttttccatcattttagagtaatgatttagtaaagaagtactacagtttataaaacataatccataagcataggcttagggattttagtatatatatatatatatagaagtaataaattttataacataagatgaagtgtcactcccagttacatctcaatctattagtatgtctaaatacacatttaaccaacaaaactccatctgctcttctcagcccaaaactctccaccaacacataacacccaaatctcctccaatttctatcattgttaccattcatattcctaccatctcttctacaaaccctgattggttcatctctctccaccctcaccactttccttcctcctcccacccaccctccttcctccattacccttctcatcctttctaccaccacaaaactcagccccaccggagaccttaaacccgtcttcctcctcctctcccccggtccccgtggaccttgaacctgcctataccaataaaaccctccatgcccttctttctctcccttaaccgcctccatacccttcacatagttggcctctctcacgacgttagcctctactctcacaacttcttcttcgttttcatcattgttttcatcaagatcattgtttccgcaatggtaaattcgttcccagtattgggatagtgtgatcctatagaacattgacttcctcatttgttgacttacactacaattctccttcacaaacataaaagggcaataccattctccaactatcacacttcctgaccgaattgtagaaactggaaatccaaatgctgggagacgagctcttagttcctcgtctaggccaagagcttctctaggtctcctcggatgtaggctcctcgaggttcgtagctcccatcctttcttcttgagaaatgttggcggtgtaccgtctggcgccacagattttgcatagaatgtccggtcgtgatgccggttgatcttaaccgtctgatatatgtttcttggatccagaggtttaggtttcttgtcatgcaagatatctggaaaacaacatacccctttctctatctctctagaacacacggaaactttcctgcaaagaaaaacagagaagatctctcaacactaattcctcaatcttctttataataaagccttataacttacaatttctcgtatttttttggatcttaccctttgtgtctgcctctagcgtgaacaacgtaataccgattggaagacaaaggttgatcgagagccggtatgaacaagaccttcttaaccgaagtctctctgttaccagaactgtctaagtgaacaactgataagatcttgtcctgaggtaacggaagcttctctatttttgtcctcgtacacatcccgaaacagaacgtatcctctgtttcagcttcttcatctgtgataaccaaaacgccggagaacggaccttccggtgactcttccgagagcgtcttctgatattttctgaactgcgacaatgttctcgtcacgtacattttttcgttcttgaagctttaagggaattagtgagttatgatgaagttttagtatcaatctgagggattttattaatgaattttaacaattgtaggggtgtaaacgacgagattataaagtagttgggtggctcaatgtaacttttgatagtggagggtaaagttatgtaattttagtgtttgctgattgccaagtctttaactttgattttatgaaagtaaagataaaaagataaagctataacagtcacattccactctcaattcttagtaagttaattttttactatttaaaattcagatctaagatattcttttcatttcaatatttcagataaattgggattttgtatttcgtaaattcggcggttgattaaagtaaatgattttaataaaattatactaactaatgaaaattagagatacctgtagcctggagccactcataatgaatagctttaacttagtggatggactaaagcgatgatataaaaggagggaaaaagaaagaaaacgaataaaggtatataaaaaaaattgtgttaataaatctaaagtttttcttgtgagcatacacatactagtagatttaaaatattttgagtaagacaaacaatttaaggtttaaaaagtgaaccaacatcttcctatgacattcttactgtaaatttaacatatgaaaatttgatggtttatgttatgaaacaaagcatcgattccacctaatcgaaacacataacctcacgaatccaaaaagcacaatcaaagacacaaacgattttaacgagttccctgccaacaacaggtacgtctcgtgagggatcggtaccctcaaacatccactaaagatcaagagatacaagtgtttgtgttctctcactttctcatgattacaaatcaatcgtgttacaaagaagaagaaaaatagcgaagaacaaagaagaagaatgaatcagagatgaaccctaacttgagaagactctaacaagatatctctcatcatcatctctcttacgcacacaacgatctaaaatcgaatgatcacgctaatcaccaagctcgcttctttgtacgctctgtttcaggttttatagtcgatgatgatttaagacagctcctctcatatgatgacaagtgtcatcataagctcctttcaaaatctctacttggtacagagtcttagccttttccttaaacccctgaaatcctctgcatcaactagaatgtttaacacttagttgattcttgtgtttacttactctttttcctttcttctacttcaagcagtcttcaagtttttgtctaagcttctccaagatgatttagagtagtctcgaggttgaatcatatttcaacagtttacacgtttattttggtcaaatcttacacgcacacacttaagccatcacctgcagtgcacatactatattctcctataagatagaatatgatagatattcaagagatcaagaggacaagtacaagactgagtggatctatgtccaaacataaccttaacaatctagcaggcccggctcaatattttattgggccatgtgctacaaaaaaaatgatattctttaaactcttaactctaaacaaaataaccttatgtgacatgtatttactgtattctttttctaaacctattactaaaacacacaaaaattaagaaaaaaaatatgaggaccctgtgcattggcacctctggcactcccctagagccgggcctgcaatctagtcatataaatttttctgaaaggttgattatacatagtctcatgtaaactaaaaatggtttacacaagcattcatcttaatactcaatcacgtataataactaacatactcagtccttgtttaaacacttgttatcttataaccctattactttgttacttcgcgagcatgctatctaatttttacatataagtgatataaacatacaataactatatgtctatatccatgaaccttactttataagacaatcatgaaccataaccatgcatggaaaatatgcggatgtgttaagaaatttttatcgacattagctattcgagttaatttattaagtggtttgtatttgaaactatatatgtacactgtacacagaagaaaaaataattttaggataccacatatggttgatcaaggaacaaaaaaaaagaaaagatggagtagaataagccaatagttttgaaaagtggagcaggaagaagcgtaatggaaatgataaagttttgttatagtagacattatccatttctgcatacatcatccattatctcactttaactgctcctatgatttttcacaagaaaaaataataagaaattaattaagatgtaaacaaaactgaaaaccaaaaaccatccgttgaggaaatatccttgtacacactataaaccccacagtaatatgatataaaaatattttccttaacaataaaatgaaatatttgggtataggtcaatgaccaaactgtggatcaactaaagtaaatatatttctattattggaatggaagttcacacttaactcagagtcctttctggatatatcaaatccgatcagagaatttttcctgaatgatctgtcattcagtcaaattaactaacccttaagacccaaaaatgcaatagacctttgttagaggtggaggtaaccctggccgaagacgtaaccatggcctaataggtttatgtcataataaaaataaattaaaaacattatctatcaatttattccaacataactaaatgttttttctactcctacatttttcgtaatatacatttattggcatttcgtaaagctaaaaacttataaattttatcaaacaacatctttgattacaattgattaatttctcgtaatctctctttctcttgtaactggatcttcagagccaaaactaagttaaaatcttaatttagccattaagtgaaatatgtagtgataaaaaagcttccccttaaaaaatcgtctccaacttgtttgactaatataacaaatccactacacttattagttaatgatttgataactccaaactagtccgtaatttttaaatcgcttacgctaacaatattgtatcttcaaatttactaagatatattttgtttttccgagtcaaatgtgataccacatgtacatatatctttacaatggagtcaaaagagaagacatcatgacgcaaaaccccaaattttgagtagagtggttagggcagttgatgaaagaacgtccctactctttcctcttcatcctttatttatcagcttatccttaatcgaaagctagaaaacaaaaccgctatttcacattttctaatcgttattcaaataataagtttgtgtgagtctaaaagttagatagcaaaagttgcaaaactattgaatttatttttccatgtttttttcggaaatactgtaatgtgatgagtataattggatctgttagtttgttggttttaattagaggttactactatagaacattttatagttttaatgtttctataaccaaccaaaaatccattagatcaaagtatccgaattcaaatatcgtgtcaaaaaaaacacgatcatgcaatatacatttaagtgtcataaattaaccgttacgtattacattgtgacctatatgatagttacatttatttattatacttatataagcatagtccgtccctatctcatatgtataaataagacccaacccatccatcattgttttgcctcctaaaatcttacaacacaaaaaaaaaaaaaacatttagttaaatccaatgagagactcttcaacaactgcatccaccaaatcctcaccgttatggaaaccctttgcctcaaactgttgttccgttgatgaccaaaccgtctttggcaatctcagccgttgccgaccttcgagatcagaattctccaagaaccatctcggaccacttccttcttttcggcgactctcctttgctgatctaagccgttcttcttcggctaggatcaatgaagatcttgcacagactcttggagccgacttagtggattttcagatgtgtgaactcaagatgatcactcagagtttctccgggaactatcttctcggagaaggtgggttcggtaaagtgtataaaggttatgttgatgattatctccgacaaagtctcaaggctcagcctgttgctgtcaagctattggacattgaggggcttcaaggacatcgtgaatggcttgtaagaacgtttaccaataattgcatgctaattattgtgttatttttcttgttactgttcagtaattattatttagttatgacatacatttgattacgcatacgtatatggtttaagttataggacatcccaaatattattctaaaattacaaaccactcctcatggtttttatattttgaagattctttggactcatttatttttaattactttaggctaggaaactatattaaaaaatgtgtttggtcataatatggactaattaagtacgcatacgatacgagcttgttgtttctttttttggtgtcacgtacattgtaagagaatctttttcttgttagtctgatatatgtaagagttggttagaccactttcgtatactcttatatacacctatcatcttaatttagtctctaagaatataattaattaaaaacatctgatacataatatgtttttggttcatatgcagtctgaggtcatatttcttggacagctaaaacacccgaatttagtcaaacttattggttactgctgcgaagaagaggaacgagtactcatctacgagtttatgccacgtggtagcctagaaaatcacctcttcagacgtaagaacatttttaataattaaaatttaattcgtatcttaatgtaatttttactgtattaagtgatcagtatttcattttactttcatattaacgtaattaaattgtcagggatatcactatcgttgccgtgggcgacgcggctgaagatagcggtcgcagctgctaagggtttggcgtttttgcatgatttggagagtccaatcatttaccgtgatttcaaaacttctaatatactacttgattcggtaatttactaattttagtttgattttttttttttcagcgtacaaaattatcctaaatacattcttcaaaaatatattttcttattattacatgggggttttcaggattttactgcaaaactctcagattttgggttggcaaaaatgggaccagaaggatccaaatctcatgtcacaactcgagtcatgggcacttatggttatgctgctcctgaatatgtttcaacaggtttatacacaatgatttcattgtctgttttttcagtatttattcaaatcattagggtccttttaaaaaaaaggatatagtttccttctcatatatatatcttccattgctttctcttacaaagagaccattttgatagagtcattttgaggattacacagaacatagaaataagtaaaacatataaatctgtaatgcgtcaaaatttgaatgaataggaattaattaattttatgggattctaatttttgattaatttttcttttcttaactcaacagagctttattaataagagtggacatagtcatggtgtaatcagaatctaattttgattaattatctaacgcatgtgagcattattttcagggcatttaacaacaaagagtgacgtgtatagttatggcgtcgttttactcgagctcctaacgggaagaagagccacagaaaagtcacggccaaaaaaccagcagaacatcatcgactggtcaaagccttatctaacaagcagccgccgactccgatgtgttatggacccgaggctcgctggacaatactccgtcaaggcggctaaagatacagctcttctagccttacaatgtgtgagcccaaaccctaaagaccggcccaaaatgcttgccgttgtggaagctctagagagtctcatacattataaggacatggcggtttcttctggtcattggccactgtctcctaaatctcagggcgggaaggtttccccgaaggttcgaggggatcatcggagtggtagaaaatcagctccgggttcgttaagatcgtgaacttagggttgaatgaccttataaaaaaagagagaaaataacatgtgtgatgtggtgtgtgtgtatgtgtgtatacggtcatacgtctaagagtgacatagtgagagacatatgactctcactaagaaaaaacaatgatatgaatatataaatattgtagattagggttttcgtataaaatatttaatccaattggctttgatatagttttgcgtttttcattgtgaatatcacatctgtagatcattcatggtgtatagtatcacttaattggatctagtaatatcatatcatctaacatatgtttgcgtaatagattgaggtcttttaaatacactctttcatttgatcagattctagaattttttttaaatagttttaatgcaatattttggatatatgctaattaattaaaactaaatgggccgggctacttgaccctaaccataagccaagcccatagaaggcgtaacccgtaattcagaagccctaggtttcagagaaagtataaataccttatttcagttttcattttaccccaaacattaatatctctactcatatcgccgacttaaaggtacataaagtttctcttgattctttcgatcttgcttcaggaatcaggacactggttcatctcttacctcatttgattttcatcattaggtttcaatttatgtgcgctttgtctgttaaattttcgtaatttgccttggttgatcatagtttcacattctctagctgcttaagttttgtagtatgttgtaaaaatgtgtgttttgattatgatatactctcaaggtagttctggtttatgattcaaaatgagaaccctcggagatactttataaaatcaaggccggagtctctgaatcagctcttttgctagaatccagatttatctgattttttagtgagaaacactcttatagagcttgagatttggtttatcttaaatgataccatcggcctttgatcgagggaacatttcgtttcatttttccagaattccttaagagtatatcttctattgtcataatttctctgcaaagtcctgatttttgtatatacctgattcgattgattctattagattgttataggggtttctgctaatagtttaaatatgtagtctggtaatagttggtgttcattgatatgagatttttgcttgagtacatgggacctttttgttcttgcttggttttgtcattggatttgttagatgttatctgctgtgtttataagtttttatcttattttctagtatttgtttctggttgaaagaatgtctcacagaaagtttgagcatccaagacatggttctttgggtttccttccaaggaaaagagctagccgacaccgtgggaaaggtaatttcatctattcacctatttattgctacttctgtgtacttagtagaatgagctgaggttttctttgatgtcaaaaatgttttgtgtatgcttctatgtagtgttgttcttatattccttgattgtgtttttccagtgaaggccttccctaaggatgatccaactaagccttgcagactcacctccttcttgggatacaaagctgggatgactcacattgtgagagatgttgaaaaacctggatcaagtgtgttctcactctcttctcttatcaagtcttaatttttgcatgtggttttgtacttaactttttattaatattgttgacagaactacacaagaaggaaacatgtgaagctgtgacgatcattgagacacctccaatggtggttgttggtgtggttggttatgtaaagacacctcgtggtctgcggtctctatgcactgtgtgggctcagcatctgagcgaagaattgagaaggaggttctacaagaactgggccaagtcaaagaagaaggctttcactagatattctaagaaacatgaaactgaagaagggaaaaaagatattcaaagtcaattggagaagatgaagaagtactgctctgtcatcagagttcttgctcacactcaggtatgccatttacttcaaattcacaatcattttgcaaatttcatttgtttctgattacgattgttggatatgttttagataaggaaaatgaaagggctgaagcagaagaaggcacatctgaatgagattcagatcaatggtggagatatagcaaagaaagttgactatgcctgcagtttatttgaaaaacaagtcccagttgatgccatcttccagaaagatgaaatgattgatatcattggtgtcaccaaaggaaaaggttatgaaggtgtggttacaagatggggagtgacccgacttccaagaaagactcatcgtggtcttcgcaaggttgcttgtatcggtgcttggcatccagctagagtctcctacacggtggctagagctggacaaaacggttaccatcaccgtactgaaatgaacaagaaggtataccgggttgggaaagttggccaggagactcactcagccatgaccgagtatgacaggtaataatactaacgatcttgaggtgtttcagtcatctgtgtagtaagcggacttgtcttggtgttcatatgctgttttctgttttcttttcaatagaaccgagaaggatatcacaccaatgggaggatttccccactatgggatagtgaaggaagattatttgatgatcaagggatgttgcgtggggcctaagaaacgtgtggtgactttaagacagactttgcttaagcagacgtctaggcttgctatggaggagatcaagcttaagttcattgacgctgcttccaatgggggacacggtcgtttccagacttctcaagagaaggccaagttctatggtagaaccatcaaagcttagatttctaagtattttgttgttttttgagtttctttctttggtgtttgtcggatttttcttgacagttgatatcaactatcttctcttttttttcttctggatattatcaaagtttctttggtttaagattagatttgcttaaacatatatttcattgggttatggccacagttacattattatcaaattatagtgagcctaaaacatccagcaccttgcatttagtatacgtgtggcttaataagtaggtatgatttgatttgttcagattcatgaagcttttatttttatggtctcaggacgctagctctagtacccattgaaacatccatctaacctaactagaattctttgttgcaaacatagggttcataattcatgacaactttattcacaagtttttcaagtccttgaccagcttgtgagagcctcttaattgcgatttcctgcccttgaaatttttcctaaattcagtattaccaatgaatcagtagttcttcaagtccttgaccagaagcttgtgagagactcttaaccgcgatttcctgcccttctaatttttcctaaaatcagtattaccaatgaatcagttagtttacctagaatcagtattaccaatcccttcttaggattcatatatcaagagagagcttacagaaaaaggaagttttgcttagatataccgcattgaccaagcttgttgtgagaccaaaattgtctgttgctgaccgttgtacagactctggaactttcatcttttgcaactttacaatgttatcttcttctatgtttcttgtgcatctaaatggaacctttatgatgcatccattagtttcctggaaaagaaagaagaaccagattaaatgaatagtttcctcgtgaaggatcttaaatgcttttccaaaaagtacggtggcgagtttctccggttctcgcctcggttccaatcttggcaagaacgagtcatgtggataattgaagctctcccttgcagcacaaagttccctgaacagaacaactcatgttttccattgtgtggcctatatactatgagagtgttattagtaatacctaaaagaacgaaatatctttcacctttcgaacccctgaacatttcactcgcacactattctgctaatttaccattcaaaagtcaaaacctctgaagttgttgtggttacaaatctgctgctcgatttggattcaaaacaggcccattaataaattgaataaaagggcttcaaggcccaatatctcaaaacctagtccattaaggatcaagctattttaggaggtggaagaggttttagggttttaattcatcgcagaaacttgacttttgagagagagagagaagaaatggattcatactcttcgccgccgatgggaggttcaggtagttcggtttcgcccgaagtaatgatggagtcggtcaagactcagctcgctcaagcttacgccgaagagttaatcgaggtctaaatcttttttctaatatctctttcaatcttcaccgaccaatttgaggtttttttttagtacacgaagttgaaatttccgactaatctcatgtagtttctcatagattgtctgtgaatcagtagttatctccatggattcttaatgttgtattaaagtttcaatctttgaaatcttctaccaatttgactctgttttggtacacagtagtattttttttccgaccaaatcaaatctaatttcagttatgcatcaaccttgtgtcgatggatctcaaagtttgcttttttttgttgttgtggttgtgcagactttgaggacaaaatgttttgacaagtgcgtaacgaagccaggatcaagcctcggtggaagtgagagtagctgtatttcgagatgtgttgaacgttacatggaagctactgcaatcataagtcgttctcttttcactcaacgttgatcaattccagctacctcttccttttttaatgatcttgttgggatttcaagtataaaaacgttttatccagagtagaaaacaaaattacttttggttaaaaaatgaagagttgcaactatcaattcgagaatggttatgtttctatatgttgttaattggttcaaagttcaaacttgttttattctgtgtttcattgatttgggtcaaaatcttagctctatgcattatatgatacgtgcatgatcctgaaaacaatagaagcacactagagattgttgcttatcttgttttggcacacatgaagtgatgaagagcatctatgaattatccaatcatcatctttagatcattctctctgaaagcattctttgttataagattaactgtgtgtggttcttctaacatccttttgaggacgggtctttttgattcagtctcatttattagctggtacttgacaacattgaaaaggcaagatgactattgacaatcagaattaaagagaacggagctttgttttagatagactccaacttctatcagtttaacgcttccatcagtttcaaaattctaggaatttttaggaatcaaacttggttgtgtgtcaatgtatctttcatgttatgactccatctcagtcaatgttcgagctacatcaacctttctatcactcgttgaagctatgtctcttacctctctatctcttctctactctctttcaagctgtagatgattattttcgacatccgttcaaattccgacatttcttgcatccactaaaggagttgaacaagatgaaaatggattcgttctaacaagatcctagcgtcactcttgaatttttggattcaatatttggtcatctagcaagacgttgcttgtttttaacctattttaaagtctctttacatttttacaaaagaacctctccaaaacccttcaagtaagtatgctaaagagcaaactccagtcgaggaacttattacttcagcaggggcagtaggaaatgttgaatgcaacataaaaataaaaatctttcatatgtacgcaaattttactataattctagaaaccatttccttagaattatttaaatcgacgagtcgtctttgtttaaaagtagttcgcgtaacttacgtcaagacaaacactatatatggaactcaagaaaaacaacattcatttactaaaatatatgtggttactaatcatcatccaaatataaccaagtttgaaatccatatgttctctactatataaacaccaactagcgcttgttcataatcccatagagccaatttccgatacaatattagatatataaataacacaaagtgaactcctaatcagggttcattttataaatttattatttagttattgcggataaagaacaataataatatggggatgtctaaaagtatcaaggttatcttatctcttgctctcgtagtgttcttggcccttgctgcaaccaaggttgaggccacaagatacataacttatcctgctatcgatcgtggagatcatgctgtacattgtgacaaagcccaccctaacacctgcaagaagaaagaagcaaatccttaccagagaggatgcgagaagatcaatcgttgccgtggtggataggtggaaaacagtgaattaaccaacccacccaagagcataaaatatacatcaatacattatctatatacacacttttgacatcctcatattcatttttaatgatattatttttagtctattattggctttgtaattgattgtaatcagaatgttatgatcaatcatatatataaatacttcagttattatccgatatcttaactaatttttcgagctatttttttacttccttcagttccttgcatacatttgagcgattatcataatttttggcacaataatttgtcaagaattataagaatatacaatgatttattcatcgctaggatggaattcaaaaaagtaaacccaagactaaaattacatagtttgtttcatgttctagattctcatacagaataaaaactctttgtaaaacacattgcaattttttgaaacggctgcctagacgttggcctattagacgatcaattttgttcagtttactagatttgtgcaaaccattgttctaatatgttatttattgatgacatatttttaattgttaagaaaaatttaattgccaaagaaaacagtaaacaaatgtatgacttaattaattgagagagaactttacaaataaccaagaatattcaagtttggagaatttgactaacatgcatgagcatatatatagggataatgagaaaattaaagtatttaattgtgatatagataaatgacatattatagaaaaaatacaaaacgatagtatataatatattagttattggcatattgcaatttctcaaatcaaataagttattcctttgtgtcgacgtttttttttctaattggtattcagtttggtttatctgtatatttaagaaaaacagattttttttctctcgtttttaacatggtcctagcgctagactcttgtatttttggattaaatatttggtcatctagcaaaatgttactaaaccgtataaatttacaatatgacactgtttggtaaaacaaataaatacaaaatatgccactaaaaatatacactacacataatacaggaatacaaagggaagacctagctagcataacaagttaaacatacaatttcccgattcagttttaagactacgattgtgattgtttttttatataaaaaaactacttctttaactaactttacatcttgtaaatactacgaaagaataccgcagttgcgaaagatatcggcaaaggaggctttaaatatacttcaaaagaatatattttctagtgacacatatcatagatattttgacaaaagattttcttttgaaatggaaaagagatcacatgaaataaaatatcaaaaacaatatatgaactaaatccaaaggaaggcagcaagagaactagagaaggtacgagcaaaaaagggtataggactgactggatatgatggctccgagagccacaaaggctaaggacatcgagcaaagaaatgtgaagcacagcccagcatctacaatgcaacgtccatggatagaggcagcgacaaccaagctagtcaaactagagccatatatatagtcaatctaaatatagttattttataaagatacaaatccctaaactaaataaatttgtatgcaaattctataataattttctagaaacctttttttgttattttctattttaaacagacgtatctatctttatttttactaaaaataacattcatttactaaaatatatgtggttactaatcatcatctaaatataaccaactttgaaatcaatctagtctctactatataaacaccaactagcgcttgttcataatcccacagagccaattcccgatacattatcaattatataaataacataaactgaactcctaagcagggttctttttataaatttattatttatttattgtggaaaaagaacaataataatatggggatgtctaaaagtatcaaggttatcctatctcttgctcttgtagtgttcttggcacttgcaggaaccaaggttgaggcctccgtaagatacataacttatcctgctatcgatcgtggagatcatgctgtacattgtgacaaagcccaccctaacacctgcaagaagaaacaagcaaatccttacaggagaggatgcggagtgctcgaaggttgccatcgtgaaacaggtccaaagcccacctaacagcattaaatatacatttggttgacatgtttctcattggagtatttggttatttgtatacactctttacatcctcatattcatctgttaatttggctttgtaattgattgtaatcacatcgtgttatggtcaatcatatataaatattttaacgatatatcgagctatttttcaatttcttatagacatttgagcgattatcatacttcttgccacaataacaagaactatgggaatatacaataactattaatccctaggatggaacttggaagaggtttcactttttgatttcactttcaacaaatgcgtgtggccacataaacttttgagctttgacccaaatgttttatctaaagtgggcttgccaaaaagctcttgttaaaagacttgatcacctctagattaatagggcttgactcggacatttgtgccaataggaaacaaaaatggataaccaaaaagaataccaaaagctgttagatagaataggaaaaagtgttaagtgatcatcagtacaacaaatgtcacatctaataaacaagtaacaaagtactacacggttcatttacaaatgagcttgtttgcaatcttcaaggaaaaagtagtatgcagcaaatttcttccaagcaggaacattttgtttgttttcgcgatttgcagtagcgaacagaattgaccatgcacgtttgtattttgtaagattgacgttgagatcacagcccaccgggactggtgagattaaagcatgttagagtatgttagagttttgtaaggtaagtacgaccggataatacacatattgaattgctatttgtcattaataaatgtcatcacgacagtcgaaataacatcatttgtagtagacatgtatgttgtcgtttgttacaatattttcttaccagattagtattcattatagacgtcaatgcataaaattacagatgtacgaacgtatatgtagtaccatgtgcatggttatatcaatattcgttttaggtttgttagaatgcaaattaatcgttgtagagccatgtccgcattgcattgaaaaatgtaagtctataacacagttttacatgacatgttaatgactagggtttgccaaaatatataaatacttgatttgattagttatatgtccgaatctgttttaaattatcatacgcgcgccaattacaaattgtttatcacaatatacaaactacaacaccatatttcattatagtaaaaccaaaatttaactacgaatctgaacgtagccctgctttatgataaatatttcccgaaaaaaaatcattagaattcctataatgataaaaaaaacgctggttcttatggtaacaccatgtgaaaagtgatgactttttcatagcagtagaagtagtcaactacctcagataagtactgtaattaaataaactaattgcccaaaatgatacaactttgtcgcattaaattaaaagttaaaccttcactggatgcattaccaaaatggtcatataacaatacgtaatccaactcgctgtagctatcaatctctttatcacaaccaaccaatattcaacaatgttgttttatttatttttcatatggtttatttaatcacctcgacttttttggcatcgatcacatctacaaataaattgttagttagcacgaccgttattattactttatgaagaattgttaatctgaaaaatatccttttgatatcagttggaaatatttttttaaataatttattatgtagagcttgcggctgagtcaaataaaaataaaattgaaaactaaaagcgtgattgacaaaatgactttaaaggctgatttgtttttgaaaaaaccaagttcttaagaacacatttgaaccaatcatcgaaatatatggtggaaatatatttctaccaaagatttgttttttaaccaaataattgaacacaacgctaactgaatattttataaaactgatacagatttattaaaaattttgctaataaacattataaaattgcttttaccaattataggatgtattgtatctcttggactttaatatcgttgacgatcttgacaaataaaaagctggcgtttcattaaattggtatttacaatgagaaaaatgtgtgggatccaaaactggatataggattcgctttactgtatctggatccgaaactctaaaatatgatgtttcttatgatctggattttttcaaactataaatgatttctgaatttccgtgtatgtcaaccaatatttaaaaacagattatatttcttaaatatttttcagattttttgaaaaatattctgtaaattacaaatgcaaataaattatttaagaccgttaaggatcaaatatgtttttagtttattcaaatctctcgttctctcatatcgctattttgtacttagtttagataaaagtattaagtttggcttcttagaatttgatgtttctttttttcgtttttgctatcgacttttgttttttttttttttactattttggtgttatttatctattccttaaattttggttttgtttctgatacttatattttctgtaatttatgtcgcaacttcaaaaataatataaatactttacattgatattaaaaaaaaaaaattgagctctaatgacctttggagctcatgctcatctatggaaaaaaaaatccatgcaggaagaaccaagaggaaacggtatacaaaataatattaaataaataattatttgtcaataaaataaataaaaactcaccaaagtacataacagttcacacagcatgtttttagaaaagatcatatactattggtttcaaagtctttgactttgaatgtttgaacttttcaaggttcgcctactcgccggtcgtctcctttaaccttcgtctctgtgtttatataagaacatatacgtatttgatgattacaaaaagacaattctttatccttctttagatttctgtggaaagttcactatttattaggagagacaatttcaaaaaggaaagctttttgcttggaactgttctgtgagttctaatggcggatcaagttaaagaaaagacattggaggaaacttctacatgggccgtcgcggtggtttgcttcgtcttgcttctgatttcgatcgttattgaaaaacttattcataaaattggatccgtaagccactttcttaaccttgttctcctccttcaagattctctgtttctgtatctgtttagttcttcccaaaaatcaaacttgattgttctcacgaacttacatcagtttatgtttgaaactgccaaaacccaaacgggttttagtcttttttttttttttttttttttgtatgtacttgtgtcggtttcatagtatcctctgtttctaatactaaacaaaactctgtttttttttgtgtttcttcttacagtggtttaaaaagaagaacaaaaaagctctatatgaagcacttgaaaaagtgaaagcaggtaaatttattgttaatttaaatcattataaaaagaaacaagttttccctctcaaagattcttttaatcacctttagttttggttaattatatgtgaatttacagagcttatgctgatgggattcatatcactacttctaacaattggacaaggatatatctcaaatatttgcatccctaagaacatcgcagcatcgatgcacccttgtagtgcatccgaagaagcaagaaagtatggtaagaaagatgtcccaaaggaagatgaagaagaaaacttgcgtcgaaagcttctacagttagttgattctcttattcctcgaaggagtttggctactaaaggttatgataagtgtgcagagaaggtaaattctcattctatagaaatattttctttgtaagagccactagtgtgacatttactaatgtttgttaccagggaaaagtcgcttttgtatcggcttatggcatgcatcagctgcatatattcatctttgttcttgcggtttgtcatgtgatctactgcattgttacttatgctttgggaaagaccaaagtaagttcttttatatccatccacattctgatcacaccggttttgatgttccttttttcgctgaagagaagatcttttttgttttgtttctgttattgcagatgagaaggtggaagaagtgggaagaggagactaagactatcgaatatcagtattcacacggtataatttacaaacttggaatgaaaaattgattaaatgtaaaacttgagtgtgaagtttcaacaaggaatgattcggataatgtagatcccgagaggtttaggtttgcgcgggatacatctttcgggcgtagacatctgagtttctggagcaaatcaactattacgctgtggattgtatgtttcttcaggcagttctttagatctgtaaccaaagttgattacttaacactgagacatggtttcatcatggtataagtcaatcttttgatctttaacttttctgttgtataataacttatctctcaaggcaaagatcttacagcattgcacgaatgcttcttctttttcttctgtttcaggcccatttggctcctgggagcgacgcaaggttcgatttccgaaagtatattcagagatcactagaggaagacttcaaaaccattgtcgagatcaagtatggaactaattaagattacaaactccacttcactaaccactacttaatctgatgttttaactgcttatatcttcagccctgtgatctggttcatagctgtgctattcctcctgacaaacacaaacggtacactcgttttcaaaacgtcgctgcatcgatacctctttaaaagccttcaacaatccaaaactaatagattactctgcttttctaatgaacaggattgaattcttacctctggctaccgttcattcccttcatcgtaagcaacaaccaaaacctttagactaaacctattttgtttcggtttcaactccgtaacaagaatgaatgtataaacaaactgcaggtgattcttattgttggaacaaaacttcaagtgataataacaaaactaggacttagaatccaagagaaaggcgacgtagtgaaaggcacaccgctagttcaacccggtgatcatttcttctggttcggtcgtccacgtttcattctcttcctcattcacttagtcctcttcacggtatacattcatcttttactttctactctctctccttacaaaaatgcctgaaatttaaccatttctttttcgccatcatcagaacgcgtttcaactagctttctttgtctggagtacggtaagcaagcaatcctgcattctccatgaacttgaaacgtaataatacctatacaatcatcattttcatcaaaatcttttgttatctcttcagtatgaattcggtctaaagaactgtttccatgaaagcagagttgacgtgatcatcagaatctcaatcgggtaagtggaaaacataagcttcaaaacccttcatagaaaccatcccttaacatctaacaaagtcacaaccttttggaaaacataagcttcaaacatagaactgagaaaccattccttaaaatctaacaaagtcacgaccttttggatcttgcagacttttagttcagattctttgcagctacgttactcttcctctatatgctcttgttactcaagtaagatccacgcacacacaaaaacacataaagattgaaactttcaatttcaaaaactgacatttttgaattcaattttggtgaagatgggttcaaagatgaaaccaacagtgttcaacgagagagtagcaacagcgttaaagagttggcatcacacagctaagaaaaatatcaaacatggaagaacttcagaatcaacaacacctttctctagtagaccaacaacaccaactcatggttcttctccgattcatctccttcgtaatgctcctcacaaacgaagcagaagcgttgacgaaagctttgcgaattcgttttctccgagaaactctgatttcgattcgtgggatcctgagtctcaacatgaaactgctgagacttcgaattcgaatcatcgttctaggtttggagaagaagaatcggagaaaaagtttgtttcttcatcagtggaacttcctcctggacctggacaaatacgaacacagcatgagattagtactataagcttaagggatttttcgtttaagcgatgatttaatgttttcttaattcattatttagtgatttgttaatatgctaaatgaaaccagttcttgtaaattttctatactatgtttgttaaaaccagcccttgaagctttaatttctcaatgtaaaagtctgatgattttggattttaagactatggagattcatgggtagttggtgaagagtgttcttgtcttttgggtttgagagtttgtggaagatgtgttagcagatttagaaagcatgcaaggggtttgataaaatgcctgagtgagacttggttttcctgaaacacagtggtttctgggtgtagatagattggattggcgaggattgtattttgatatggtttgtagaatctgaagactcgttttatcgccactatttttttgagtattgacaaggtgattagggatctcttgtgaatgccttcaaggatttggttgaaatgcaatttgctagatagctctttagtggaatgttatattcatggggttcgatgaatgacggggtatgtgcaaaatgagaattttaaaaaagcaattcgtgaatttatgccggacaaagggttggaaaccaagatcattggtgctttgcatgcttgtgcttacgcaggtgatcaggacctagtggccaggccaggaccgttgtatcttggaatactagatggcagatacgttgtattggggtcaaaaaaggtcagtggtacaattctcatgtttgaaaatgaatggtagcggtgttgcctatttttcattggttgtgggctcaatttacctgaaaataataggtcaactgttgcatggttgattgggtaaacataagcatttcacttttctagaatctgtattataaaacaaggttttaagttgatcgtgaataaagtaatgcagaatcttggaaaatgggtgctttgtagtcaacattggttagaggtgcttccattttctattcagcacttgactttgttttatttgcttacttttctcttttttacagtatacatgttctcttcctacaataatctgaggagattgttcttggacattggggatgacgaggtttgcttgctttctcttctctaccttgctcttaagttttagctatgcagctataacaccaacaagtcctttgtcaattggacaaactctcagctcccctaatggaattttcgaactggggtttttcagtcctaataactctcggaatttgtatgttggaatctggttcaagggtatcattccccggacggttgtgtgggtggccaatagagaaaattctgttacagacgccactgcggatctagctatcagtagcaatggaagtcttctcttatttgatggcaaacatagcactgtctggtccaccggagaaacttttgcatctaacgggtctagtgcagagctttcagacagcggaaatcttttggtcatagacaaagtttcgggaataactctatggcaaagctttgagcatcttggtgatactatgctaccttactcctccctgatgtataaccccggcactggtgagaagcgggtattgtcttcttggaaaagttacactgatccattgcctggtgagtttgtgggttatattacaacacaagtgccaccacaggggtttattatgagaggctcgaagccttattggagaagcggtccttgggctaaaacaaggtttactggcgtaccactaacggatgaatcatacacacatccatttagcgttcagcaagatgcaaacgggtcagtatacttctctcatttacaaagaaacttcaaacgttcattgttagtattaacatcagaggggtcactgaaggttactcatcataatggcacggactgggtattgaacattgatgttccagctaacacatgtgatttttacggtgtatgtggaccttttggattgtgtgtaatgtccattcctccaaagtgtaaatgctttaaaggctttgtaccacaattcagtgaggaatggaaaagaggaaattggactggtggttgtgtgaggcgtactgaactactttgtcaaggaaactctactgggagacatgtaaacgtcttccatcctgttgccaacataaaacctccagacttttacgaatttgtgtcctccgggagtgcagaagaatgctaccaaagttgcctccacaattgttcatgcttggcctttgcttatattaatggaatagggtgcttaatttggaaccaggagctaatggatgtaatgcaattctctgtgggaggagagcttctttctatacgtcttgcaagttctgaaatgggtatgccatacaaaaataacatcaaacttctttgtcatttacaacttttacttcattttcactgattagcatggcttatttgtttattttttgtcttatatatctcaggtggaaaccagcgcaagaagaccattattgctagtattgttagcatttctctttttgtgacattggcttctgctgcgtttggtttctggagatacagattgaaacataatggtaacatattgttgactttactgtgagcttttgcttgatggttaaatacctaaatgttaagcactaacacatgaattcttgaaactcgaatcagcaattgtatcgaaggtttctttacaaggtgcatggaggaatgatttgaaatcagaagatgtctcaggtttatatttctttgagatgaagaccattgaaattgccaccaataatttcagtctcgtaaacaaactcggacaaggtggatttggtccagtttacaaggtcagataatttttattctctttattcattttatctcaagaaatttatagaaatgtctttaccttatgcaatctgtctcagggaaagttacaagatgggaaagaaatagctgtaaaacggctttccagcagctctggacagggaaaggaggagttcatgaatgaaatactactcatctcaaaactccaacacataaacttggttcggattttaggatgttgcattgaaggagaagagcgactgttggtttatgagttcatggtgaacaaaagccttgatacttttatctttggtgggttctctttccttttctattagcagcttttctctatagaactgtttttttatatagctttcacaatgtatagattcaagaaaaagggttgagattgattggcctaagaggttcagtattattcaaggaattgcgcgtggtcttctctatctccaccgtgactcacgcctcaggataattcaccgagatgtgaaggttagcaatattcttcttgacgataaaatgaacccgaaaatatcagattttggattggctcggatgtatgaaggaaccaaatatcaggacaacactcgcaggattgtaggaactctgtaagaaccacttttcgaaaacatgcttaactaggattcatagttataatgatatattaacttggaaactatttaatatatgtgcagaggatatatgtctcctgagtatgcatggactggagttttctctgagaagtccgacacctacagctttggagttctcttgttagaagttatcagcggagagaagatctcgaggtttagctatgataaagagcgcaaaaaccttcttgcatatgtaagtaagactttggatttagaatattggacttatgcagagatttcacaacctgttcaaaaatgtttcttgctcttatatatttcttgttctgaaaccacaacaggcgtgggaatcttggtgcgaaaatggaggagttggttttttggataaagatgctactgattcatgtcacccatctgaagttggaaggtgtgttcagattggtctgctttgtgttcagcaccaacctgctgatagacccaacacacttgagttgttgtctatgctcacaacaacatcagatcttccactacctaaagaacccacatttgcagtgcatactagcgatgacggatcccgcactagtgatttgattacagtcaatgaggtgacacaatctgtggtgctagggcgttaagaacaatgctttaccatagtttaaaatgatctaattttcagtgtttgtactttgtaacttcaacatacattcataatttacttacattttcaaataaaggggtttggtaagtctttcggttctgttaatgcctatagggactgtatattgttgagtcctcgttttgaggctttactaaagtctgtcttctcttgcgtataggcatttttgctctgttctcgctggtaacagtgacacacgccaatgttacataatgtaacttacattagacacacaaacagtgacattaatgtaaagagaaccgtagccttctaatttatgcaacacaacaaaagtgtattcaaatacattttgtaagaggaagcaaaacaatgccaattgcattcgctaaaaccgtaaaccaaatattcatcataggaacatactaatcaaaacaaaatgacattatccgcgttaaccattcaagccatcaaagagtagcagaaagaccatccgcatacaacaaacgacaagacttgtggactggaagcacagcatcaaaccactcaactttcccccaaatctcatctccatcaccacgcctttcaagcgaaatctccgcacaccaaatcacattctctttacgtctacttgaataatacacagacgcatcccacaacaccatcatcttcccaccaacatccaccattaaacaatacccacggtgataaaaatcaggcaagccttcaacaccattaagtttcttccattacctcaccattaagagctttttcttactttctctatttcttttctaataattttataggtaagaatcatctaagagtcctccagtgactaacaaacacttaaccatgttgtcttgttttagttattctcgtgaatgtaacaagaaccgtaccctttaatttgtgcaacacaacaaaagtgttatcatgtgcatttagtcaaaataagctagctcgtctacaagtaagcgcatatgtttagaagttttaaacaatgcaaaattgcatttcactaaaataccatggaaaaaaaatcattcatcatagtcaatactcattactaatagaaaagaaacaccaaaaaatattcaaaacaaaatgaaactatccatataagccgttcaagcctaatctcatggtagcccatttcatcaaacaacaacggaaatagtatccgcgcagagcaatgaaaaagacgagtggacactaagcacaatatcaaaccactcaaccttcccccaaatctcatctctatcgcgtctttcaaggctaatctcagcacaccaaatccttttaattttcttattagtcagacactcttgccacaaaaccgctatctttccaccaagatccaccattttaacatacccacggtcacttaaatcaggcaatccttcaacaccattcaattccttccacaaacttaccttaaagtcataccatttgaacactcgagttcccttatccaaaatgaacaagacattgtctaccacgcaagaactagagtttatgcgagacatagggtctactgcatgatacaaattatacttatctcggcctatacatttccatctatcttcctcaaaattgtaaaccacaaactcacttccaaacatgtatatttttccatcaagacctaagcttttgacttcacatctatatccaatatcatgttgatactcaatgcatgggttcttcagagtgccccaagtttgagtttttggatcaaacacttcaatccagtacaaggaaccgatgtcttctttacagcctcctgctatatatatcttcccatcaacttcacatactgtggaggaacagccccgggccactcgcattcctggagcctgacgccacctgtgactccgacaatccaggacagagacagaagaagaatagcgcgtccttttccagagtttgtgtctataagacttagtgccgccgattttgtagatattagaaccaacggctatgacactcgacgaatgcacaggaagtaaaccattgggagatggaacttggaccagaagatagccacttgaattctcggcaacgtttcgattaggttcccggcagagagtgaaccaatgcgtgttcatgtcgtaagggaagcaaagatagagacacttatccgtacggtttaagcgtgatcggatctcgtaaagttcgcgtgaagtaatgatagatcgaaaagttttggaaacgagggagagagttggataatacaaccttgagacgagtgagaagcagttcaataacaagtcataaggaagtgacatgatagagattggttcttctgtcaccggagaaggatacggcatcttcttcttcctctcacggagtggtttttcgccgttcatggcggcgtatggaagatctggctttggacgtcaatagggcaataacgaagattcttctttatcaaggaaggaataataagggtttccttgatttcaaaaatcgaccaaaacctaggcatataggcccaaagttagcatgtaaatgggccttacggaaaacgttttttgaattaggtaaatgagtcacaaaactttttatatggatctgaatctggtggatgaaaatagtatgaaacaaaatttgggattaatatcggatatcaaacattctttaggggttaatatgaaaagctatcagatattattgtcagcgggagtgacaaatcctgatcaccggaaacactattttagaccggatcttcttaccggaaatttgcgtcagcttcccctaaatgccgaattggcttccagctggttgaatcggtcaatctacatacagttcaaaaacattaagtgtttactataatcgcatgtggcgtatgcatgcacttgaactgttcgatgaaatgcctgaacgagaatgtagggttacaaagagttggggtggtttcttttagctatttggatcttgtgaatgccagaagggttttgatagaagggtttcagaaatcgccaggatttttcagcataatgacctttgagactccagcgaactcatgtgattagtacagtggatgtggatcttttggtttgtgtgtgacgcacgttcctccaaaatttaaatgctacaaagggtttatatatccattagggtttgcaagtgttttggatgctgaagattgttaccagatttgtctccgcaattgttcttgcttggcctttgtttatatcaatggactagggttctttatgtggaaccaggacctaatggacgcagtgcaattttctgctggtggagaacttctttccattcgtcttgcaagttctgaactaggtacggcttaaaagataacacgaaagagctacttcttcaattatagttttgtcttcaaatccattgatagtgtttctctttgatagcaccaacatggcttattgttaaatttgtttttgtcttaaatgtctaaggtggtttgggagatacagagtgataagatgagactacttttaaagcataacaggtacagtatttcataacattctttgaatatactaaccgctttgtttggtttgcaaatgccaactgttaatcctaaaagttttttcgtttggccattgacattgtcatttcttacaaaacacgaatatgtttacacagggtgttacaatacgaagaagccaatggtagcgaaagatggaaatattgtacgatacaagagacataaaaacacatgagatgatgatcacctcagtggaacttgaggctggtcaagacgttgttgttgacgggatcagccaagtgatcaagcaggttctgataaggtcccacaccggtcactagtccttggataaagtaaccgaggatggcgagcatagccagtctaccgttcttgacctccttgagtttcaactccttcagtgacttctcatctttcccaaacccaagagggttgaagaaaggtccaccggggtaagccgggttacctgaaccggccaaacccttctctaaccccaagaagtactgttttcccatagatcctgggttgtaccagtcctgtaacctccggtgctcagcgaatcccatcagagccatctcgagaacaaagagtgtgtaattgtctgcccagtaagtgtatgtccctgctggtggaatcacaccggtttggaaccaaggaagagcagtctctgctggaatcagaccagcctttcctaaaatctcaggagcaatagctccagctgcacccaacatggcgaaccgtccgttgatgatctctccgtatgctagccatcttggctcaatgaatcctccagtaccttctgggtctgaaagaccaagagggtcgaatccatagtcaccaggtaagctgcaagaagaatcagaacatctccaaattttgaacatcatgaagttctcaaaacaaataaaattccaaaagttgtttgaacattacctgccatccaagtaagagagactctgcgatgaagcaaaccacaatggtctgttggctccttgctgaaaaaccaaaacacaaaatcaagatcagattattcagtacatagagaaagagagagatctgtgaaagaatagagactgtcatgtaccttgacaggtggagttgcagcagctttaacaacaaaggaactcttcttctgtgaggcagacgcaactggttttgagccaaatatctgtctagctgtctgaacagaggaggtaagtgaagaagacacaagtgcttgtgctgccattttctctgttcctcaactcttttcttctgtcaccaagagatgatgatgatgatggtttggttatggtttgcaagggctatgttagggtagaagaaacaaaggttccaagtacttgtggctttcaaatagcccaactggttttgctcagattagattagtatctgcttcaccaactatatctgtccacgtggcaatataagttggataagagattatgttattctgtttttgcttatccgccacacacgaacaaaaaatctttacaaagatgactattggatacaaaaaatacatatgatttatatagattgaaaattggaatggagatgcacttgtgtggtagaaaaaaattttgaactattgatttacgaaaacattggagaggctgatacggttaaaaagcatccatggtatttgttaaacaaggtttccttagcatgaatcagttctcagtttctttttatacccaatcagttcaaattttgatataacaattcaactgataatagagataaacaaaccattaatagtctgtcaaatacaccaaagaaaaatcgtggtaaaaccgagttttaggcttgtagcaactctggatagggcaaagagaaagtacatgaataaaatagtacttaattacttattaactatgtgatccttcatccttgggcattaagaaacaatttgtgatggaaattgtaaatattatattttttttaaactatttgtagtttttaaaataaaaatctataattctttttgattaaattattttattaatcaatttgtaagagttcttttttgggttgttctattaaggtcctgtttgtttgtccatttggatgaaccatctcaatgaagatgaaaattgttgtttgtttttcatgtttaaatagatcatttgaatgattcagttgaatgtttttttctaaactcatccaaaaaataaaaaaaatctgactgagtttgatttgttcattctgctgaagctgattcagccaaaattataaaatgtcaataataccctaatctaatatatggaattacatccaaaaaccacatctcttcttcaccctctcctcgacacaaaacactcaaaattgagattcatagccgtcaatgatgctgattcttcgccggtgatctcgccgtcgccgattcttcactggagactcgtcggatccatcgccggagtgtagtaggtttgtgtttctctctctctctctctctctctctccctctctcgcttcctctctctcgctccatgtctctctcgttgtttctctttgtatccttgttgcaatcacttgttcttgggtttgatccaccatggttacattgtttaattgtgggtttgctttactttgctttgtgttgcttttgattcttcgattagctttagtttacggcttgtgttgctttgcttgctttgtgttgcttttgagtcttcgatttgctcttaagaggctttgttgtctctacattaggagcaacagaaccatttggtgctgccactttagcatctgcactttagccctctttagattgaccatccatagttacaaacttcagctgcctccttgacgtgttcaattgcatccaaagtggaattgtttttgtgtttataggtcttttgtatttttgatgcagaaagctaggatccagattgtgttatctgatttgttttgagatacaatgattgatgatgttgtgactcgtgtatagctcattgataaaaaactttgcattagtctctatttagtctcgaagaacaagtttggctctgagttttgttgattgatgatgttgtgactcgtgtatagcttataactgcttatttatacgggagaatttcatcttataaaagattttttctcttcagtccttgtttcagcaagttttgtctccaagtaagaaagctttggtttctcaggtacgtcctctgtaattagtggttgcatttggctttctgtagtagtagcatgagttcgtctaaggtttgagttcaaatactgtagaaatagtcaagaataatatctcatgattgttcaatatcaaatagtttttctttgctttgttatctctaatctttgtacacgttttatttgctttgctttgttatcataagttgtgtattgtttgctttgttatctctgatctttgttttatttgtttggtatctttgatcttgttctaacacaactacaaaacgtttgttttcattgtgtgctacagatgacaactatcaatggtaccgatgtgagtatattttcctctaaacttagatttactgtaacattttctgtaatttagactgattttgtacaaaaacacatgatcaactaagaatcttgcgtggaatgatgagcaaactcgtttctaccttgaactaagaattgaggagaagcttaaaggaaatattaggaatcagaatgtcaatgatgctgggagacagactattatagatagattttatgaggtttatgggaaagacatacatggagaaaatttgggatcaagtttactacttgtaagaagcagtatgaaggttttaagaagctgactcacaacagaaccggtcttggttactatccaaatgggagcataagaatgtctgatgattggtggaatgaacggtgtaaggtatatagattcttaaacttcttctgtcctttgtttgttctagatcaagttctcattgtttgtttattctcattgtttgttaagaatggcctggagctcggaaatttaaagataagccagtggcaaatgtggatttgatggaaaaggtatttggtacagtgcatatcagtggagccgagggctgggctcctaaacaaggtgaagagaaattagactcaatgcatcaagatgatgatggtgattcaacgcagatccctataactcaagatgatgatggtgaatcaaggcagatccctctaaatctagatgatgatgaagcagcgcatatccttcctactcaaagcaatgttggcaatggtccctcatattcaagtaagtcaaagagtagtaagaaaagatcaaggtctgtacaagatgaacaaggtgtagcagaggtgattaaggatagtatcgagtcacgggataaaattctttcccacaagaaccaactaatagagatgcaccctgagtttagttgctgtcagcttcgagccatgcaaattctacactcgctgcctgctataagggtgtggtctcccttatacaaagcagcaattcaacatcttaagaaagatatcgccaatcgtcagacattcttgttttatgaagatgatgagaacaaggttctctacttggagtttgaaactggtgtaagcaggaatgcatgagaaagaagacagtgtcttgcattgttatttttaagaattcttgtatttcaatggtttttatgaactctattgtctgttatcatcttgtgtatgagaaccaagtttttttagagaatgagaataaaattagctgctttctattatcttgtgtatgagaaacaagttttttatcttgtatatgttctgttgctcaggtctgcttaggtcagaggagtgtgaggtgaaaagattcttgtcggtattgtaagtttatcatttccttgttatgcttctgattgtatcgttttagtatatcatctgatttgagttttttatttgtttcaggctgatttagattcttcaaagcaatcaacttcacagtcagttatgcttcaagaggtacatttctgagatctatagcttgtacatttctgattaatggaatctatttgatgggcatgaatgtgatcaattgattttctctccgtttccattatgatcttgttgtgctttgtactgtcactttatcttggcgtagtagttcttagggtgagttataacaattggaaaattcttcgtattcaatccgtgtatgaacaatatgtcaatgtcctgtttttcactgtcaaaattcttccgtaatctgaagtgacttatatttgttctagcaattctcttgtctagtctcactcgtgttggctactttcttatgtagggatgactagtaatctgaagtgacttatacattcttgtttcatttttatgtagggatggatttgaaagagacatttagatttttagttgaggatgatgacatggatttggtactagaggaagagaacaatatgtatgctcttgtaaaggaattgtatggagggaagaatgtgaatactgaaagacagttagtgaggataaacagaggtggaggctggcgtcgtgttcagcggttgatggtcgagtccaaggtagaatgcttcgatattttacgcatgcaccagtcaacatttaggactttatgcaagattctttcagaacaatacaagttagaggagtcctgcaatatctatcttgaagagagcgttgcaatgttcatagagatggttgcacaagatttaactgtacgggtcatagctgagagatatcagcattcacttgagacagtgaaaaggaagctggatgaagtattaagtgctcttttgaaactcgcagcagacatagtgaaacctacaagagatgatgtcacaggtattagtccctttctagtaaatgataaacgctatatgccttattttatagattgcattggtgcccttgatggtacacatgtgtctgtgcgtcctccatcaggggatgtggagcgatatagaggtaggaaatctgaagctacaatgaacattctagctgtgtgtaatttcagtatgaaattcaatattgcatatgtaggagtacccggaagagcgcatgacactaaagtactaacctactgtgctacacacgaagcttcatttcctcacccacctgctggaaaatattacttagtagattcaggatatcctactagaagtggctacttaggtcctcaccgtaggactagataccatttagaactgtttaatagaggaggtcctccgacaaacagcagagaattgtttaatcgtagacattctagtttgagatctgtaatcgaaagaacatttggtgtgtggaaagctaaatggagaatacttgataggaagcacccaaagtatgaagtgaagaagtggattaagattgtgacatcaacgatggctttacataattatatacgagattcacaacaagaagatagtgattttaggcattgggaaatagttgaatcatatgagcagcatggtgatgaaaatgatgggcatgttccatatgtgcctactggtgacagagtaatggagaatatacgagattccatcactacagagatggccaaaggaacaagactcccatattaacaggttccatctctctgtcttatgttattgattgtctctgtcttatgctattgtctgtttctgtcttggttttaaattttgtgactaatagtgacagctgaatggtcacgtcactacataagttggttgattacacacgttttaaattttgtgactagtagtgacagctgacaagtaattcgttgaacatagtgttcattagtttggattagacttgattcaattgaatagcttgacataatgacagctgaatggtctatgtttctggttttagctcattgttgaatagtctctctctcaatctagttgttgtattcttgagcagctgcaattctagtgtctcttgatgttgtttgctttagtgttatggtttggtaatatgcataagaccatactttggtttctgattctagtttgtgtcatgattgaattacttttgagaatgtgtcatggttgaatcgttaggtaagtactagccaatatgcatgcttgctcttattggagaattggtgatgattcaggttattgctcttctttacaggtttagtaatttgaaattgaagtttgaaatgggaaatgatcaacgacgacaagatttgaagcacaaaaccaaattctctttttcaaactttactttgatttataagaatgtagcaattgacttgttacttaacagagggtattttagtcatttatatatatatgagaaagtgaatgattcatccaaatgatcaaacaaacaaagctctatctaaatgatgcatttagatgaattagcaaatgattagcaaatgatcaaacaaacatcattaagatgaatcattcaaatggattatttggatgaatcatttggatgcaaattccaaatgatcaaacaaatagagcctaaattttttgtttattccaaaatattgaagttgttttgctataattttttatttttatatttaaacttactaatttcggtttctttttggtttcaattaaagcgtaaaagccgcacttataaatagtttagtcgactgttttttgaaattagtaacttaatggtctcggaacagttatgttctacctgagacacaccaacgttcactattaaagtggcgatttttttcaagatatagttaagtccaaatggtgggaattgaattaattggccatactatctgtctcgatcgtgattttaggcccggcgacattagcaagtctttaacatgtgtctcttcgaacgtttagattacgcactgtatgtgttcgatgaaatgcctgaccgaaatgtgagagttcaaagctacgctctttttatctggagataaaaggagtctcaggaatcgcttgtagatcctataaaatagaaagtgaactgctcaagcctaagctctccagttgtttctttttttaattggtctttggtctatatttgagttcttgcatctcggtaagtcggtatattggcttacacacgagatgacgaatcacagttccatcttttttattgattcagagtgtagacgtctacctctcactgagtctggtcaattttgcgtggtttgattgggtaaaagtttggagttcttggttcagacaatgaaaggtaagagctacaaattttcatcttttgattggttcaaactgttgatgactatctattattggttgtatcaaagacatgaaagtgacacaatgtttctatatgaggccaaccgttgcatggtttatttggaagaaagttggaatttttaagattcaattctttgggttcaacttgtaataaagttgttttataaacaaggtttaagttgattgtgaataaagtaatgcagaatcttggaagatgggtgctgtggtcaacactgtttagagaattattgtttattaagtacttgagtttgttttcgtggattactttctcttgcactaatctgaagaagattgttcttggagacacaaggagcacacatgatgacgaggtttgcttgtttgcacctctttaccatgttcttgtttaccttgctctcaggttcaagttctgcagttataacgacagaaagtcctttgtcaatgggacaaactctcagctccgctaatgaggtttatgaattggggttcttcagtcctaataacacccaagatcagtatgttggaatctggttcaaggataccattccccgggttgttgtgtgggtggccaatagagagaagcctgttacagactctacggcatatctagctataagcagcagtggaagtcttctgttacttaatggcaaacatggcactgtgtggtctagtggagtaactttttcctctagcgggtgtcgtgcagagctttcagatagcggaaatcttaaggtcatagataatgtttcggaaagagctctgtggcaaagctttgatcatcttggggatacactgctacatacctcatccctgacgtataacctcgccaccgctgagaagcgggtgttgacttcttggaaaagttacaccgatccatcacctggcgactttttgggccagattacacctcaagtgccatcacaggggttcgttatgagagggtcaacgccttactggagaagcggtccatgggctaaaacaaggttcactgggataccgtttatggatgaatcatacacaggtccattcacccttcaccaggatgtaaacgggtcaggatacttgacttattttcaaagagactacaaactttcacgtataactttaacatcagagggatcaataaagatgtttcgggataatggaatgggctgggaattgtactatgaggctccaaaaaaattatgcgatttttatggtgcgtgtggaccatttgggttgtgtgttatgtcaccttctcccatgtgtaaatgcttcagaggttttgtaccaaaatctgttgaggagtggaaaaggggaaactggactggtggttgtgtgaggcataccgaactagattgtctaggaaactctactggcgaagatgcagatgacttccatcaaattgccaacataaagcctccagacttttatgaatttgcaagttctgtgaatgctgaagaatgccaccaacgttgcgtccacaattgttcttgcttggcatttgcttatattaagggaatagggtgcctagtgtggaaccaggacctaatggatgccgtacaattttctgcaacaggagaacttctttccattcgtcttgcacgatctgagctaggtatggcttaaaaattaaaatcacagaccttccttgatatttctctttctttttagtttaatttgttgtcttacatttctcagatggaaataagcgcaagaagactattgttgctagtatagtgagcctgactctattcatgatcttgggcttcactgcgtttggtgtctggagatgcagagtggaacatatcggtaacatattgatgactttactatctaatgatctcttgttgctcttcaattcatttgcttgcaaaagaaaaaaaggttttaggctcttttacatttgttagaaattaccgattactaaactagaataaaagggagtgtttccactaaatcgacgcactaatacatgttctttaaacgacaatttgttcttttggtacattgatttcggctttaaaaaataaaaaagcttaatatgctcacatacgattataacgccatgttttgaattgcagctcatatatcaaaggatgcatggaagaatgatctgaaaccacaagatgtcccaggtttagatttctttgatatgcataccattcaaaacgccaccaataattttagtctatcaaacaaactcggacaaggtggatttggttcagtttacaaggtcagagaatttatcctttttgctcttctcgattctctgtttatactctcaaaatgaccttctgcaattctgttttagggaaagctgcaagatgggaaagaaattgctgttaaacggctttctagcagctctggacagggaaaagaggagtttatgaatgaaatagtactcatctcaaaactccaacacagaaacttagtcagggttttgggatgttgcatcgaagaagaagagaagctattgatttatgagtttatggtgaacaaaagccttgatacctttctctttggttggtcccttcttgcatccttcctttactattcagtaactttttatatatatgtggaaactgtttgtctgacagttttatttcttagattcaagaaaaaggctggagattgattggccaaaaagatttgatatcattcaaggtattgcacgtggacttctctatctccaccatgactcacgcctcagagttattcaccgagacctgaaggtcagcaacatccttctggatgagaaaatgaacccaaaaatatcagattttggattggctcggatgtatcaggggaccgaatatcaggataacactcgcagggttgtaggaactctgtaagaatctaatttcaaagacatgattaactaagattcaaagttaatatcagatattaacttgggagaaactatttgatatatgtgcagaggatatatgtctccagagtatgcatggactgggatgttctctgagaaatctgacatctacagcttcggagttctaatgttagaaatcatcagtggagagaagatctcaagattcagctatggcgtagaaggaaaaacccttattgcatatgtaagtaagatttataggcattgacacagtaagatcttgtatttgattctcattaagtgcgcagatctcgctgactgtttgaaaacatgtattgctcttatattcgcttggtctgaaatcacaacaggcgtgggaatcttggtctgaatacagaggaattgatcttttggaccaagatcttgctgattcatgtcacccattagaagttgggagatgtattcaaatcggcttgctctgtgtacaacaccaacctgcagacagacccaacacacttgagttgctggctatgctcaccacaacatcagatcttccatcaccaaaacaacccacatttgcatttcacacgagagatgacgaatcactgtctaacgatttgatcaccgtcaatgggatgacgcaatctgtgatccttgggcgttaagaaaccatttgtgatggaaattgtggaattgaagtgtgttaaaattgttctcttaaagagttcatttttcagtgttaatgacttcaccattgtttaaaataaaaacttcaacattgtttaatccaaataaaaaggtttttaacttaaacatctcacgaacttggaagagattgaaggcaacccagaagagtcgatggatccttcgacctatatgttggctcattcagtggttctcgacccatctcctattctggggtttcttcggttccaatgtgtgtcgtctcacaacttctgctctcgccggtgacaccaatgttaaatttgggggagaatcacttaagcccagattttgggagttggaatcagccatacttccatgtgtagtttcggtctcgatttggggaactagagttcaacgacattagcgattatgcactctaagtgttcggtgaaatgcttgaacgagatttaacgtagtttgcagtacaagaacttgttccggtatatctagtcaacaatttaaactgtgttgtaagataaaaacaacgacttcagaaaccaataagaaagatttgatgttaattcatctgatttattcatatattcatctttcaattgttgcagggaatgtagatttggttcttggactccaagacctggcaaggacatggaaacaacacaatatttcagtctgaagtcgatcgattggattcttctagccaggctataaattctcatcttttgactaatgcagggtatacatgcctaacattcactggttctggcccaacaacttaacaatgacatgaaaaatgttgctttgtgaggtcaaatgttgattgggtaaaaggttagacttcttggaaattattgaaatttttttggtattatgagataaggtttagtaaagtttcatggaaattactactcacaatgccaagtggggaacctagactgttttttgctgagatattgcagctttgaatcagtcaatatgtcaagactctatattgcagaccttttgctcatctcttgtggtcaacattgcttataggtcccagaaaacagttcccacaagtccctgcgattttgcttttcctggctaactttctcacttcgcttcataaactaatgttgaaaaatctgattgattgatattttcatctcagagtgtagatgtctaactttcattggttccaaggtcaacttgaatggttgattgggttaaaaggttagacttctccgtgacaaactgaaaacataattaatattatttttatactaataatttgattgtggatgaagtaatgcagaattttggaacacaactgcggtcaggcagtcagcattgttttaaggtcctcacaagcccctgactttgttattgtgacttactttcttgctaaataaataattctttgttttttaaattaatcttaagaaaatagttcttgtagacacatggggaagaagaggattgtgttctttgcttgtttgctcttgtttaccgtcctattacgttttagctatgcagggataacgacagaaagtcctttgtcagtcgaacaaacactcagctcctctaatggaatttatgaattggggtttttcagtcctaataactcccaaaatctgtatgtgggaatctggttcaagggtatcattccccgggtggttgtgtgggtggcaaatagagaaacacctactacagacacatcggcaaatcttgctatcagcagcaatggtagtcttctattgtttaatggcaaacatggtgttgtgtggtccatcggagaaaattttgcatctaatgggtctcgtgcagagcttacagacaacggaaatctagttgtcatagacaatgcttcgggaagaactttatgggaaagctttgagcactttggtgacactatgctacctttctcaagcctgatgtataatctcgccacaggtgagaagcgggtgttgacttcttggaaaactgacactgatccatcgcctggcgtatttgtgggtcagattacaccacaagtgccatcacaggtgcttattatgagaggctcgacgcgttattatagaaccggtccatgggctaaaacaaggttcacagggataccactaatggatgacacatatgcaagtccattcagccttcagcaggatgctaacgggtcaggattctttacttattttgatagaagtttcaaactttcacgtataattatatcatcagaaggatcaatgaaaaggtttcggcataatggaacggactgggaattaagctacatggctccagccaattcatgcgatatttacggtgtatgtggaccatttgggttgtgtattgtgtcagtacctttaaagtgcaaatgcttgaaaggatttgttcctcattccactgaggaatggaaaagaggaaactggactggtggttgtgcgaggcttacggaactacattgtcaaggaaactctactggcaaagatgtaaatatcttccatcctgttaccaacgtaaagctt

SEQ ID NO: 105 - DNA, 87394 bp, Arabidopsis thaliana
aagctttgaaagctgcaaacacaaatccttattaaaccgatcaggtcgcgtagcaatccattgaccaaatttgataaaagcaggacctgctttctccagagttcgatggaggacctcatactgcagctgtctgtaacgaggcccgcaagcaaatcccaacaacgccataataacatttggagaaaacaaaattgctaaataaagagctctcccgatcagaacaacacccttgaccgcagaaaacactaaagacgagagaacgatagggaagtttatcgaactcctataaggagaaatgtgtgaaggagaatagaccacaggatttggaaccaccctttgcgcatacgccacttgtctataggtaagagccaataaaccaggtaacaagaagtgcgaacgggctaaagacaagctacacgcttgagcaatctgacttatccgaggtaagttccaactacgactcagagttactctctgtacaagccttccccaagagacttgagcatgttgcttaactacattactcgcaactgcaatcgaatagctcctacgcgcaagctgatgatgattactacctaaaaaccttcctttaacattatgaagaagacccaatgtgtgatatccattactctgaattctgaattgtggcaactttacagaaacattaatagctgttctattattctgattcgaaaacagagttctactaatcactctagagatcaaaaatctgcaaaagaaaccaaaaccaaacccacccaatgaagatctaatcaaacgaagactttggagaaaagttcaaaactttataaacaaaggttcaatttttaaacatagcaatcaatttaagcaatctccggctaaaagggcaatcaaaattaatcggattagagattcacgagagaccctgaatatgagattagagacgaaccttgagattagggtcatggcgagaggagacacgcaaaaggttgagtttttggaatgatctttaaaccgttaaacgttgggagcataatttcatcgatttagcgattagggctgaggaagctcttccctcgccggaaaaagaaggttctgggttttaggagctgaagaaagatacggagaaagagaagtcagtgatttggtgcggagaaaagtggggcccataaaaaaaacctcgtgggcttcacgctaaaattttatttgtcggcttattcgtttattggattcactttgacatttcaatttattttattaattggatgaatgtttttgaaataaaaagcttggtagatagaaattaaaaatatatggaaaattctacttttccatagttttcacagaggtaattcactaatttcgaattatttatttaattattttgacttatttattttatatgaaaacatacttatctttccgtaaagaaattatcaattgtttttgtgtccattttcccaactgaaagtgctaaataatttgttgtgaaaaaataatttcacatttttataataacaaaatttaattttggtcgatactccctctattcattattatttgattttttagaaaaaaaattgtttttaaaaagttgatttttaagttttctagacactatttttagttattattgatgaattttaaactttaagacaaataattattggtttagaattataaaaaaatctacatcacaaaaactaatatatttataattagttttaatatgtgtttgtgtgtttttctagaaaatcaattaaaaaataacagatagagtaataagtaacttgaccagttaaacaaaaaaaaaaaaaccttaaaagagaatatggtaattgcaaaagatggagagacacgattgatttatctgatgttaatagttcgggtagataggcgcaatcactctctggcccctatgatcccatgatctatttaaaaaaaaattggttgtaaaatcttaaaacagttgctgcctaagctttaggttaggttctgcacatgccctagcttggtgtacactctaccatccctaaatacatccattccatatttccatggatctaaactctcttttgatagttttagtcttcatgttgaagtagagcaaataaaaaggaaagaatagagtgcatcaagatttcgtcaagtattagtcactccaacaataattcgtcctcagcaactaatctaataaatacgaaattcataatttaattcttagtatccacccataattcaagatgtgtactttcttcactaagttcctcaaacctatctaacaaaagctgaggatccccatagtatcatgaaacctagcagataatttagagttattaatgaaatcatttaaaagaaaaaaaataaacagtcctaaatcctaatataaatccaagtcaaagcaagataaacaatgaagaagttattaagagatgagatcacaacagttgttttggaatcctctaaaggaagataataagaagaaaaaatcctctagctcaggaagaggtttcttcaatactcctttactcgacacttagccactttccataattttcttcttctcacagactctcggctttctccccttagtcctcaatttccttttcatgaactgaattgggatctttaatctatcagaatctacctttctcttaagacattcagggatacatgaaagggtagtctatgacaggtttatcatcacacaacctttgactcgccatcccaaacatgtatcctaaggcaatcccgactggaacagcaacaacatgccactttccacaatcttcatcttctcccaaactctagcctttcttcccttagtcctcatttcctcttcatgaattgatttgggatccttaatctaccgatactaatacaccatgtacctacattgaggaacattgtatgcaccagcagccattatgcctcatcttgcttggtaattcttgtttacaagacgagctacaacataacgaccaacaaatctttccatgaaacctaaaagatttacaacgttctccatcaagacgtatttgggcttcaagtatagtctatgatattcatgaaaccgtcacttcattgttttttttcatcttgaagtggtttatctttatttctaaatcggtgtaaaaccactaagtccctggcatggaagacccccacatacaagatgcacatattcctaaaagaacgacacaaggtcgaaaagttacgaaaagtggggaacaagaaatatttggaggatttacatgtgtaattaacatgacttagcttacaagaagtggcaataaatttgacttgaaacccttcgttacgaattccttaagtttttatttgtattttctaatgaaaccatatacagattagaggacaacatgagaaggccaaagcagtaatttaaaaaaccttaccccaatccatcatacggctcccaagtatcttcttctgatttgtattccttctaatacacctaaaaatgatgtaacataagagaaagttgatatatagttaatcccatgcatgatgactagcatttaaaaagaggactcttataaacaatatacgtgctgattgtcttgcaaaaaaggcaatagcacgaggttttatctttttcatgtaagctcttttattttggactgatttttttccaaagaaaaccgtacagttctagtttaaatagataattttattttaccgttcatataaaaaaaaagccaaaaataaagtaattttaccaatgttatctttgtaacactatgtcacaatttaaaggttacttctgtgattctaaatatattgggaacaattaacaaacttcataaactatatgagcaatttcattcgaatgttttatggaaaaaaaccttcacgtaaaagattttcaaaagaaaatctgtaaatgatatcaatatataaaggatatcaatataaaacggatatattttgattcatgatagtagagaatatataaactctttggaggaaaataagccgtgtgtctttgtgatactcggaaacttaaacaatattagaatcaatgtgatttatttatagaaaaaggaataaggcttttaagcttcaatcaaacgaagcttatagctgaagatattaagaacttgttgtattcacataaagcaaaaaagatgaaacttgttcgtcctttattgtacatctaaaagactaaaaatttatgctcataatgttttcttttgccttttatattcatattacattatacatgatcctcctttcttttggcgcatggcatattttgtcaaactctattacaacattgattctaatcgatctacagttgaaactagtgaatcgaattttcaggtagaagttaaatttgatttgaaatgtactcaagtttatgctatctttctcatataatatccaatattttagactagttatatgttgtttatgtcgaagattgttatttgttaggtacgaaaaatttatatgagccaccacatatatagttgtaatcgaccattttctgtaatttattggttaagatttaagaagactagaagagggaccgatgtcactagattcacaaacttagcaacttaaatttacatgaatccaagttacatattaaaccaatgacaagagccgaagcacctcatgaatccaaaaaatctacgtaggacggtaacttttgttgatcctgagacaaaggatatagccgaatatgagttgcaaccaaatcttaacttctctctatcaacgacgataatcttagttgcaacatgaaaaacattcataaacaaacatttgccggttctcctttagtcgcggaatgatctctttccaatggccagagacatgttgtggtaatcaagcctagtacttctttaatttatggttccgagaaccatatttgaatgtgtagattcaccgttccatacgttcactttcgaccttaactccattttcactttttagaatcttgaatcctgactccatgctatgttcttttaatttgtttgtactttggagaaaaccaacattaatttccaatagggcataatttgagattttgttttttaataataaatacgtactaatcatgcatgggacttgttgagtattttatcgatattgagatctaaggtaagaattctgttcttgcattgcatatatttttgagtggcatttgatagattagacacacatatatgtctttatagtaacatatgaataatcttttttctgtaaacataaatgatgttgaatgcaaatcagtatatatttatcggtatctatactaaaatcatatatgtatattcaaatcataaagtaggaagcagtgtgggccgctattctactggcttccactactgaatttccataatatatagttcttaatcgaaccaacaaaaagttgaatccatatggacacatatttatacatggatatgtacgaacataaatacatgcatgtatccagaaaatgtgcaagtttgcaagtttggacataaatgtaactatgtaagagtaacggcactatcacaaacaattaggttataagtgttggttttgtgattgttaaaattaaaatttatgattaaacatgaaaaaaacaactctataaaaacaacaaagaacttcatatgacaaaccaccaattattatgttctctaactttaataagtgattaacaaagatgttaccaacgacaaaaatatgtatatatatatattcaagaacaatgacaggaacaaaaggttattcaacataaaaacaacccatatatgctaaattcagcaataaaccccccttaaaatattgaaagaagaagaaaatacattaaaaattattgttatgctttagagtctccaagctgaatttagcatatgttcccatccgtcttgacaaccacaaccctctctctttaatcacctatatataattaaaaagtgaaatttaggttaattattacatatataacatgagagtatgtaagttaatgtttttaaaaatatatctatctattagtttatgatagattattatcccaaattttctaagccctaaatcattcttgctttcgtagttggtcccctccaacactattgttgcctctgcccacctttgaagagtcaccttcttcttctcccatctctactttttctccaagtaatgattcaatctttgatcatgacttgtgaattttattttcttttatttttatgctaagcattattaaataatatcttaatgctaattaagaaccgtatgatatacgtaattcaccttctctacctgaaattgttgcccccaaacgttggtgtccaaaaatcggctgttgtttcgttagccaccggaaacgtgcttgatattgggacgagacatagaccatgtcctcttagttcgtgattctcattttcatcttgactcttcgatttaccagatatctacatgaatccatactgaaattagtacttatttaaccatgattatagcacgaagactccaacttggacaaaactaaaacactagatcgtgtattgaacctgctgttgttgttggttcgaggcaccttgtttcatgtatggagtgcttagaacctgtatttaaaaaacattaatatgcttaaaaatttgctcatttctagggttttatgaattcagtgagttaggagagaaatcacaagaaacgtacagtgacttggtcgtgaaggaacttgatgtactctatagcttcttggagaacagatgcagtatctgtctgaagtttaacccaaagatatacaaaataaacaaactaagaagctcaatacataaccaagggaaaataaatgcttttggttgtatatattaagccatataaaataaagtaaacacataaatcattcacctttccgaaaggtgaaactagttgttgtaatgaagttatctggtcccttagattctcttttctcacctgttacatatacaatccattttatccaccaagaaattgaattaaaataaaaggtcttaaacaaatcttgaaatatgatcatgtaccttgaaagttggcaacggtgaaggcgtggtgactctcggtttcttcgccgcagattcattatcctttgctctcttcaaagactcactctgagctcttgtcttcagattcttctcaacaaaaataaataaataaataaattcaataatatagccacaaaacttatatagtagcaaaattattttgacatatatgagataatttaccttggttttgtcctccaaacgagtagatattatctgcggagtggttacaaaattgctcggcgtcgtgttgtttaagttagtggttgatgaagaattccaaaagggtcgagagtttgcgttgttagagaagctgttaattagtccataagctacttgatgatgaggatttgtcttattagcccaagaaagttgaggatcgttgattgaaccacttgtggtggagacaaagttgtatggacttggttcgggatcgtaaaaggttcgtatcaagcttgaggacgaagaagttgatggagatgaagaacaagctggattaagtatataaggtgaagtagttgtggataagaatccttggccatgatcttgatcttgtgagctccttatgaagcttgagtttaagtcttcttgtctgaaaaatacaaaacaagaacaaaagagatctcatgattattattaaaaatcttcaatcttgttcatcaagaaagtgaacaaaaaaaattaagttagggtttttctttaagaagtttacaaaatggtttggttccaatctgaagaacaatttgaggaaaaccctagacccatcatctgcaacgtcgagtccatcgtcacggtacttcctccactgtcagaatccgcctctcgctgcccgaaaacgatgttgttgttgtccgtacaagtcatcctagatttgagatgattctcttgcgagctaaaatcattggaagtgatagccgctccgaagcatggtgacaagaaatgatccgaaggagacataacgctccttggcgagttccaccacgcgccacctccgccaccacaaatcgatgccgtagctttaaactcctccgccatattaagagaatcagaaagttttagtataagctttctactagatcgttgctatacgaaggttaaagtttttatatatatgagtttgttgtatgtgatatgaagagcataagtgtaaaattttgatatatgtttatgagggtgtgtatgtttatataggcaagtacggacaagtgtgtggaaattaccggaatttagttgacatttgaagacaaaaacttatatcatcataacattcctatgtgatttttttaattaaataatcttgattttaaattttttccttaagctaaatattttatttgacagaaagatgttgtaataatagtgttcctaatccctcaattttcttctattattataagaacaactgtctttgtgagatttgtttctttgctgcttagcttttcgaagaagtgataatgatcctcattttataaatatttaaatatttaatttgagattagataggtgtttggtactattatgcaagatgccaaaaggggatactatttatatatagacattatatctaacggtaacctttgattggttgccatcaaattctacaaatcgatcgtttatattaagtggtcagaaatagaaaacatatcacgattttgattaaatcagtttttagtaattgtatagacaaaacacgaaaatgactgattatagtctacgcatgcgtatatatataaatgtacataaatatgaaagactaaaattttgaaacttgatatttttttattactttcatgcttccatacatgatttttatcagatcactttagtaagcttaggaaaaaaaaaaactaattagtctatgcaagcgtattaataattgttttattattttggtaattataaacgactaaccaatttttgaacaacgtttcttctaattaattatccatactttcatacagtaatgattatcttgaagttaaaatatatgttttctcaatcgcatttgctaaaaaaaactttaaaacatatatcttcaaggattagactcacttattttcaaaagtaatattcaaagattctttcgagataaaagttgagtcctaggctagctcgttcaggtttgagttttcagtacttgggagggatatttatactttaacaggtattactattactaaaaattagttttagatcgaaaaagcgatcataggaatttttatttttttaatagacgatcaattgtttttagctcgattggaaaacgcaaaattaatggcaaaacctagagttagcacttgatatgagttcgatatttatttcattgtcgatcggattctttcggttaaaaatagtactataaaataagatttgttcttgtggcttgaggctaaagggataaatggtatatgatgacgatcgtcgatcgatgctgagtttcgatctgtgtgtcacgtcaccgtttctggacctattgtgtttgtgacttttttcacaatctctttataccaaacggtccttattcttttcaactagctttttctaaattccgtaaatattttattcttctaataaatttgataagtcaatcaattattgcactttaattacaagtcattgttttgtttttcttctttctcttaattctttttccattttatgtgatagactgatagccacacaaaatatcaaaaaatggatttgttgaacctgataatagtaaccagttctgttctttatgatcattatacggctcgaggcatagtgaaccgggctgtgtcaccgtccataaaatatacaagttttatcaaacgataggcatagataataaacataatttcaccgatatccatgtatataatatttatatatctatctcctttcaaaataaaaaaaaaaattggacatattctaagctaaattgtgctagtatcgttattacgaaattcaaatttacgttatgtatcttgacaaaaaaaaaattgttatgaatgcttgaagaatggtatttttacgttacatgtaatacaaaaaagacactaatcatttatggtagtccaatgattcaaaaatatattttgtaattgggagaccattgttcatggttagtagaagtgaaagtcttaaatgtattcggcaaaaaaaaaaaaatatcaaatgaaactcgtagatttttattgttcatggctattcgaattgtgaaaagtcttaaatggtaaaaatatgacacaaaaatatcaaatgaaactggtaatattttattggataatggctattgaggacaaatgaagactataaaggccccaatttatctaattattattaaaatattaattaagaactaattgaatttttttcttaatggtctctctatgcgacacaatgcattttgacttaaaacttaaaagagctttgaagcactgaaatacagagacagttaggtcagatccatgcgactgactagtaagttttcatcgtgcaattaaaattaattttaatataaactaagaaagtgtcaaaacaaatttgatcaatttgcttaagcccaccagtccactccgccaaaaatgaaaaaaataataattcattattgcaacgtgactaactttttatttatttatgaaaacacttgtttcgtttaggttgatatcgataaaataaaagttatgaaatgaacgtcaaaagaatgtgtcacagccaccgtatgacaacataagttaaatccgaagaatctttgtcagcccatcggttgttttctctaacggtctggtcgatcccatcgatatgtacaccgacactcctctaagctcttgtcggtcgatatttggattttattattatcggacacatatgctaaattttatagtccccaatcttattcagctttcttccattttctgtttagtatattcatggtggcaacatatatagttgaatcaacgactagttttgaaatataccgcttttcacaatgcaagtatacgaacactttcggatgttggagtaaaacttgatcacgaacaatgagattcatgcactcgttgtatgaaaaaaacttagttgacgaagaattgctccaaaatacgtattgctatatacgtatataaagtgatatagacacgtatatacgattagaagcaatatgaacatgtataaaatttaaagtaggtgaaggaaaacgacaagtagtcaaaaaataggacccacacggcaaatatgagtggagactttgtttggcgcagatagtcggataagtgtcagcgactcattcttttcttcaaaccccaaaatcaaatcatcatatgtcctaacaattttttgttttgtatttggaaaagcacatgtttctttgtttttatgtttatgataacattctttttacacgtaagtaacgtaatgctgtttttgggactcacgggagctcatatgtaattattattttcatgtagttcacataagttcgaaaactaataaataattaagttatctaaaaagagtcctagtattatatgaatcaaattctcaaaatgtcccatataacaaattatgtcaacaacatacgtactaatctcttttgcaacaaactcagccttaattttttaaacaaactaaacatatcgaaatttaaaaggaatacctcatattaaaatatactataatcattaaaattgatataaatattcgatatattgatatatataaaccaacaaaaaaacccaagtaatattggaattcaattaatactgttactaaagagtgtatatcatggcgagatgtgttaaaacttgtatagttacgtaattttttagtgatggtgcggataaaaacttcgaaccattaattgtcaattatacagataatttgctatctcatacataaactataaaatattattatgaggcttttaacatgcaaaagatattagaacacaaataatgttttgttttatttttattggttgaaatgaaagtcactgaagaataacagtcgaagaatacaagcgtaacgcatatttctctcatgacatgccatttctacatccgattttacatatcagttgtatttctatttttatttatctatcaaatttttattgatcgtaatattatatatctcattatctcatactatgtaggatatatgtcatactgacgtaaggatgaaatgcagaaaactacaaaaacgaagctttttttttttgcacgattacagaacgatgatgatacgatcggaaaaaatcatcatggccgtgacagacacgtggggtagtgagctccatgaataaagaaacgaaattgtattccttgtagcaatgacggtcaaaagaaaagcgctttaattagtccactcctatcttaagttatggttattaattatgatttacggtcagtttaattattcgcttaattaattacagtttatatgacaaaatcaacataatgttcttatggtttctttggtaatttatcaatttaaaatttattacatgccactcattctcataatagatgtcgcaaatgtaatatcacaacatttgtagagtgtttgatgacatgacaatgacatagtcataaggtgtgtacatctatactttgcatcttgtttttctgttgaaacctgaatttacatcgaattcaaatatttataaaatggattgtgtatgatttgctacttcttatttttcatatagatatattaatttacatgtgacatataattacttaacttatatctattatagtattattatacaactagctaactaaaagttacaaatatgttatatactcttagctgaatcttttgattcatatatgttatatattaatttgtgtccatttacgatcaatataagttattttgtcatggtgaaattaaggagttgttacattttagattttacttgtatgtttttttttgttcacaattcatgcaatcatctaactgataaaaacaaatttggcaataaaggtaagattttaagtttctgtgtttgtaattttgcttggttatttttatcacgaattcgtggagcaaaacgaattttgggacagcaccgttccaagaaccgtctacatgaaaaatatttacatgaagtccccgatcatcattatgcaattggttctaccggtaccacacattatcaatacaactggctaaaaactaagcatggtcagactcttagtaggtggtgtccagaatactgtggtcgatcaaactaatgttttttatgaacccaaaatgttataaacttgacacacaatttcttggacgccaaacacaaaaatatgtaaattagtcatgtttcctatatcaaaatttgaatacgtgaccttgaggcgcactacttttgagaactctcatagacaccaagagaactacatatgattaggtaaaaactgagaattaattgggactgagaaaatatggaattattcacatgtaataagtcacatttgttttgtagacattctacaaattatataacatctaaatatggaacagtattttatggttcatgaacttataaacatgtaatgattttttatttggctaaaacatgtgaaactggtgatagttgaaaaagtacttataaacttctaattgtcttctgagaaagtaatttaaacaaaaaactgtaatcatttgacacgctaaaattttggtttatgtactactgattagtggttgaccagtgaaaagtagtagtcttcttataagttttactttttttttaggtaaagttgactcctagtttatctcttattcaatttattttcttgattacaattaaaggtcaacgcagaactcaagatcaatacgactcttctagatatcgtgccaagaacacgacaagagccgccccacgcttttactctagttttgtcattttcatttgttctttttgttttccgaaaaattctaataaatatgaataaaattcaaagttagtagtaaaacccaggatcatttgaaagatcaaaaataatttattctaatcgaagattatgcctatagtttttgaagtaatagttgagatataaagagagagcgatctcttgctatacttggatataacatttgcaactaaaaagaatatagtttgcaaatattgttgttttataatagagcatgttatttaagtcaaattacatacactaataaaacttgaataaaataataacatttcactaacctttgttttttctttaaacatatataaatcactttctctaacctttgttatgcaaaaatatcctacgttcctaaaatacagttatatgtttaaaactctatacgaaaatgcagtcattattcttcttgagctattttgcatccgcaactcatcaccttcacactagtataagaaggttacaagctctgatagactacaacattgataataaattgtaatcatcttcatcatttttaaaataagattatatattgcccctatattaattgtaagaacattttacaaaatctgtttaaatgttatacagtaattaataaaaccgtgtataaactatacagtactagtatctttttttgttcactttatagacatagtaaattgtactataattaaactttatgtcttttttttcctatattcgtaagaacaacacgtagtcaacattaataattattatttttgttgccgcaatatatttcacttgtagtctatgactaaaaacaaataaattatttttaatgagatgcgaaatgagataagtatgcttgattgcatcaggccgaaattcggtaaacttgagaatctctattacttatttaattttcatttgttatagattttctccgtaattttcgttttagtagagaaagcaatcatcataatttcgcagacttctaagaaggtttcgagagaagaaatgaataaacaacgtcaatgggttttagagtcttcggggtgtggtagtctccatggtcccacttgtaagttgtaagtcaattccggtataagttgccaaaaactaatacaatttgactcgttctatttcttactttttaggcactgattttaaaatgtaatgaaaacaatatgagttaacattttactcggttgaagtttgtgtattacatttgtgaagtgacatcaggaatgagctggatttgtgaacgagcttctcgcaaagctggagatcctgatttgggttatgcatgcatgtggagtctactagaattgtgctatttttagacaaactattagaccatctccaacaatatttttttagtagaagctctaatgaattttttaatattaattttgaaaattttatacttaagaggttgtgtaatgattttaatttttttatgtgtccaatgctagacagactcttaagttagagttcttaaagaattcaatttttgaaaattattttagtttaaatgtataaaaaagttgaagtgtatgaaatttgtgtttaagttaaaagatatgaatatgattcatttggttacaacacatatgattcatttggtgtttaagttcaagagatttatttgagtaaaataaacacagaaatttgtaaaacatcttatctaatattagcatagaggagaagaagaagatttgtgatacatcttcagtttaatcatataattgttgtttctattttgaaatttcgtgttcaaattcacatgactttagatttcttttgttcaatttatttgattgcactatgccagtaagagcatcattattggttaactcttaaattagttcttaggctaagaatgagatgttctttgcaatcaattacaaaaaaaaaatcctaagaattaatctaagagacaaccaataatggtgctctaaggcactaaattctggttttgttcggttcataacttcatattgtaatttgtaacttgtgtaagaaaactcataaatatctagagtggactggactataaatgtttcttgtttcttatctcggcccatcaaaaacacgaagcccacgataattgactaagtcgttttatacagcttttgaattttatgtattcatcagtagtttgaccaaaaaaaaaaatgtactcatcaggataaataatttgcgacgtcggttgtcggaccttttgaagtttatacctaatttgatttctattgattatcgaatttgtttcgtttactcagattcatattcagcacatacacttaagttaaggatgattatttctaagggttcaaataaggttgaaatcttcacattcagtttcaaatttgatcaaattcatattgaattatacatgtgtatccaatgaatttttattgggatccactcaaattactagaacatcttgcttcacttgtcttgacttgataatgctctttgagattcttgaatcttaagcctgtttttttttaaaaaagaacatatttgaatctgtgttagctgatatagaataagagtaagaaactcgaaataccagattaagaagtatgagagacaaaaatagatggtctgcctcctgaacaaagaagacaaagacaagaaccggctgcttctgattcaccttgaacgatagaaagattacaaaggttcgtaggaaagatatatattatctattggttagttgctaatttgctataagctcttagtgtttttcttgtaaaatcatctatagtatcataaaaccttcttgaacaacatcgacgttttgaactgcaaacgttaaagattgttaaaggtccaatgcaaggcttgcatgcaactgcatgggcaaacatttttctacttttgaatgctcttcatcttacgatgaggccaacataataaaccttctttcctacaaaattttctttgccacgtatgaaaagatttatttttgcaacttttttaattttttagaaagaggatcgtgtggataaaacgagaagaactacacttatacactttcctctttctaaagaagatgcaaaaaaaaaaatgaatctttgtggtaaaataaacttcgcaggaaaatggggttgttgcgttggcctcaccgcaaaatcaaaagagcattgaaaagagaaatcgtgcttaaagtgaaaatttgagaagttgtagaatgatatcaaattgagaaccttaacgaagcacttataatgaagcacttgaggaccttgagtaacgttttataaattgagatttttctatttatttagatagtatagtctttatgagataataaataactttttgttggtgttgactgttgaagttctacaattcaattaagaaaacgttatatgtgcattaattcttgattctcataatgatcatcatacggttttgtttatgtatatattgatttttgtatagaactgaggaaatggagatattttacttttataggttttagatattttccaaagttttatttttaacacacttttttatttacagagctacccaaaaacgatacttaataagcttatataaatgaaaaatgttcatcgtcgtacaaagttttagggagaaagcaagattgatttaacattgctactatatagttcataaactaatataaattttaggaagccattattccggactggtatcatttttttgtgtgttaaaaaaagttttttttttctaaaagaaatggtttattatatcgtcaaagaattctaaatgtaaatagttttatatttcattcaaatttatataaactttacaaataagcaatgaattttaccactactttttttaaaatacaaacaaacatgtaatgttaaatacattttagtgttattagcgatatgttttcattgtttttgcagaacttcggcaatccattgttggctcaaggtttggatgactcacatccactaagtctagagccattttccataacaaccccatctttaatgtctccttgccatatgctatcacactcaacacttttggtctttacattttgcgcatcccatgaatatggagatctattttttctgcgtaaaaaattcagactggtatatttcatccaaaataaatatattaaactgagaatctattggctgcaagatctattacttctcaccacacatctcattatcgaaatatattacaacatcacaagtccataatccattcacccgatgaagaaaagttaggtggttaatactaatggataaggcaatgtagtgcatctctgaagtatgctctgaagttatatatagtgagtttgttgtaaattatacctcaccattcttttgttgcattttcagcaatagtctgaagaggccgctaaatcatcacttgatcgatgagttgtggttataatgatatttgattttgtatttgcttggataattaaaaaatttggagggcgagaaaaaaaatcacatatacatgtgtgcaaaacttgcaattaaattattagaaaaagagttttatgctataatttaatttaaattctatgtcatttatttaaaactgaaaataataattctgctagtgaatgaattaaaatgtggagtaatgtcggatcattttaactctcagatgttctctctgtttcattattttatttgatgttttggcacaccaattaaaataaaattaaatatcgtttaatttgaaataattttttcttctaaaacatcacttaatttaaaacagaggaagtattacaagctttagttggaaatcaaaataatttttaaatatttattttatgtaatttctgtacttcatatttcaatatagaaactgtgtcattttcagttccgtttgggttccttttttgatcccacagcccaagttccttgtaccatttttcagacaagacaaaagaataacgtctaaatggaagactgacttaacgaaaccttttaaaaagaagtaacgaaactattcattagcatactaatcaaaatcagtaggcgaaatttggtgagaagtttacactgtccatgaatcatgataatcaacaacaacatttataaattcaatacaattaatgagttactattggaatgagtctggattttttttagataagtaaaatttttgcaatctttatcttgattagtatttaaaatcaattaatttatgttttaagtgtaaactaaaataaggtagaaaaaagagataaaaacaataatgtgtgatacacttaaccatgattggtactttggatccactaatttatgttttaagaaaatgatattccattataatgtttcccggaaacaaaccgtgatttgcggatgttacaacgtcaattagttcaacatggctttacttaaggcaaaagactacaaattcaaatagtgagactatacagataataatattattaaaaattaagtggattgtttttcaaatcattaacatggtacaaaaattatttaaatatatgtatatttgaaataatcacaatttttcacaaaacacaactcattgctaaccagctcatatgctaaaaaagacaactcatttctccactcttttgacaaaaacagagcaccaaacattaaacccttcaaaaacacaaatctcaccatcacacgtaaaaaaagaaaatatgtctatgcttcttcttcttcttcttcttgtcccattcattactccatcttcgcaatcttccattcgaaacctcctcgaagctcgcggtttaccaggtggtttgtttccagacaacgtggagagttatagtctagatgataagacaggagagctcgaagttcagctacaaaatccttgtttcgctcggttcgaaaacagagtatattttgatcgtgtgattaaagcaaatttaagctatggtgggcttgttggacttgaaggtttaacacaagaagagctttttctttggttacctgttaaaggcattgcagtgaatgatccttcttctggacttgttctcttcgatatcggtgttgctcataaacaaatctctcgttctctctttgaagatcctcctgtttgttatcctcctggtgagtcaaagtttgttcctcaaaacgttttagtgtttaatgccaagtgttttatttattggtaacatatatatgatcttgaacagaatatttttgtagtaataattgtatgtttttatttgtaggatctataatggagaagttagaaaaaagcaagatggatattcagctcaagagatgaatgagtttttttttttttggggttgtgtaagattcaaaactcaaacttgtctctttgaaacttgaacaaaaaatgtgtttttttctttcttcttttacctttttgttcggggttgtttgggaaaccgtggaaagtgtcgggagatatgtgtaaaatctggaaagaagggaggaaaattttggaactttgtataaattatggggtccataaagtaatcaattttgtcacttgtcaattatttttcttttctttatatagagggaatatagagtactttagatatttgtttaacttttgctttaatttttgaggaatgatgttttcgtttaatcattatcctctagcataatcattgacatagaattattctttgaatggaagctcaaagctgcatttgttaccaaacaggcaatcacagctgttaacctaaacacaactgacggattataaaattctagcactgaaatacctatttaaaactttcactcatttttacacaagaagtttaaaaaaaaaaaaaatcaggtagatatttcgggtaaaataaatactcccatttgtaccaaaataaatgatgtttaacttttttacacaaagatcagaagttattatatttttttccgaaataaaaacgtaatttatttatttatacatattcaataaatgataaaataaaatataaatagtcataaggaaaaaatataaaaattttgcatagaaaaaaaagaacacgggtcaatttcaaaccaccaattattctgatatcacagatgtcaatacgcgtcagagtgtgatatatgttagttatatgcgattttagtaacatttttggaattttcagtgttgaatatcacatgtatatcgttgatcaaattattttagtaaacatgttttcaccagttttatttgaatttatagtcatttcaccaattgattctagaatatatttaaaattcttaaatgatataaaggtagttgaaattagataacctaacattttttatgttaaccaaactttttaattaaaaataatatatttataggcacaacctattgtaaattttttaatttacatagttttaagtaaacgagataaaagaatcagttggtgatcttcaaatcggataaagtgttatgagtgtataggagattttgatacaaattgaattctttttggagtcatatattttgtctatgctcaccacagcatcggaagatcttccatcacaaaacagttcacatttgtggtggacacgagagatgaagaatctgtctcaaggtttaatcactgtggtattatatagtaaaaattttatgatgatattaaatcatgattttggctatgttaaaatttgaggtttttggttctaaggattttttttgctagatttatgttaatatctaaagtttaagaaatttgataataattatagttacgtgacataattcaaatttatgatgaactacatttactatatatagccctcgagataataatgttatacatttatttagtagatatattattagataattcaaaacttaaattacattattttgtttatatatttcatattatgttaaagtttaattgataaatgatatttttacgaaaaatttgtataatactaaagataaattttaaaaacatcaatttcgttttatttttattaatagtacataaagaaaaataaataaattaaattaatttgtgactattttggtatatgatcaatgctcgtctttttaagtagtaatcgtgtctgttacaggtgaatgaacccaacaaaaatcttcgacgagcatcttctgctttcttcatctctgaatgatcaatttctagaatcagatcggatatttcgatgaagaatcgttctttagggttttgggcgatcggggttttgctcatcggaagcttgatcggagctacggaaggctcgattcatgagtacaacaacgaaaagttcactgcaaaattcaatgctcgcttcttccatggtggtagcgaaggtctttacgcttccaaatctcaagatctaaactcttcttcttcttctgataattcttttaaaggcaagtcctttataaggtcagtttcactctttctgaatcagcttcataattcaaagtttgtgcatttggaatcgtactgattcaaagtttgttccttttaggtttgatgatgtaacatttgtgaggacaaaggaatctgctagtaaacagaatgcaatgcagtcaacttcaggattagtggaagcaattatacttgaggtaaaagaccgtgatagaatcggtggtacttttctcaaatccgaagtgatttgttgcacgccggagctagctgatactggatcttgtagtcttggggaagttatcattaagagagagtctaatgatgttgagtggccaagacagatcaagacattctttaaagggaataagactgaagttaacatgtcccctgaaactgtggttatcaataagactgggatgtattatctttatttcatgatatgtgacccggaattggatggtactaggatcaaggggagaacagtttggaagaaccctgatggttatttacctggaaaggttgctcctttaatgaacgtttttggctttatgtcgttagcgtatattttgcttggtctagtttggtttgtgaggtttgttcagttttggaaggatataattcagttgcattatcatatcactttggttattgctcttggtatgtgtgaaatggctgttcgatactttgagtatgttaattttaactccactgggatgaggccaatggatgttaccctatgggcggtgaccttttcttctataaagaagacgctttctaggcttcttcttctggtagtctctatgggttatggtgttgtaaagcctacccttggtggtataacctcgaggatacttctacttggagtcatatattttgttgcaacagaggctcttgagttggttgagcatttgggaaacatcaatgacttttcgggaaagacgatgatagttttggttattcccgtggcattactggatgcttgctttattctgtggattttctcatcattggcaagaacacttgagaaacttcaggtaagataccacacttatatcgaatattggatactcatgatccgtcacattattatatcagaaggatgtatatataccataggctttcatgggttttaaccatgttatcgtacttagattccaatttatgcagcctattcgagggaaaatcatatacaattgctgcttaagccatctatgacgatccagttcttcgtactctttttttcagctgcttatctgtctaaatttcactacagattaagagaaacatggccaagcttgagctttataggaacttcaccaatgcactcgctatctctgttctgctctctatcgcttggattggttttgaggtaacaaatcgctactctagtgactgtgtctcgtgtataacatgaaacccctagtcagaggagtgtaactgaaatcaaattcttctatgtgtctgtatcagctatacttcaacggaactgaccctctaatcgaactctggcgaatggcgtggatcattccagctttttggaatttactctcttatggtctgttagcagtcatatgcatcctttgggctccatcaaataatcctacaaggttctaatacttccattagcgtttactcaaatgttttggactccgatggtcccaatgggtcaactgccaaagatgtcaagattcaagacacttatttgctcttcaccgagagattatcattttgcactcagcttacctctaattggtttaaacctttcaggtactcatacttagcggaaacaggggatgagtttgaagaggaaggtatctcattgacaggtagtggaattaagagtacagaagatgttgaaaggaatgaacttctatttgggcttccagacgacgttgaagagggcaaacgtgagtaagctccagatagcaagcgttagatagtccatacctcgccgagtagtttttagtgtatgtaaccttatgtcttttatccgttgtacctgagtaagttgtttactgacctttaaggacttgtttaccagatcgaagttcttttagtcttatagaaagatttacagactgcttatttccagagcgtcaaagggaacttttttacattagagacttgagatattcgtcgggaagtcgttgatcatcatcatagctgtacattaaaggaactgttcttgcaatgttgagacaagcttttgagaatgatcttgagaatggacatggattcagacactccctgttcaagcgtttccatgctctagatatcttctgggcaacatgtgttcttgcttcatcaacagttgatcccttgtactcgttcaggtaacactctacatatgatccatcagttccatcttggttctcatcctgttaaacaacaaaaaccatatctaagattcgatatcaagtttcagattctctctagtcacattagttatcagtagttcaatataaccttggcacttccgagatcatcccagagcctgagaattgtagctgcagatgatacaatccccgggttactctctattagttcgactttctcttttgttagttcttcgcctaacaagatataggcatgaagcatcactaaatgaacacctgaactcacaaccccattcttcatatactcttcagtggtgggtaagtaacccgaattaaaccactttgcttctaccaagaatgctttacacaaacttgcccactgagaaacaaagacatcatatttttagtagggtttgaaccagttgagctatatgatacaaaatatatatacacattacgttttgaatgataattaccgattgtcgaagagcgtatgtcgggttccaaccatgtgatttgtagatcttcatgctaatctccgttgtgatcatatctagagcttcaaaacaaaccctcatgtatttgggtagcgtcttaagccccttatgatcccatctagacgaatgatttcattatgtttgacagaatgttaatcaagaaaatgtataaagtaatttgtatgtacctctcaacaactcgtgtgaagatggttagttcttctagctccccatagacatcgaaaatgtcatctataacataaacaagcgatattggtttggtaagatcaagcctttgttcggttaaggtcggatcttgaagaattttcatggaccacgtatgccattttaacggctggcttcttgccttctccacatctttttctaaaccaagttctgtccaccatctgaaacatcaaaaaccatacaaaaacaaaatcgtatatcggaattcaattattttcgacaaaaagttaacattgatcttcagggagtatcatcattgattttacttaaatgtttgagacatttctccttgagtcaatgactttagcctaatggaatcgatctccgccactcgtaatagagactgtaaccattctggatcttcttgacccgcgattttgatcatgcttgtgaacctcttggacgttaatcctcttacggttttgtggcgaggttgcgccaaagacttcattatctcttgcttttgatgactttctctacctgagcaaagttcattaaggcggctatatgtgaattctctcgcaccgtcgagtgtttcttcaccttctacacggagctcagaagcttcaaacaattctgttagacccttgacgtcattttttactacgtctttaaatccacccttcttgtctaggatgtttttgaaaataactaaatgttttataaaaattgtaacagtaaatacgcatatctcatacgagcaatatagtaagtaaatatatatatataacatcacatactttcttgaacatagtgaccctcttgtctcagcaatcgaaagcgaagcgctatctcatggagatcaccgttgaattggaggccttctttgtaaatcatgtgaagggtttgctcgatctcttgtcgaaaatggagatcaatgcctaaactttgaatgacatcgatcatctccaggttctcggatggaacatctacgtttgcacttagtatattcttgatcttcttgatattcaactcgtgtaaatattcctacgtacaagaacaaacacattcttagttctgaaaacagcatgagcaacaaaaagtaagcagaatatatatactaaggatgtcttattatgaaactgcttcgaagggttagaaactgaagcatggacgtttctcaagatcgatcttttagcagtatttgcaggcgacaaagaatcgaccgtattgggaaatttggatatcagaaacgttggagaattgtttggataagcagaaacaaaacaagaacgtgaacttattttggtagctattaaggccatgatgtatgaacttaagttttgttttgtttttgtatgaacttaagcttttaatgagaatggtgttaaacttcaaacgaaatgctctatacatatagcgattatggattataaaggagtggtggatgtagcatttaggggacggggccatgcataataaaattcgttatcaactatgttttgtatatatatatataatttgtatcatgtgcatactagtgaaaagcattaaacttcaagcctcaaccatatataaatgaattataaagagtctttgtactaagcttttatttgaattactggagtcgtaattttaagatcttatagaactgatacattccaataagtttggctagctaacattaagattaattgggtaaatattaaatgcattatgtatcatgtttggtggcttcactatatttttcaacttaatatagaaacggtttgtatttattgttagacaagttcggaagacatcaattgtggaagcaaatccgaagaacgtgaagaaccaaatgatcaacggaacaaaccaataatgatgactgacactgatattttttttccatttttctttcagtttaaaaagtttcattagaaaattggtattacaaaaacaagtacaaagtgcactacaaaacttcagattttttcttttaattatataagccaagttatgtgccatatactaaagaaaacaaatacgaaaaaatgaatttaatgatgcttccttgcgataagctattttctattatcatgttaatttttgaaacaattttttttatataatgatttgtcaaagtttttcattagttatttacatatttaattgttcaaaaattaaagatggaaaaataactcaattttcctaagcaatatattaatgttagtattcattttagataattattctagtataagatttaattaaaccattagataattttgatgtattttatattattaacattcataattatttgacgttatttttgaattaaatttcttaactattttgacagatttgaccaaaaatcacaaaaaagaaagttcagtttgattccggcggtttggaaatgtaaaagttcagctagatccatctgaaaatcactaaaattcagttagtcagcaattcagcctgactcagccagatttttcggttactatttagaccagtgttttcacgcccgacccgaaccgtccggtccgaccggttaacccgtgacccgaacacgtttccggtttgggtttagtgctaaaacccaacaagttcaaaaccgaaaaaacccacaaaaactcgcaattaacccgtgacccggtgaaccggttgaaccggccgagtgtgggttttaaaaagttctcttgattttacaataaaatatgggattttagactttattcaattatttttaaaaatttttttcagttcttaaattcatttgatgttttagattttggtgaagactttacaataccgccttaaaattgaatcgaatggtgagagagacaatcgagattagttgtttgaattcacgatgttttattaatttatttctgtcattgatgatctcctaatatatttgttacggtgttagacatttagttggatttcaaatttttaaccactttattattattgtttgattatatatatatatatatatttgggtgtaaatgattttatattttgttaaacataatataattttatatttgattaaatatgatatgattatttttgttttatatttataatactaaatttttttttatataaaatactctaaaatttctattaatattaaatttattaaataaattttaactaattaacccgtggtccaacccggttgacccgatgacccggtgacccaaaaggtagtccggttcatcgtccgggtcgggtttcattgtgtaaatgatattttttgtggtcaaagttgagaggtactataacctttccatttatttttttatagatttataatcaaaagaatataacttatactttcaatttatttccttatataattagtcaaaagaaactagaaaataatgtttttaatttcttacctaattacgtttgaacaatggtaaagtgctagtattatatatttttttttttggcaaatatatattatgttatgtacactgttttctctacatttcaattttttttcacattacgaaaatggttgtagcatatatttaagattttgtattacaattccaaattttagtggttccaacttgatgttatgggtaaagaatgttgttggtgggaggaaagtttacacattccaaaccaaattttacacattcttttaccaaaaaaaaaaacatttgcaaattcaaagcattatgtttgcagtttttgctggggaagaacaagctaccggccgtactgtgaaacttttgatattagaaacatcaaaacaagaaagtgaacatatcgtgggacctatgatcatgggcatgatgtatcaaggctaaacttcaaaagaaatgctcttttataactattacagtcgttaatggggatgggggataacaaacatcatcattttcttttataaccactacagtcgttaattaaataatttaaccaatacaaattaattgtaaaacttcggttacaggaatatggtggtgcatgtggagaaatttataaaaattaatttggtcatctatgttactaaaacacacttatcttttttgtcaaacgtcttaaagaaaattctacaattaagcatttttaagctgggaaagtcttatgatagataactttcgaggaaatgattgtcggaaccgtgtgagtgagaacaaaatacgggagaaaatcatgtggtgatttgtaaggtaagtaccaagtttttaaagcctctcagacatggcgtatcgatcgttggacagaaatagacccacagacccgagaaaatacatgagacctactagtagagactcttggaacattatattgataataaataaatggttagattggaaactcaaaacggtacaaggtttttaataaaatagacgaccagtaagcaataaatacaaaatagattaaagtcgtagaaaatagctatatatatataagtatacaaaaaatttatgagtatcacttaaaattgtttttaggttgatattagaccatctaatattcataacgtataaaaaaaaaataataataaaaaataataaagaaaaaacaaataaatattcattcctccgtgtttcaattttcttttagattttgttctaatgcgaagcaaaatatatcactaaattttttaactgaaacttccattgatatgtaaaagtttatgttctttatatcttatatatatatatatatatatatatatatatatatatatatatatatatatatatatatttggtaggaatcttttatatatattgagaacatataaaaactgttgatgttatttcttaggcagaaaaaattacatttggttggattatttcacattgaacgcattcttatcattatcataagtcataacaacaacatcgtcctctaccaatacatttgccataagaatactcggcttcattacaaaacacaagacaacctagttgccctgcggaataacacgccattagcatgaagcaaaaccagtgttttcacgcccgacccaaaccgtccggtccgaccggttaacccgtgacccgaacacattccggtttgggtttagtgctaaaacccaacaagtacaaaaccgaaaaaacccacaaaaactcgcaattaacccgtgacccggttgaaccggccgagtgtgggttttaaaaagttctcttgattttacaataaaatatgggattttagactttattcaattatttttaaaagttttttcagttcttaaattcatttgatgttttagattttggtgaaaactttacaataccgccttaaaattgaatcgaatggtgagagagacaatcgagattagttgtttgaattcacgatgttttattaatttatttctgtcattgatgatctcctaatatatttgttacagtgttagacatttagttggatttcaaatttttaaccactttattattattgtttgattttatatatatatatatatatatttgggtgtaaatgattttatattttgttaaacataatataattttatatttgattaaatatgatatgattatttttgttttatatttataaaactgaatttttttttatataaaatattctaaaatttctattaatattaaatttattaaataaattttaactaattaacccgtggtccaacccggttgacccgatgacccggtgacccaaaaggtagtccggttcatcgtccgggtcgggtttcaaaacattgattataacattttgccatgtactactaaaaataaatcaaaattaaatttataaaaacaaattaaggaaacaaaatctgtatacatttaattaaacaaaattaatgtttataaataagagtttgggtttagatttacaactaaatgaaactagatgcggtttgggttttttatggtttagattttatagttaattcaatttaagagtttgtaatgaattaatgaattttattattattagataataatgactgttttagtttgtttaataagatgatatggcaaattttgatgggctacttaagagggggggggggaataagaaaaataaatgggttgatttgaactagttatattttgattggctagttaagaggagggaacaagaaaaacaaattttgattgtttttttggttgatttttagtttaataaaaaaaatgactagtaatttcatgtgattaactatcaaattcttacgagattttgtataataatgaaaacaaaatataataagaattagagagattgttaagattacccttccaaggttacctttttaattctaccctttcatttagttcatttttatttatacatttttaaattattaatgaccattttatctttatttgaaaatgttttcggttaacataatgaaatattgattttttccgccaaaaatattccgacgatacttcttatttaattgtatataaaaagataggttgaacttcttgccttgttaaaaacctacagaagccattatcatgaatcggaacaaaggagtgcgtaaagaataccacatctctctattaaaattttagaagcaggcaacatatgctccttttgtctggcctcatatccagtgaataatccacatcatttcacaaaaagcaatcctcgtgccaacataattgatgcacaagaatatgtaatatgcatacgtttaacaccatgtgagcccaaggttgacaacacatattgaagcttgccaagttttctcaatctagcaatagttgattccgaaagacatttctattgggagatcgatgagatcgacccaaaccgaattgagacacatagaaattacaaaccaaaattaagatataattatggagatattgtggactgtgaatatacgagtttataaaatttgatattatgtcttattatattatttacatttaagtttatcattttaagagaacttagatttatttcatctctttataagacaataaatcttgcatctttattctgatgagagtctaacataattcttcctaaacatttttattttctttactctcatcaatttatcggttactgaaactgtctcaacccataggcctacacatcgaaaacctttccacttgtgctctcttggagttatcatctatcgcttttggaattggtatatacatgtactacatcagtagaggttaccaattaaacccaaatttgatgaaacaacacgtttaccaaatggaccccgtataacatgtgaaagtatttggattttctaatattcattatgttatattttcgattttagattttattcaatacaaaaaaaagatatcactcaaacatttaatcaaactatacttttgattggtaaagtttatctattttgttatttgatcttttatatagatattgagaacataggaaaactgttgattattttttcaagtagatacatttacattttcgttggattatttcagctcggacgcattcttatctgtattataacaacaacatgatctattaacacatttgtaatgtttataatgggattcgtgacaatacacaatgcaacctatttcatattggcctggggcaaaacacgctggtgttacgaagcaaatcccatcgttgtcgtgcgagtgcttcgaaagtgcaggacctaattattaataaaaatcagtacaatatagacattcatttaaaaaaaaggacaaaaatatgttcataattataaaatgggttataagaatacactaacacattaaaagttaaatatataataatggaacatagaattcttatcttcaaatgaaacaagaatgaaagaggatggaaactgaaaaatcaacaacagtcactataaaagttttgctctaaattctaaatggttggtaaagtttacctgttgcgtatgttgttggttcaccactgcttggggcacttgcaattgttgtatgacaatgaacataagatatgatgacaataacgctgaaaacaaatgcgattagggtttttggggtgttagccattttttatattcttatttttttttgtcaatgaggtcttcaatactttgattgattatatatatatatatatatatatatatatatatatatatatattaatacaaatatacgtaaatggttgttttcctagtcaaagatgtaaataacttatgatactataatttacaatttattttcatatggtcaaaataaatatcttatcccttcagtttatttctttatagaattgtagtcaaaataaaatacatagaatgttttttcttaccaagcactttagaacaccggcattacccttactaatatttatgaagtgcataattaaaattaaccatatttcatatcaaaaattacatcaaattttcattaaaatataggttttcattaaacaaattaataataatcattacaagtaaaatagtaaacactacggccatgaatgtttgtagtttttaaaatggtttttggattttggtttttggtttttaatttttgattttcttggtttttgttttcggtgtagattttagtttcttaaaaacttgaatgataatttgtttagattttggtttttatgttaatgaataatatatatttttttaaacaaatctaaaataaaataaaaaaatgtgatcaatggtttttgagaaagaaactcccataattatagattttggttttcttgaaaaattgttcaaacactcaaaaactagattccctattttttaggaaaacttgtttttcttttaatcttaaatgggtacaaaatagattttgtacaaaatagatcttaaatgggtacaaaatagattttgggaaaaactaaaaccaaaaactaatttaaaaaccacatccattcgagggctactttcttaaaacgaacatgctttagtagttttcaaaaatatttaattaatcaaattaaataaagaagatttgatatctaatttaacatattaatttttatttaatcattgtacttcaccgctcatcttcgtttaattctacttttctgaaaaaacaaatcatcacatcatcttttcgcgtatgctatgatttgaatttttttgtaggatgttgtttgtacatcagatgccttggtctgatggggagtgatcaatgggctcctctccaaaatgtttcttcacctttcatgaatcataatacatgattttgctctttctacgatcaaaacttcctctttaagctcattcttcatgatacatgctccaaaccctaggaagaacctaagtaatgcaaaatacacaactgagttgatataaaccacaaagatatcaacaggtaaaagagaaagctctgattcaaatgtacatatgagtcttctgtgttgttccatcgacaaaatatgactaatgaaaaaacttccgactctcgtcagtttacaaatcagatgataaacactcgagtaacatgaaggttatgttacaaatatccaatgaactggagagttgaatcaacttgaagcaagagcgtttagcttcttttcatatagttttgcccgtcgaagagcatctaatgcctcagcttgtttccctgcacgtttgaaggtcacagcttttaccttctctgctttgattcgttcctccaattgacttctctcttgattattagtatttctattactctccttcactgggtttggttttgccgcagcttgtgttgtgtctgttttacttaccggtggaggattcacgggattgtctaatccaatagctttgagggcagacaggagttgaggatcgagaaaatcttccaccgctacatcgtccaccggttctggtttagaggatgttgaatcttccaattgagcttcaagagttttggcgatttcaaactcagcttcagcttcctgcattttaccttccctccgaagcttcatggcttgacgtttgtgacttagtgactcttgctgcagcttaaaacggtcacgacctgacattgcctttggagctgaacttgaaggactattctctttctctcgagcaggaggatcctccgttgtggaaaccatatcatctcgtccgagcttttcaggagagggattttctccttcttgtagtctcctctccaacaattttgcttcttgcaatgcctttttggcttcacttatgtttccttctctctttaaggcaagtgcctttttcttatgagccagaatctcttgtttaagggtgttctgaggagatgtattttgaatcgaagctgattgaatatgactgggctctgactcttcacgtgccactctttgttcagcgccgtgattgtttcctgaacgaaagcctgacatagtctcagcatttcctttttctgcatgaatttgagacctctcagaatgctcaccagtcagcaaatccatcatacttggttgctgctggccaggttgagaaacaacgccagaggaaccagatttagcaggggagataaagtctcctaacaagtcataactatcttgaggagcatgagaaacactagcagattttatcgctttatcctccatttgcgatccaactaataaatcaacatccatgtagttttcaggtttaattgcagaagctgagcctttcatctccatcttgggggtttccagttctgctagctgtgcctccaaaacactggccttactgtataattcatcagcatctccagttttcccttgacgcttgaaggcaagtgcctttctttttaagtcaagaagttctctttggatttgtcccttgcttttggctgctatccgtggaccgcttgactgcacagagccgaaagaagcttcttctttctttggttcttcatcctcccatcccaaattcttaagagtcgacaataacgctgggtccttcatatcattttctgtaacgctatcatctcctccattgagccgactgtcggtggcaagatcattggatcgttttttcggctgatcactgtcagcatatagattcttgcctgaatcaatctccattatctgagcttccaatatttgtgtctggttcagaacttcctcagcttcatcaacattaccctgtcgtcgcaaagttaaagcctttcttttcagccctaagagttctcgttgtatttctgctttagttctccttggtttagtaacacgtacttcatatgcaccttgagcttctgctgttttccctggtcgagaatttagtgggtcagatttttctgatgaaggacctgcaggattattatcttcatcattccaacctaagctctttagcatcgacaagtaattcggatcatttaactcctcatcttttacatccacctctccatcatcatccagagaactaatatcaggcagatcatttcctttttcacgagtggccttccctgtggcagctaactttgacgaattgtccagctcatcaagctgattttggagaaccgctcctttcttcaattcttcttctgcttcgttaaactttccttcccttctcaaagtaagtgctttctttttcactgcaagaagttctttctgaatcgctagcctgcttctgggaggaggtttaagactcgtatccctctctgccctagttgtgtcaacagtttcagaggaagtatcagcagcctctagttccttctcaagtaattttgccttctttagtgtagccatggcctcaacgacatttccagcccgttttagattaagggcctctcttttcaatgtctgaatttcagctaaactttcatctctgtttttaggagatggtcgagagtggacattctcatggtgtccaggatcctcactccaacccaaagatttcaatgcagcagcgattgctgggtcctccatatcttcatctgtgacatcatattcaccatgaactccaatatcatctaaatttcccacaaggttactaatgtcgaaatcatggcttccctcgtattgagctaacagatcatcttctttgtcatcatccatactattaataagtgcagatagctcatcatctgatccatcagctccacccaaaagttcctgctcttccagttccctttccaaaattttagcctttttcagttcatctttagcttccgcaagcttcccttcacgtttcagcgtaagggcttttctcttaagggcaattacctgactcttgtcaatacccccagtcttctgaggattagcacttcgcggaatttcacggagaagagacgaaaattcgccctccaaacttatagttgctggtttcttatcttcatcgtcagaccacccaagctccctcaggtcagctgccaaatcatcatttcctttacccccttgacgtagaggcttttgtgatttgctagattctttggtagcagccttgttctgcgtctcagcaacatttcgcatagacagttcccttttccggttccttcttaaagatatctctaatgcgtcggcctctctctcaagttccctccctctcttaaatgcttttagagcttcatcagatttcccttctcctttaagaattctgtacttattcttcgcttctactgcttgtttacgcaattcttcaggactagcatccaactccatacctttattactactgctacttgccatttctttagaagcattcctgtctgtgctagacacagattcagatgaagaagatacatcaacatcagagcctagaatctcactgagaacatcatcctcattctttacagtccttttcgagctacctcctgaacaaattcacaatctctttacatcaaaaactagcagataacacaaaagtgtcataaataagatcactataggtacataaatacctttagcagctctatttttgtaaccatgacgcaactcaaaccgtgcagcttcttcaattttcttacatggttcacatatacgcacaggtgagtcaccttgtccacgtagtgacaacctttgctgagtgcaggttccacagaacaatcccccacatctccggcaatgatgctgctcgctcaaaaaaacaaagccaacagaaactaagaaaaattaagcaaattcaaaggtttttgggagacatagaagaatccagcaagtcacaagtctagtaatacacaaaccacaaaacatccagattcaccaaatttactcaaaaatatggaatctatcaaataggcacatcaccagaaaccgatcattcagtgaagttttccgataaacagattctgaattagatctcgaagaagaatcgactaagacgaaactaaatttcgatcgaagaaactaagaatctaaagatcgcgatagcaataagcaagtaccaattgatagagagagtaaggaaattaagagagaggaagaccttgcgattgatgaaagtgaattgagaagaacatccttgacaatgagaagcatcaacgacccaactatttcctcttagagatggcttcggcggtaatccgatcttctccaacattttcccgtctgattcttcttctcctccgccgcgaaacgaacttggttttgattttgatcttaccggaaatgtaaaagatcgagcagatgaagaagaagaagaagaagaatacttttcctcctctattgtcagatataaaataaataattttaactaatacggtatcgttttagctaaaacacataataggactcaatatataaagcaataataattagacatgaaactaatttttgctttgagacgagaacgaagttagaaagagacaagccctaaagatcgctttgagacgataaactcttaaagtttcgattcgttcacgatgatcgtccctgttcgttgttttacttgtggaaaggtttgttttttcttctctctttttgtacgatttcgatttgttatatatatatgtgtgtgacaaatctctagggtttgtagtattgagatttatgaagcttttgtttatgattttttgtaggtgattgggaacaaatgggacacataccttgaacttctccaggctgattacgctgaagggtaagcgatatatagtttatgattagaaaaagaatcataatttgtgagaaatttttttggtgaacatgagagtgattgaatcttggaattttgaacgttttctgacattttcttagttgaaatgagagtcatgtaaaagatgaaacaatagtggaacatgacaatagaatgatttgatggttttgtgtagtcaaagagattgcatgatcttgtcttgtatgatcatcttgaaagtttatacatgttttagccttgttactaaaagcatgaagttagatcattgggatttttcgattttcttgttttaatcgctagtgtaatctttagcccgtttggttctaggtgttaagctacatgatttggaattgcgcaatttcgtttttgttttagttgcaatttgatcatcttgaagttcatagatgttatcttaagtgttagtaaagagcatgatggtaggtgatcactgatatattccattctcttgtttctatctaatcttttagctactttggttttaggcattatgctaaaattgcattttgttgaactgaaaatctgaattttggttttggaatacgcagggatgctcttgacgcgcttggattagtccgttactgctgcaggcgtatgcttatgactcatgtcgatctaatcgaaaagcttctaaactacaacagtaatatctccatacccggttcttttgccttgtgttgcctctgctctattctttttgttaacttgcttattcgaatacttctcttttgcagctatggagaaatccgaccccaattaaaaaaagatgctataatgaataacaaatcatcaagagctgaagtgaaggagtgatgcatctcatccatgtgggcgtcttaataaaaccacaatgtttcagaaattttggtttaatttataactaggaatgttgatatttcaatgttttctgatgttcttgttcggttttagaaatctagacaatttttcgagccaaaaataaagctcaagcctgtagagtcatcatctattgatttgtttttggtaatctaatcctgataaatagtaaagatcacacatttgataaggttcaaatctacaatctagatcacgagtaggaagcagctctttttgtacgatatcaaattggtaatgagaacagagcacataaaaacaatttgaatggagctcccattttataaccggagaatatcaaagttttttagttacaagtggttgtattaattcaaggaaaccatttaacaaaagaaatataaatatttatattaaatatacactataattagttgaatatatatttattttggatcaaatgtttattaagatatatttttattataaaaatttattctgaaatatgtttattgaacaatatactgaacttaacaaaccaaggagactttttttattttattttttttcaaacacaaaccaaggagacaaatatgaagaaaacaaattacatttgaatagagaggtagagctatataactcactgaatgcttggaaatattgtctattagtctattacagattaagattttctaaaagaatttgagcccgctgaacccagaatttgagagtttggcttagactcaaattcgagtttttacctagtacgcattcaatatggaaaatggtgcagcactcaacgcaccaatagaacacttttgtgtttgtgtctcttaaattacgttcacatacttcgcaccaatctttttcacggacctcttcttcccatatagctgtgagaaagtgtttgtcatgttcataccttgctctatagggtaatgtagcacacttcatacaaacaataaaatcacatttgatgcaatttaattgattatgacgttctgttttgcatacgcgacatatgagttttccgtctcggcctacaaatatgaacaatggatgtttatgaccttggaaacaaaacggctcagcaattgaagcacattttacatctagagtgaagatacatccccttatgcaacactcatagacaaagccacgacaaccacgattacaagaactgcatccaaaacgatccataccatatctacttgcagcttttaatgttagtggatgaggatgtaatgcatgttgtaatatcctgcaaaattttgcacatgtttcatggaagatgaaatcatcacactccacacaagaatagaaattaccttcgaaaataggtaaataacacgcttgacaaagttttttttcgttataaagtatactgacttcgagccggaaatgatggtcatggagaaaatgaagtatcacttccttagatattatattgaatgatccaacatcttgtgtaatatcatctttgtctggtaaaccttcgagatcttttccatcccacacatttttctctagagcacatctcgaatgaacagcataatgaccacacttatcacaagtatatgcaccataatcaccgtcaataatttgatgaaaaactccacaagaccattcacatgatcgtagagaaaaagtgtaggagatacgatggttgtgacgtgatatcttgatgacgcttggagagtacatacaatcactatgaaacacaaagttgcatctgacacatatgtaggtgggatatagttttctcaccaaaccacaaaagttgcaagttaaagaagtttgtctaggaaaaaaagtgagaggatggtcggcatgcctttttggtgggtctataacaaagggtattggcttcactgcacatactggatgcatgaaaacgttacatatggtacaataatataccaggaagtttactcttcttctacagcataaacaattaatactgtaaagaaggaagtgaaagtaaagttggagcgaatgctgagggtgataagggtgtttgattttaagtggagactcgacgcattctttgtgatactttttcgtgcaaatgtcacaaaaataatagtcagtgccaaaatttgagtgacggcatatattgcatccaccatcaatatcgaattctttattgttgcaccaaaacaacgggagtactgaatgatatgtagcacttcttgtagagaagacgaactcgggggaagaattgagcgggaaaatattcccagttctatctttaaattttcgtgcacttgggcataaaaaaagaggttgaagaagatggtcatcgctgactgcttcaccggatggagataggctatgtgtttttggtttgggatgatacttgggatgatgatattccagaaataggttaccatccttttcctcctcatgaaatccaccgaaatccatggcttctcctagtctttgtttactatacttctgttaagatcttttttttttatataaatgcaaaatactagttttgagagttttccactatacataagaaaatctgataccaaaggtctccttctacgtttaattattggatccttaaccgtgaaaatgagttgaattatgttcttttctttgtattgaatggtaattttctttccacgcaagtaaagaatactcttttccacatagttttcacccttacggaacttatatatccgactcgtcaagattttaattttacgatcaattacaatagagaacaaattgagaccttaacttaaatggtaactacttttttagtcagtttttggtttttgttatcaaaagaaatcattagtcatccaatcaagattcttttacaattgtactcttagctttcttctcttctcgaggaaagaatgattcacaatggggaaatgtgaagtagtctttcaggtaatagaatttacaaagcagcttcctagagtaatagaattatcatgtgtgtatgatcaaagaatcttgtttttcacaagttcatttcaaaagtatgtaatatttatgtatcaaaagacattaaatcaaccaacatataatacataattattcaataccattttatagaatgagaatgagaccaaagactcatatactctttgaatccattttgacattataaaagtcaagtttatttagctttgatcaatccttttgactcgaagtactctatcatttgatcatacatctcattgatcccatattcgaatcgaaagccttcattgataagtttttgcgaagatagtgtcaatttcggaatcgacaagccctcttcgaatctgccaaatttcacaaaacaaaaattgattagacaaaagaaaatcgaattttcaattaatatttttgcaatttctgtagaacataaaggcttactctgacaacacattgtacttaggatatctctgtatgagaaaatccgcaatctctggaacacttgtgttgtaagcacagcaaatgtagcgaccagaagcagtttctttctccgcaagaaacaaatgggcacgagctaaatcgtctacgtggacgaacgagatcgagccagatagcttctgcatttccttgagaccggtcacatgcatttctttccctgacaacaacaccaaatcatcttgattatttatcgtgaaacagaatgggataaaatggtaaattcgtgtttaccggtgatgaaagacatcgagagagataagctactcggaggatcggagaggagagagtttccggctataagtgccggaatcacggtaacgagattgatcttattctcttttgcaaattcccaagctgtcttttctgctaacaccttcgagattgggtaaccctagaaaagaacagagaggtaagttggtttatgtatgaaaaagccctagcttgtgtaacaagaaacgtaattacccagttaaaaggcttctcctctgtgagaaattcaacgtcagtccagttttcttcgttcatcacgattccggttccagaaagattgttgatggaaacagcagcagctgaagatgtgtagatcacacgcttgactgatttcgattttaagcaagatttcaacacattgatcactccttgtatcgccggcttgatcatgtctttctgtatattgaaacaaaaacaagataagcttgataatgtttctcttatgagtatataaaagcctgcacattctgttcaagatagacctcgggatcttcggatttaaagttgatcggagttgcgacatggaagatgtattcacagccggagaatgaggattcgaaactgtcttcatcagtcaaatctgccttgaagatcttcaggtcgccaagctcttgaagtttcctaaggtgagctattttcttctcgttttctgcagtttcagaataaaaaaaatccattaaacattcaaaatgccttcagagaaaaaagaaagaagaagagagtgaagaacctggatctctaactgtagtgttaactttgtagccactttgaagcaaatgcttgatgagaatagaggctaagtttcccgtgccaccaatgacacaagccttcttcgatccggtgtgtgtaagagtctggtccatgattgtacttttgaaattacagagatagagatttagttgttatgagtttatcgtcttgagacttctatataagaagtaaaaagatttgcaaatagtccttgctcattaggtacaacagtagatcaataaggctgttttagaaggtaagcacgtgatctttgaaataaccaacttgtcttcacctaagaatcaaaaaagattgaccttcagagttctgatttgttatcatctaccaaattatcacaagagtttgattatttctgtctctaaacaatataacacagctttagagtaacgaatagtgttacagtaaggttctgttacttcaattttttctttgccgatcttaaaatgagttgcaaaagaatgctttttacttccaccaatctgtcaaattctctgcagtttttaacacaacttggacttgctatgttctgtttcacgaattacacgagtcaattcaacataacttgctctgttcttgtccatgtttcacagaatctggccttaagcaattttatcatatttaagctacaaatccataacagagtttaacaaagataaaataaccagaaagttacattgaaagataaaaagtgaagaagacaaaaaaaagagagggtaaatcctaaatcgaaaacaaaagaaggcattggcaatagcattccgattttaaaaaaccgataaatctatgtatctaatggcttgttcttagaagcttcaacgaacatagaagcaacctcattcaaaaacttagtcttctccaacacaaattccaactccttagcttgcaacaacttatacttctcttcaacaatcttcttactctcaaccgaaaccaaactccattgctgcttcacataatactcatcaacacccaaactagcaatcatcctaacaagagacgagttatcaaaccaatcacatccatcatcaccaccatcttcttcaacttttttaccattagttgaagaaccaccggcaaacaccaactcttgcttaacagaatcaatcttcttcttcgccacactctttttcgatacaccgttcgacttaacattagaatcaagagctattcctttaggtccccaaataaacttagacaattcaaaagctttcttatcatgagctttcacaaaactaggttcgttccttccttctttaccaatatacttcttccttaaactcctaatcttatccatgaattgattcttactaacctcaaagctaatcgatttcttcaagaaatcgtaaaacgcattagtatctacataaggagacttccctgtatcagctttgaaatcaatcattccttgtaacactaagatttcgtcttcttcactccatagtctttgaaaacctcctggtttcttcacactctcttcatctttcttcactcgtttcgttgaagtcgtagcagcagcttcactcgctggccgttttgttcctgatttcatcgccggtaaagctaaagtagctgacgacgacgttggatcctctttcttctttagattcactgtgtttaaagcgattgtcttcccagatccagaattcggtggatttgttgattcagaatccgaatctgtttcagtctcggatccagaatctgaatcagcggcggtggagacggcggtggatttagctggaggagcggcggcggttgtggcggaaggggatttgattcgaattttgattggtacgtcttcttcagatgaagaggaatcgtctgaagcttcaccagcttcggaagtctcgacgtcatcttcgtcgcttgaagttgccgttggtggatcttccagtggattgagtttcttcgtcattggaaattttcaaggaggcaaatcggaatccttcaagcagaagagaagagagaagctttttagggtttgtgaggagaggacggcaaaagtgtttgggaatataaaggtgttaactttagtttaaagtggttgctgtcttccaatagatattttagggtttttaatatagggaattaattatttttttctctttttctgttggtcaaagtaatttagtatttttattacttttgctttggtaatattttatctctttcttttggtcaaagtaatttaggatttttattatttgctttggtaaatattttctctatttttcttatgtataaccaaaaaaaaaaggcctaagccaaggctatggtttttgcttttagctttttccaaaaatccattttttaaaccattcaagattttgaggaaagttgattccctatataaattagggaatctaattctaagagtttttactaatttcttaacaagatccaaaaatctcatgttatttacaaaaaccaaaatctgaaatctaaaatctcctaaaatcttggcctaaatttctcttttcagtatcaaactgaagtatgggctttcaggcttgtacatgcttaacttctgttcttctgttaaatgaggtgtaaatccaattgtgtagagcccattactaggcccagagaccattttgacccagatacaatcagctcacaaaatagaaaacataacatcatgtgtcgttgaagaaaatatggtacaaggcatgatgggccttgttgatgaaaatatggttagattattattaaatgagcatggtgaaacattatataaaggaacgaaagatgataagtctacccacattacttaccaccattcttaattatacgtttctttttgcttttgattttggttcctcttgtattttcgatctaagagtaatactttagaggaagtacatacagagacaacctcttaaacaaatccatcggaaccctaaacatctccttgtggcagagttatgactttttacttccagtgatgaaatttggttgggattatagccacgaactcaatagaattcttaagatcatgtgaaaacgttgacaagatcgtctacgattttccaagattctaagtcttctattgatgttcatggctttaacctgattttttttttcctactaaatcgacactcgatggctaccttagaggttaactaaggcacctaagacattcatggaacgaagttggctctagcggtgtgtcttagagccaactctgttccatgtagagattaggtttcttagtgatcatgagtctctggcttaaccaactactcaacaatcaagcaacatggttgttggtttgatgtcagttgaaagccggttcaagctcaaggtgttaacgtttttgctgttgatcattcttgtaatcttttctcggattttgagagagttggggtcttatttttaatgtaaccattaaagatgagagtgaattttgtagagaatcaagcttagacgtattattcactatgtgagctcgaactacttaagatcgtctttttcctctgttttgctctgtttctgtttctgattccgtgtattattgagtgcatgtgacaacaagtaaagatttgatcgattatttcctgcgtaaagtgacaatagcaatttcaagaataatgttataagtttaatgatgacatggcattatggactaataaccaaatggatgaaggaacaaccaaaagaatatgatgatatggttatacacatctattttgaactatttagcaaagaaaccaaaactttatttctgtggtaatttgaaagtcatgtaactacagagacaaatcattccaaacatatatccatagctagtcatcaacactgttcaataccatgacaataccaaccaagaacataataatcgaagctcttccatgctcggttataaccttttgaaccaccttttagtcccacgagggaagacacaaaaacaaataattgcatatatacttgtggttccagtatgttatatgcctagcaacatgtgttgaatcatagacattgttttttttttcatatattgttgatgaaaacagaaccatgaaataacaagtcttttaacttgagatatatcaaaaacatattattttctgatggagccaagaacttgactacggaaggagcttgcaaggacgtatagtccattggatttaagccaccaataacaattgggtcaactgcaatgcgagcttcaaaatgggtgtagaaggtacataggcatgatcggtcttaaaagttcaagttttgtttttcttttttgtgtgtgtagaaaaatacaaagccatgatgggtcttaagagttcaaggggtcaagatcaaagtaagatgtgtatattcaacaccattagaagcagaatttcttagagcaaaggtattgcacgatcttgtatccttgttaacgacaagactgactaattggctaaagctctaatacctattggttgtggttatgtatttccctttcattggctaaatatccgaacgtgaggaacaccatgactgttggatgattttgatcatttttcaacaagtttcttttgttattggtcaataacttttgctacaaatctacttgtgtaattaatttcttacgtggccaaaatgcccaaaacataacatgtgccgttcaagaaaaaaaatgctcaatgcatgatccttgtcccacaaattaccacactctagtgctcccacatacaaccttcgatacatgcgagatatggtagaaatttattgtgcctttcatttgaggatattgtaaaataaaatcataaaggaaaaagaggaagaagaactcatccggattgtagttatctccattatccaacaacaataatccggatgaattcttgtgttagagacgtagagtcttggttgggatcagagaaacggtcttgagatcatggtgtcaaacaaagatctttcctacaaaattgaaactcgatcgagtgctttctcagagtcagaggtttatgtgtaatagagatacacttaaccattagacccacacgtagtgcaagaaccttactggtaagaggtcccagaacgatatccattattttgtagttggaggccacaccaaccgccgcaatgttccaatatatcaaagggattataaatcataatgagatactagaacattggcgtggttaatgtcatctccagcaacccaagaataatggatatcattatggcccgtatacacctctgaccagagcaattttcaccatatgttatggtctgcgacactagtttctgaaccaagaaactagtttagctttctttcttttttgacttgtgatcagcaatgaaatcttgatttcttgggaagaaaggaaccgattgtgagacctgatctttatgttgagaagagtgtcacaagcgttttaatccaagaacttctttgtttttgaataactcaaagcattctatagttcaaatcaatctctttctgaatgtagttgccaacgacggcaattgtggacaacactatgacaataaaactacacaaacaaatgcatagaattggatattgaaatctgaatttaggtccagaacataacttttatttgaccatatattcgaatgcacgagatgtgcattctgaatagtgatttaaaaatcatacaaaagaaagaaatagaaagcttgttaactctaaatgaccaaatggatgaaagagcaacaacatggtgatatgatatacacatgtattatgaaacttggtctcaacaaggtaacttgaaacccatgtaacgaccagagacataatcattccaaacatcaagagctccatagcttgtcatcaacacaatactcaatgccatgacgataccaaccgagaacacaatgatcgaagcccttccatactcggttattaccttttgaaccacctttagtcccacgagtgatgccacaaaacatataaccgcaaatatacttgcggttccggtatgttccatgcctagtaataagtattgaatcgcagacatcgttgatgaaaaaagaaccatgaaagaacatgtcgctgcagttacctataacaatataaacagagtatttaaactagagatcgataaacaaaacagagtattttctgatcgagccaagaacttaattacctcgggagcgataccaacttggagaagaagaggactaatgagcattccacctccaataccaaaaacaccacccaaaactccagctaatagagccattacagggaacatacacttgtttgatcttgctccatcatttgatctcaaatcttctacatcctgcaagcacaaaattgttttaagacattcatcgattctcgtcctttttttaaaaactattcaagtgtttgttagatttgtttgaaatctaacctttactgagacatggtaatctgattgttgttggctttgaacattgtcactgaagcagatccagagagtgaagaagagagttagtggtatttgagacgatgaaatgagccagtaggcgtttccacatggctcgatcgatatgattccctgcaaatacaaatcatgaaattcttaaaaaataaaagaaaatcttgaatttgttcctttcatatatttttttatgaagtcacatttcaatgtcactgtagagaaatactgtgttatactttctttcttgaaaatgacataaaaatagtagccctaagcatcattgaaagggtaaggaatctaaaaaagtgcaaatcttaaagaagatcctaggaagaaaaagacacgtaagtagtgtttgtatttttgattccctttattaggaccatctcaaaactaacaaacattattgatgacctgtctttcacgtgaacaagttcgctatcgcttttcatcaaaaaaaaaaaaaaaagttccctatcgtttttcaaacgcatctttattcttcaccacgtgattccaaaaaacaaaaaacatatacaagactaaaaaaaaaagatgtcatgaaggtagatgagaaaaattcaaacgtgtttcatttacttctcaaacattaaacataaatcttaacgttcacctaattactccatcaacgtgattttgacatatactttctctgtataatcttttacgtctttgaaatatacctagataaagcaaaaaatgtaattggtatataaaaaccaactgaaaaataaaggaatatcttacagaatcatcattttgacatatttttattctcggtcatagttttttccttttatggtaaaaaaaattactttttatcaaatagttttagaaagtttggttagaggtattagtgaaatgaaatttacaagtcagccaattaaaaataataataactcaatgaaaacaatattaactattccaaaaaaaaaaatcattcaaatattatgcaaataattctttttttttctggataactatgcaaagttgcaagcctttttggctttttctttcttgtttttttttcctttaattttctgtgttttgtctctagtagtctaaattgtcaattccaaatttcaaacttttaagcagatctataaaagacattaaatacgattcattaaatgcaggcaacattaattctaatactaataatgaaattaaattaaattaaatgaaactttttagttacctcgccatatttgtttcctcgaagaagataaactgcgaagtaagaaagccaaataatgaccaaaactccaagcttaatccatggaaacctctttggtctctgataatcctccaagagaggcaactttagactctcaatcttatcttcttcatcatcttcttcaattctattcgattctctaatcttcaccatctccgattccaatctccaataataaagtccatttccaaaagtcttcaacgtcgaccacgcaagaaacacagcgaagagactcgtaatcaaccagttcggaaaaacaagattacagatcacaccaatactaactccaagaagcatacatggttccaataaaagagctaaatcgaagtcgattagggttttgccaccagatttagggtttctaacgaatagattgcatcccacgttagctatagatccaccagtaaccataaaagctgagaagcttgaagctgtctttagatcgagaccggccacgattgtcattatcggaacatataaacctccaccgccgattccaccggcgcttgagattgatgaagctaggaaagagagtaagccggcgatgatcgttgatgttgttagttcgattcttggttggttgaattttgttgaaaaatcgaggtatgagcttgttttgttgaggagttgatcgacgggagaaagaattgaaggttcttgttctgcgattgatggagtcaagaagatgatgaaggagagaattatagggacgaaattgtttctcatttttttgtttgggggttttggttaactttttaaaagtttgggagattttaggagatgttgggatttttatgtatgttatttctgtttataacactttatatatagccatataggagagtgtgtgatgcttggattgtcaagtagaaagaaaaaaaaaatatattaaatagaaatagaaatagaaatagaaagaagaagataaaaagagacaaatcaacaattggcaagtggtgagaaaatgaaataataccacatagaacttgtgtgggcattatgttatttgctcccaccattacctattactttctcatacttgttaaatattattatgtaaaaccagaataacttaggagcgagacttttatttaaataagatccactgatcttaaaagtgagacttttgtattttttaaaaatatgctacagatttttttatatagttattatataaaaaatataaatataattaatatctacaatacttttgaaaactgttagcctcaaaaaaatattatttcattaacaataaaatttcagttaaagagactatataaatttctaaatcacatttcaattcaattaaaaactaaattctttaatctttgagtgaaattaaagtaaacatatatatagttttattttggtttgtctgctttttcaacccgaacagagtattataactatcaatattagtaaatgataagtgatagtattggttcacttcatcacttagaagaacaaaatgataagtgaatgatttcaatttctctgattgatactttagacagtacctacctagaaacttccagacatcatgaacggctcaatactaatagtctggttttagcttcttccaaacaaaacagttttataagagatattataaaattttgatatattacttgcaacatgctttatttaacgttcgtctctcgaaacccatataggttaacccacaagccaagtgtaaaattttatatcttttggaaatccccatgttccgaccacatgcagacagtttatttctctaatgtcaaacccacatgcaaaaaactataccataaacctccaaagccacatgcaagtaaaatttaattcttttttgatggggagtaaatatacttatgtgttttaatcgaaagatgatgaaacgaatgacgtaatgagtcattctcgtgttattttcccaaatatatgtctaactcaagtaagcaggtaattgtcaaatcaatgtaatagtttatatgaaactttcctttattcaatggcatacttatctttagagtcatgagttggcgaaaaaataaacacttatctgttgtgtttcgttttatgtagatcaacttgctctttgcatatacgaccaaattgataataatataaactatatatatgcttatgtatatgtttgcatgtaagtatacaatgtttgtcgacattattaaccagatattattggatccttcacttctacgccgactaacttgatctagctagtaaccgattatataattgaataactattttaagttttgaataactattttaaattttacattttctgatggtattaagtttgaaatggttatatagactcgttgtaagaagatgtagttaatatgaaaattctccaacgataatcaattgtctggtgttatatctttttgttatagatttcttggatggaaagtttataatgccggccaattctaagctacacaaatgaaaagaaattatttgtacgtgacccacactctaactgctaacctcgcttgaagttggaatagtatctagtattatttttgccatctgatagtagattgatcttaaagatttacctaactaaaagagatccttaaatcaagctttcaattcttatttttccaaaaatataactgtcttgtgtgtaagttttttattatgttttgtagaaagcctcaagattgcaatatagttctgaaattgcaacaaattttgttttatttataaccaagattaagtaatggttgattaacggtaacgttcgattctactcagttttcagtatacatatatagatcggaaacttcctacctaatttaaaccaaaaaattgatctaaatatcaaactatatcgatcttacctaaatataaaaagattttttatacgtacctgaaaagtggaaaccaaacccaccatgaaataatttgaactgaaatttaactttatttggaaaaacaaatgtatgtattttgattaaaggaaccaaaatttaaaactacaatcatatcacggcgccaaattctcctatttaaatatgattaccgtagaagcattgaaatattttataatttgtaaactatacattatcatgctgctggataaatagtataaggtttaaatacgagactggtatatattaaactggagaatatacaactatacaagcattccataagacattaatctttaggggtctgataacctgaatctaggacaacgaatattccaattattggttgtacaactacacaagataaattttaacaaagaatacaagttgtctgtttacagatttttatatatagccatatggagaattagatatttcgctaaacctgaaagaagacttaaatttcttctaattttcttatttttagcaatcatgatcaggtaagttctttacattatctagaacaacctagtgtacacaattttccgatgcactttcttatattaatcaaaagtgttgtgaactttttggttaaagtcgtagtcgtgtattcgtaataacattattgtaatctcgaactgtttcgatatgattttggctcttggaaagtctcctgagtcgggcttgtactatgatccaatagtaaataatcacttaaaaagcaacataaacgataaaaatatgataagtatgagccggctctaaaagtcaccaattttccattctcatgatcaaacataattagcaagtattatatttgagatctcataatagatcgtacgttttcattacttgttgaaataccaagattttaaaacaaacttatttagtttctacaccatcaatttttctaagcttatctaatcgatacaacttttaataaatgaaacaagctgtataagtttattgataattgttatctataacatggtgtataagtcattctggcgccgaatgataacgcgaactaaatacatatttcatataaaaaaattgtttaaaaaaaatatatataataggagtatctttcaagtatatatagggtttacacgcaacacgtattaccatttaccaacttgcactagtctaatgatattgtgttgtgatgtattggtcaagtgaagggggatcaatttctataatacaaaaagttaacaccaacggtttggaattgtccagacttttagtttgttgaaaagttgtagtttaactttaagctcaaaatcattcgtttatggtataaaagaacacatgtacaaattaatttggcaacgataaacagatggctaattaattgtgtgggtttcaacagtgatcagtacaattgaaatctgatttaaacaaacgagtttactttcgtaaatccgattcggtgttcgttattggtgatcaaccgtgagattctctccagtgttaagcgtgggaatttctatcgatgcttctctttggtttgccttctttttctttttaatgcaacaacaacaaagagaacacacggaaattaccaagattattaccaccgcagctatcaccggagctatgattcttctaaacactttacctacacacataaaacaaaactctatgttataaagactatcaaaggaaatttgtttaaattagcatttcaaggttcataaaatatttaaattcatatttacatacatgtatagcagttgttataaagagaaaatttcgtcaagtacaatatatttaaattacacttccatatcatcaaaactaccatatcttagctaaaatttatataagtacgcttacatgtattatccatagcaatctgtgtaaaaaatgttgattttgataaatagttccaatcgttgacaaaagaaagagataaatgatccacgttatatatataagatatgttttaatgttaattaaaaaaaaaatatgatatataacatgaatatgttgctccaatcctaagtgttcgtcaaggaacacgatgaatattgctaccgatcttttatcagggtgaatatgaatattagtcggtaaattcagtttggacaaaaacaaaacaaaagagtccgttacttctaattcttgatgattagtcaaacacctaattatattatcatatgcataagttgctattaaccctaatttcacatcagttacacttacatgtttaggtaattttcagtgaagacacaaacataaatgaaaaaaaattcaaaccctagcgtagaactatattttatatatatttattctcacctaacttgaatgaaaatgattcgtcggagctaggagtatcattttctccgtaaagacgttgtgggggtggtggaggtggtggaggtggaggaggagggggtggtggcgccaaaaaagtggctttatatgtcaacatacagttcgaagagtaaaccagagcaaaacgtttaccataacaacaatccttagtctcattatacgctgatttcaagcacctatagcaatcatactgattcagatcgggtgtgcactgtaccaatccatttagatcgtaaacttctccaagataactgacatgataagtttcttccgcaaaatatgaagagctcgaataggcttcttgtatcaaccggtccatacgatattccacggtgttaatgaaataaaactggtacaacgtggtatcgtaagatgtccatgtaacaaatggaccttgatcaagaatcgagaaaatcttacggctggagtacctgaggaagcattcttcataccatatgatagcttctttttggaccggacaccatataaaaacgtttttggatgctcttgagatgcatgtttcacaagttgaggacgagatatctccgcgacatagataacttccgtacactgttgtggttggggaagaacccgaggcgtagctataaaagcctttgttggatgattgagaatcaagaacggatattaaagtatctagattggatttgtacgaactgttcggtgtgtagtttcctgatgtgtagcaatagctaaggaggtatgttggttgtgcattaagggttttgatgagaagaaaagagagaaggaagatgagttttgattgatgaagagggagagagaacatcttcgtttgagtaaacttgttgtgttcttcaacataatatcgagctataggtctatattatttgaattgactcttcttatgtatatccttttagtagacgatatagtttggttcgcatattttcatttttaaaaaaactatacactattttgtttccctcttctaatggtcaactttgggccaggctgtcctaatttgactttaatgattatgaacttgataatgtataaataaggacgaggtttcaaacttaatataaaattatatgcatgcctatatgccttttagctgattttttttctataagaaaagtccaatcccttttacgagtaaattttttaagtttgggaaaactattgatttgatgaaactaggaatttattattttaaagtatatcttgaaagatattaataaagataaactatgtaaaattatgacttaaataatcgttttactaaagtaattcgtgtggcagagatttattttgaaagatcgaattcaaaattaacataagaattttgcccattttcttatttcgattttgattttaataaaacaaaaatcatattacttttagattttagtacttttcttttaaaatgtacgtaatcattttaacaaaagttacaaaacgtttattttcttttacaagttcaatttaaaatgactaattcttttctattatgttgttcatgataatcatattatctattgcacagtctcaatctctcaaatttcaaataactatctttaataataagttctacgacgtgacaacataagcataatttttttttcccaacgtatattaatcaaacgcgtaaattgtgcaaataattaggtgacaataagattatataaagcactaatgtcggccgtcaacgaaaacaaaaaaagaacactaacgtcgagtcatatatagataatggctagtaaaaacaaaaacaaatatcgtagaggtcatcaggccgaatgttacaagttacaaccaaattcaatacacgaaaaccaataaaatgttccaataattttttgtaagcattaaaaacaaaatgtaatttcataatgttaatacatatctatgtaaattatgttggtgacacatacacttttgttcaaatcaagtgaaataaactggacatctcttgtctttagtcgcactcaacaacattccatcccaaccgatctcaatataacagcttgcgtacatcttgtgactcttactatgccatgtgtacaccttaaaacgtatcatggaccttaccttcaaacggaacattatcttcccttggttcctgtctcgttccatctccatccaacggtccttattcacggccattgcgggtcgacttaaggctccgtcgatcgagctcgtgttctttgggtcttggtaaaacggattagtaagtttagtcgaaccgatccgtttctctttgtagtaaacggatccttccatggaatcgtagtaaatgccgacgttttggttcgggttatgagccgttatcttgaagcttatgtgtgacgtctcgaacccgtcgggcctggatagaccagagattgagaacccgcggatatggacgcgtggtcggtgtggttgtagactgatccataagatgaaagtgataatgcctaaacatagtaaaagagataagaaaatggcacatatgagtttagagactcttgttgtgaggctttctttaacccgatgaacgatgttactcgccgagtggtgacgggatatgggtcgcgttgatgggttcgatcgaaccggtaaagaatcgaccttgttgtgcattttttttttgggggtagatttagtgttagtgggtcatgggaagtaaaatgatgtaatgtgaggtttatgtagcaattttttctaaaagaaaaacattgttggtagttaagaagaaagcaaaagataccttggaaaatattatggttattacactttgagaagaaaagaatagacaactaagtatctaaatttttaactaaaaagatagaggaaaactaagtagctaaaagtgcattgcttttccgtatatgcaatgcaaagatttagatgcaatcataaagttcattaaaaaatttagaccaaactccttgtccttactagctagttcctgaaaccaaggccggcccaatgcctgaaacttgtaaaatttttaatcgattaattagctattagctatgtggattatcaattaagttgatatatttgcatgtaattttcttctctaaaaatcgattaatttattttgagcggatttgaggtttcttgctggagggacatactcctgcaaagtgtccatatgttaagagttttgctaacatgtgatgtgaaggagtgcttgagaagtatttgatattataaaaaagaaaagttttagaattttgtgtaagatttcgaattaacatatgtcctaataccctgttagaaattttgaaaaaggccctaagtccaaaattagatttgcttcgagctagatagaattgaggtacttctttatttgattttcttgtcaagtacttcatcccaactcccaagtagcccatatgtccaaaactaattaactataaatgcataatttatatgagggtttgtaaaaatattctattttcttagggtttgtataggcatctaatttaacaactacaagttagactttagctcttagataatagcctagttttacaagcaaggataaaatactcatcttagaaacaactcttaatcattgtagtttagcttagttacttttaaacaaaacaacccaaatgtatgggcttgactaatggcccagtaatggccttcttgactaactccattttgactttcttcttcctcttcccatcatttcttcttctttttcatcttgatttatgatctctgcttttcatcttcttcttctcacttaatcaaaagactcaattgagtcaattctcaattctcaacagtaacattctttttttgctacaaaattcttcaataataacttcaaaattatgttatcttagagcttaagtatatattataaggatactttttgtttcttacattgaatttattgtatctatgatgttctaattatttcttgtgctttgaagactaacatcttgatatatcattttcagaattacttttagaaaattcggaagtatatagtagtttttttttggtaaaccggaagacgaaagtatatagttgaaccataattcagtactaatttgtcctcaacttttttttttttggtgtgttcctcaatcttatttaatagtagcactaatttcacaaaaaaacgacaaaatgaaatatagatcaacaataattaatatggacccattaatatatacagttttcaagactaggatgagacaataaaattgtaaactctactaattttagcaatatctattgtcaaaaattaaacaatctgctatccatactttcaatacgcatacacaaacaatttattgtttcgaagcaaacacatatacagcacaaaactttatattagtattgtctttgtatgactattaaaactcgatgttatagtggtaagtattaaaatgtatataataaaagaaaaaaccaaaacatatataattatctttcatctaaatagtaaaccaaatatataaatatatagtataatgttttgtaagtttttaaattcctattattttgcacgataagactcaattatttaagaagagaatatactactaacgtaaaatctataatggcccaacaaaattaaatattctaaaaagtcacatttattgttgaccttcacaaaaaaaaaaaactctcaattttctgtttcttataacaacataacaaacaaaaaaaggcccaaagagtattttcctccgaattcgccgacgactaatcacgagatggcgccgccggtgacggagcggtggtgcttagctttgattcttctctttctctccttgttcgtccaatcttcaacggcaatttactgcggtgctgaagattgttatgctcttctcgggtttgttcatcagcttccgatcttcattttcaaattcagattttgatttcgttctcttaatcgttttgcattatcgatttcagagtcgctcaagatgcgaacgcatcggatatcaagagatcttattataagctctctcttcaacagtaaggatgattctggatttgtttagacattgttcagatttgattttgattagtgttttgctaatctttgtttctcaattttgatgattcgatttagtcatccagataagaatccggatcctgaatcgaggaaactgtttgttaaaatcgccactgcttatgaggtacttcaatatttttatgattctgaaactttggaatctggcttagtcaatcccattatatatctctgcgtataatttcttaggtatgatccagttttagcgaatcgagaatcattacattgggagatagatttgatagtgtatggtttttttgttatagctgagaataattgaacatgaaagtttctcaaaaggattcgtcttgttgcagattttgaaagataatactactcgggcacaatatgattatgcaattgaacatccagaagaggttagtagaccattattctgagaattctcaactgttattcttggtttgtgactttgtgtacattgcataggtgaaagatctttgaaaaaaattctgtaccgctttgtgtttctttgtatataggtattttacaacaccgctcaatattaccgcgcgaaatatggacataaatcggtacgatgttattgaatgtttctgatgacttttctttcggaaaaccattggcttttttaactgatgttacgactgcctaatgtgtgttctaggatccccgtgctgttcttgttggtctattggtggttttatctgcatttcaatatctgaacaacgtggcaaggtataatgaggtacgtattagagatcgggattctctcactatgtgttaatagtctcaagtagttgttctgtatcgtttttctgatgcatgccagacctatattgttatatatttaagcatcagtactactcatctatatatcacatgtatgtgcaatacctaatcacatgtatgtgcaatacctaatcacatgtatcatagcatctcaagaaacgtagaatttgacctcttgaatgtgattcatatactttgttatgagaactttatgtagcttaaactcttaaagcctataattagaaattatacaaacctcggctcattttcttaatgagatcttgcattattgttgtgatgcaggctatagcgacggttaagcgaacacctgcttacaaaaataagctcaaggcattagaactcgaacgcacaggtggagtaagtaacaagaagaagggttcaaagcagattgaccagtatgtacccccagttatttaaattgcctttttattagctgagaatgtgtcgtatcgctgaataaatcataatcatttattgttttggcaggaaactacaggaagagctaagcaacgaacttgacttacaaatcaaaggagctgaaaaaccatcggtctgggaacttctcggtgttcgattcattctcctaccatacactatcattaaggtttcattttcttaaaatactttcactgtgccacatttcacagattcctccatatcctactttcccgagatagctgattcaacattctgttatcttccagcttctagtatggtacagcagttgggtgtggagatataaggtcaagaaagctccttattcatgggaagacgcatcatacctaacccgaagatcacttagtgtgcctgccgacgcatgggctaatctaggtatccttctattctctaatttccaacctgaaccgacatattgataaagattgatgtctaatacaatgtgattaaatctattgtgcaaattcgatatttttcagatgaatataggaaggaagatctggtgcagaaaaggctgtgggagaagcagaatcttgagaattactttgcagaaatgcgtaaagaatcgaagcggagaagataggtcacttgtcgcttaccatgcaacgatacaaaatacaattcgagtttcagagacaccatttttaccattatcactctactttaatgttataagaacgaaccagttacaagaagagacactagtataattgtacggtaccaggaaccaaatctcaatttgtcatatacaagatgaaatcatgtctgtcaatggacatggtccagttttgactcagttttgtttaaaaccaatttgctccgtggaatgttcaaatctatctttgatacttgaattcgagttctaaaacgaaacattaactttatgatcagtcaagaaacacagtgaagcaacaagattctgtttggttatattaaaaccggaggaaaccgatacaaaaaaatacatgagtgagaggatacaacgttgacatcaaagggacaaaaactaaaatgtgaaacgcttgcggatttgtttatacattgctttgcttgtacatcttggtgtccaacacttgcttcccgcacattgcgcacactcctgcacaaccacgaagaggcaattccatcagttgttaagttactctataatatcactatccaaccagaggtaagaatttagtagagtaaaacagatgtattaactatttacctttgctataggcacatgtgtgacagtatttaccatcttgatgcacttgctgcttgcagatcatacattttgtggtacaggtactgtaaggtgaccatctacaaggcaaagaaatatcacaatagaaaattagaagcagaacaagagtaaacaaaactaataactcaactcaaaaaagacaacacaaacattcacagttacaaatatcgctagttccatgagaagttgtacatttactaatgattcttattaaaacctagaggactagcgaagcggtggagttctacaccctagatggcaagagtccagtagcctaatcaactcaacagataatacaaacatcccaaacttaaaaaatttatcgctatttccatgagaaattctataattactaatgatttttagaagaacctggagggatcaactcaaaaaagacactacacgaaactacaataccaatatttcttagaagaaactacaggaaacaaaaccaataccaaactagacgatacaaacatccccaaagctacaaattaatcactatttccatattgcaattcaaataatgaaaagtagtaaaatgaagatggataaacataagaaatgcatacctattcttcttggagagaagcttattctcattgattttacgaccaccaccttcagttacattacgagcaccatccttccacttatcaggaactatcactttcgataacttcttctcacctaaaattaaaagataaaaacaaattgagtcaaaaggttcatactttgaactaaattagagatcctacaactagggtttcgatctaagaaaccaaaatcgaatcagagatcattaaatttcttcctgaaacatgtaatcgattaagctagaaacgaaacgaatcacaaatcctaacgccaatagtatagattcaattagaattaaaaccgatccaagtatagattgattcaattagaatatggaattcaaagagaagattattgatggacttacacttatcgcaaaccatcttcttcttccgagagagaaatatgaagaaaccctaacgcctaaatcaattcgaatgggttagagttacgacgaaaacttatcggtgttgaaatttttatctatgtttaaatatattttttttccttttctggatttggaaagtcggatatgtctcgtcaaaactcatagcctcacaggtattttatgccacgaatcgtaataatccacgtggtacatcaaccaataaaaacgttccacgtggtacaaccagcgagataccaagaacttcgagaccttcttctccagatagaggctttccggtaaacggcaaatacccttttccttcactttcttcgtcttctcgaatctgagagaacgagagatcaacaacaatggcgctcaaatcaaaactcgtctctcttctcttcctcatagcaacactatcatccacattcgcagcttcgttttccgattcggattccgattcagatcttctcaacgaacttgtatctctcagatcaacaagcgaatcaggcgtaatccatctcgatgaccatggaatctcaaaattcctaacctccgcttccacgcctcgtccttactcgttactcgtcttcttcgacgctactcaactccacagcaaaaacgagcttcgtcttcaagagctccgtcgcgaattcggcatcgtctccgcttcattcctcgctaacaacaatggatctgaaggaactaagcttttcttctgtgagatcgagttttcgaagtctcaatcttcgttccagctctttggcgttaacgctttacctcacattcgtcttgtaagtccttcgatatcgaatctacgtgatgaatctggtcaaatggatcaatcggattactctagattagctgaatcaatggctgagtttgttgagcaacgaactaaactcaaggtcggtcctattcaacgtccaccgctactttcgaaaccacagatcggtattatcgttgcgttgatcgttatcgctactccgtttatcatcaaaagagttttgaaaggagaaactattcttcatgatactagactttggttatctggtgctatcttcatttacttctttagtgttgctggtacaatgcacaacattatcaggaaaatgccgatgtttcttcaagatcgtaacgatccgaataagcttgtgtttttctaccaaggatctggaatgcagcttggagctgaaggatttgctgttggattcttgtatactgttgttggattgcttttggcgtttgttaccaatgtgcttgttcgagtgaagaatattactgcacaaaggttgattatgcttttggctttgttcatatcgttctgggctgtgaagaaagttgtttacttggataactggaagactggatatggaattcatccgtattggccatcgagttggcgttgattacatcacacttgaggatctctgtttcacaaggtaatggctttagttttggaaaaacagttatgggaattgagtaatgatgtttctggatgttttgtgtttcgatttgaaatacttttgaatcggtgtagtactactatttcagatggtttaaaactccttactgttacattagtccattgttaagttatttatctgaatgagtaacttatataaccaagaatatgggatctttagtcgattgaatataggaaccatatttggaaattcaggtactgtttcttgagatcagtctaggattgttgttatttggtacattgacacttttagagtttctatgtgtcttcagccttgcgccccttgcttactgcatctattcagaaaaagggactttgtgattgaggatagtgtttctgtttaagcattatgggaccttatgttttgtcgttgactgtgtcctcttctcgttttgctctctgttttagaatgagtctaagtaaaatttaggttcaagtataaatttgtgatagagatggagtttcggattaggtttagccattcgacatgacataggcttgcgcaggtgggaaccaagtctcttcttgataggcttttcatttgtgtacacacattttgtgagatcatttcaacttgaaaattgcaaagcatgcctctctgatacatcagtatgactttgattgtttgtttgcgtttattgtgcaattaatttttttttcatcaaatgaatttacaatcttcagcagttaaaacagattatacttgtttatggtaaaaaaaaaaaaatgtcacactcacacgcaaaattgaaaaagtttcagatttcactcgagaaagtgaagtaacctatgatttgtcttttgtcgaatcaaatggttgatggaaattttctttcgtctttgaatttagttggacaatctcgacttagttagctcattcgatccatttctagcccacacagaaaaaatgagcttaatccatatgagtgtttcactttttctaataagtttttgggggcttctcgacttgggccttgagttttatttgtacgttgtgtatgggtctaagtcttgctaatccacgtttcttacatatttctttaggtctctcatttgacaatttcgggtcagattgatcttcgtttgagttggactggcgcatgttcgggtttcgacatattgctatgtttaatggatttacgactctaattttaattaaccactagtaaatttggtatgtatgcttcttattattagagcagcccaatcattatcataaaaatagtccattagcccatgtgtttaaggtttctttcaagatagattcagagataaatttgtgtaatgagaagaagagaagtaactttagaattgctgatggtacaactctcttctccatctttatatgaaattaatctaataagatttcattagtgctcttggcgaacatttaaatatactctggactaacaaaacaaaatcactagtctaccataatttaggtttgcaaatttttaaagaatactcatttagtaaaatttaggtaaataaatatttaaaaactaaattcattttcgacgaggatattgaactaacccaaaggcacgaggtgtcttgaaagtgactaagcacaaattttcaacctatataaaaaaaaaacacagcctgtctcacacagtcacattgtatgttattacaatttaagacaatgacgattgcatatacataaaaattatttatacacacatatatcttgaaaacgtgaaggccacaactcaaatatctcaatatgtatagctttcaaaatctaaatagaaaagagcaaggctaatcatttgatttgacagcaatataagtttttgttgcgtcttgtatggattatgaatatattattagtcactaattagctatggttaatataacaataaatgacaactttattgattattattgataaacaaagcaaagtcttttgttaactagcataaaagaaaagatgtttagaggcatgtatttgaaaactgtgaataataaaaattcatatgatttggaatttatgttttctaatgatcggatagctttatccgtgaacttcccattttcttgtctgttttagatttgtggatcttattttcttcaaatggtagcaaatcatttgaaaaagccccacaatattttgttgcattaaaagaaaaaattgtcttcagttatacgatattagttatatcctgatctttgtatgatcatctattacgcagttactatagatttagtgcagactttcaaaactataattgtgctttgaaaatatgagtatgtaaaatcagttattttagttttttcacgtcaccttttcagattactatagtttttcaagttgttggaccaaatcttatgattgcgttgcatatatacttccatattggttagttagtgaacgaaaaaaataattaaacacaagaaaactataccatagttgaaccaatttttaaaaataaaaagacctttggactagtatgtagttaaccactatggtggttaatttccttgaacgtctaagattcgatcctatctttgcttcacgggactataccatattaaggtataaaccctatttttaaactttgtcaactagctatgtgaaccctcttggtgagcccaaaattagaccactttttaagaaaaaatttcagagaaatatatgcttttgagtcaaaatattagatccatcttcattgtctatacgatatatttctaattagcaaaaaaactttgtttataaaagaaaacctaaatggtagtcattttattaatatctttccatacataaccgataaaaagaaaagattcattctaataaacaaattaaaaaattcacactttttaaaattgacatattattaagaaaagataggtgtcttgaggacatatcaagcgtttaaatgcttaatcaaaatctaaaacgcttttaagacgtttcaatttttataagaaatattataaaataatattaatgaaatatcatgatttatatatatatatatattaattaattacatatttaaagttgtaagaaaaaccaatgattgtattttatattgaaagaaattttgtttagctaaaaggataaaagtttgcttctttttttagtctaataatttcttactttttcaactccaaattctagttgttatactgtccaaatccagtattataattgacatcaaaactttatagaattaggcatacgcaacatttagttgtatatataaaagtatgtattagagtagacgaagaaaatccctagaatgcttattacatgcgatttcgacaacatatactgctaaaatgccaccaaaatttttgtctattctttagatataattgttacaatatgattcatttaacattttgttgaattgtggagcgaaaatatcttggattcgttaatcgatccaatgagcgtgctagatgcggtttaaccgaagcggttatgtcgacgatggaccggaaaacctcctcccatttgagagttgcggtcatgaccaaatttgttatagtgttcttgaatagtatattttcagaaaatttcaagcttattaattatttgtcgttgtttcctattaattattgtttataaagctaacataggaaaatgaaagttgtaaatacatttttattttcttagtttttgagtaaagaagaagttttgagactagatttgtacataatcctctgatcaacgaccaaatcattttatatgatatcttctcaaatgtcactcgaactgtgtaaacattcgtttaatcataacgaaaccgaaccatcataattttcacattaaaatgaaccattataaatcatttctgttttttttattttctctaatcgtttacgaaaatttagatttttaaaaataaattgctaaattcctaaacgcattctagtccaatttttgaacagttgtattggagtggatgataactagtaaacgaatggaattggtagttgaactaaaactcgtggaatggatcacctaaacctttaactaatttcttattgtcttatacataacatcggtaaacaaaactgtaaacactattctccttgtccttggtcggataagatattcgtttttctgttttccgttaaaatatatacaaattttatatcctccaataattgatcaagaatatatatactttcatttttatttatatattaccactactctttcatgtctccttccaatttttctttgtcttcaaatactattccaatctcaaacgaaagagtattttgtctcttttctctttcttcttcattttcatcatcctcttcaatcatctctgattcttttcttctgttcgattcattgcgttctttaccaaattttcttttggtcttgttaacaatatcatcttacattttttatagaagtgtttcagttctttataagtagacagatttttattgttgcgtcggattcttgagcatggctacaagattcaaggggctttataacaagagcttcaaatgtttctccgacatttttggtaaatagataaaacctctaatcttgtttagttttatctttaaatggacatgaataagctttctaatgattacaaaatggattaaatttgtagatgtggaggaggaggaggagatggaaattggttatccgaccgatgttcgacacgtgtcacatatcggttgggatagttcatcaagtagtgcacctagttgggtaagacatttttttgcaacaattagaaattatggtgtgtgttttttaattacaacgttaatgtgctctgtgttgtggatttcatcatttgtactctgttttgatgttttaagatatcagatgagcaaaaaaaatagaacgtggatcgatttaggttaagttttaacctatttatggaattttgcagctacatgaattcaagacgagcaacaatgttttagagccaaactcatcgtggccatttcaaggcaagtttttttctattatattccttttttaaaagaagctttctgtcaataataagcaaatggtttccacgtattactagtccttattgaaatttatatcaaaaaataaataatttaagcagacctccaaatgtattacttgatagatggatgcataaactaatatatgtgtttgacaacatagatcctaatgaaatgtaattttaaaaatatatagatttgaagtcagcgatggaggcatttggagaagttgaaagcagcaaagaaatggaaagagaatcaactaaacaaaatctgaagaagaaactctcttcaaaagcttctctattgtgtaattcatggtcaccaagattctcaagatcaagcaaggtcctggcttaattatttttcattttaatttaatttcccatgccattgtttatataataatatatagagcgtatagtaagatatcaatcttaatgttttcattcgagatacgtatgtcttttcacaagtgtgtacaaattaatattcatactgtcttcgcaatgatattgggatggttttactaatttcacaaattattgtttcaaaaagtatccattaagaaaactttcacaaatctaatgattatgacttgttttagatctatatttttgttttcgaatttcgaagtttctttgaaaagaatgaatatggtgaaaatctagttcagtagggttgtgaatgtgaaaatttactatacgacattccgtttgggacagcgggggaaattgggatgatcaaggattagtgtatattggtcgtaagtgcaacaataatcacaatttattgagttagtggtttgagtgaagaacatttgatggttatgggttttaaaatgtaatgaacccttgatttctctattgcacttttgaaagtttttaaacttcgcagctcaatttttatcaagtacttagtaatttatattatggtgtttgtaatcatcgaaagtttgatcaaatgagatgatgcttaacagaaaaaaaacaaataatcaaaaaaagaagttaaaactaatttagttataaatggattgaatgacctccttcacaaaatctaaaatatgataaaatggtttcattaatcaagtgatactggttaagtggttcttacttaaggaagaattgcttcttatgtcgccaaagaggcaaagatcaattcttcttaaacgtgtgatttacaaaatcattttatttgatcaatcgaaatggtgttatatttttacgctcattaaaaaaccatgtgagtggactattcaatagctaaatttactatatacagagatttttcgggtggtagaaacccccgattacacctgatttcattggcttatatggccttgtgccgatatagtagtggacatactctaaagtcttgaaaaatgcaccaaaaagctaatactttgttaacatgggctaaacattttgcctagcatatatgatccggcccatttattaatatgtatctacatctttaagaagtaacgaatttgtagtagcaaagaatgaatggaatcgatattgttcagtgaccatgaaattctcatatattgccataagcccataccttttttttattatttatactttttacggtcgaagaaaaagagaatagtagcaggattcctactgcaggcaatgataataaacttatagaaattttgaacagcgaaaagaaaacgacttgagattcaatatcaatcgttggtgctgtccaattggcaatgaagtaaaatttatgaacattgaatttttttaatttacctattaagcttcgatcgtattcaacctaagaatattacattttataaaatttaacagtaaaaatatctaatttaagagataattattaaaaattatataaaaaagtgactgactttttaatctaattttaatttattaggagaaaatctactttgaaaattattatatatatatatatatatattgtgaggtagaattttttatttcttaaaaaggtttactattttaactgaacattgtgtaaacgatgaacatcataactcgattgtgtccaattcatatctaatagttaaatgaatcaacgactcatatatcacggagcaaaacgcgcatgcagaaaaatccaccaagcgaacaatttggaaagcgatatttctgatgaatcgttgatttccccaatattacgaactttcctgaaatctttcctagccgtcgaatatgaaccaaatttattacctgacctataaacacacacatatgcaggcaaatggacacatgtgttctatgaatcagtgttggtgaagagagagcttgtcgtgtaatgagagttgcatgtgttcaacaactttgtgtatgttttgtaattttcctcttgtgatattttctacggtgagaattccatttgcaaggttacatcaatgggtgaagcctgtacgtccaacatgtgaccagaccttcttttatatcaacggtccaaattaacattacattaacatacacaaatatattatatatttaatactattgttcctgttcttctttttattgtcgttacctcgttagcatcaatgacgaatgaaaatgacaaacgatacattgtgttgttcgaattcgtgttattgttgccaaaacgatgtgataataatggaactatgttcattgtattggcgttgcccgctggtttacaacgatctatttcatcgatgaattttggtaattaacgatataaaattttcaatactaaaagacacacctttttcaacatttctttttataacttatgatgttcccattccattatattatagctcaacttacaaactaacttgtcacatgtaaattactcattgactcgtgacaactattgacggcaatattatcaaactcgtggttggaaatattttaagtccacaaaggaggagaaaataaaattcttgaatattgaaaattcttatacctctatgatataaaagaaaataaaatcaaagagaagtaccacaaaaacaaatttttagtatttaaaaatgccattactttggaaaaggtcccaaaatatcacaaaatctaggcttaggaagggtctctaaacgtttattaagaattactaagcccaaaacttgaaaactcctaaaactctttcttcaaatttagactaatcatttttaattctctccaaaatattagtaacccttgtaaagcctaaacattttagtaaattttatgatttttggtggtaattttggaaaataaagcataaaatgtggtattccgaggactgaccaaatttcaaaaattcaaataaatgattaatatcctaaatcaatcattattttttataattgtttttgagaaacttatattaatactattttcaggcattttcttataaattaccctatggttttagtaggcaacaaaaagatgaacgtctcagatttttttgaattcaatttaatcttaacaaaagcgataaatatcaagaagataattgggtacgtgtattgtgtactatttcaaaattgatatttgcttccataacgtaacgtaacgtaagacccaaagattaacacttggtttcttcatggtcgtagattattaaaagtttataactaatgacgacaaagtttaaacgaaaaacaatattttctcaattttcactagttttttttttttattccagaaaattattagtatacaaccaactatttttacgattataaacttttatttgatgatattcataatttagaaaaaccttaaacggatcttaatgtcaatatcatcagctcatgcaccgcctctcggatatgttgacaaaattaccccatacaatataaaccaccaaaccataaccacaaagggtatattcgtatattataaaaatatctgaatagtcgaacttgtcgttacactcaaaaacgaaatctttccctcctctgttctcaatctttctataaattctcttcttcttcttcttccattttcccaacaacacaaagtctctctctctctgataaaatcttaaaacccacctcgagatcatagtcttcatcaattagccataaaaaagcacaatgctttcttcaatcaaaccatcttcgtcttccttctccaccgctatctccggcagcgtaaggcggtcaattcctacaaagctcaagttttctcctttactcatcatcaaaaactgccataaccaaagctttaacgctaatgttgtctcccatcaaaagcctctacacatttcatctgcttcgaatttcaagcgtgaggtcaaagtcgaagcttacgaggccgatcgttcccgtccactggacatcaacatcgagcttcccgatgaacaatccgcgcagaaactgaaaatcggaatctacttcgcaacttggtgggcacttaacgttgtcttcaacatctacaacaagaaagtcctcaatgcttttccttacccgtggcttacttcgacgttgtctctcgcttgtggttctttgatgatgcttgtctcttgggctactagaatcgcagatgctcctaaaactgatctcgagttctggaaaactctgttcccggtaagtaattagggtttattgtgtgtagttgttgcctcaaaagtttcaatcttttttttttacgattgagagctcagtttctggaatactctgtttttccggtacgaattcatgatttattctgttttctggtaaaaagtcatgatttactctgttttacggtaagaattttagattctctgttttcatgtaagtattttatatcttctctgttttcatgtaagaatttagtgtactttcgagcatgaaactgatcttgagatctgtcttccggtaatggtttaggtattttcatgatgttgttgcttgatggatttataattttgtttgttgtctgataatgaaagagtgtgttttgatcgatgttcccgttttttcttattcttcaaggtcgctgtagcacacacgataggacacgttgcagcaacagtgagtatgtcaaaagtagcagtttccttcacacacatcattaaaagtggtgaaccagctttcagtgtcttagtctcaagattcttcatgggagagactttccctcttcctgtctatctctctctcttaccaatcatcggaggctgcgctctcgcggccatcaccgagcttaacttcaacatcactggtaaaactcacaatcctagaatattggtttcacatggtgacatttctttgatttatggtcttatgtgaaactttgtggaattttttttgtagggtttatgggggcaatgatatcgaatttggcatttgtgttccggaatatcttttcgaagaaagggatgaaagggaagtcagtgagcggaatgaactactacgcttgcttatcgatgatgtctcttgtgatcctcactccattttctattgccgtggaaggtcctcaaatgtgggctgctggttggcaaaatgcggtttctcaagtcggaccaaactttgtctggtatgatctaaaaaccaaatcaataatctttaattgtttgttaagttttatagactccaactcaaatgactatgagtggattggtatatattgctttagttcccttctaacttaagatataagattctaacttaatgtgttgtttttgttttttgaatcaataggtgggtagtggcacaaagtgtgttttaccatttgtacaatcaggtctcatacatgtcattagaccagatttcgccgttaactttcagtatcggtaatacgatgaagcggatttccgttattgttgcatcgatcatcattttccataccccgattcaaccggttaatgccctcggtgctgccattgcgatttttggaactttcctctactcacaggtaaacaaacaaacttattcttgtttacctacctctagtacttggttctttagtgaacaatttctagttctaatataattcattgacgttcttcctatgttctttgcaatcattgagcaggcgaagcagtgaggatggtttaggaggcagttttttgggtttgttttgcaaaagaaaatgaaaactaacaaaagagtagccggggaggagagaacattccggtgagatcaacatcggaaaatgcttttccccggtccatggatatgaagaaactggagcttgaagttgatagagtgtttgcttttactttttttttcattgtctcataatagattctgcacaagacaggctaattctatattatctatgttttatttagatgatcgtaataataaagatatcagtgtcatttcttgatcagaccatctactgaattatttttgaggtatctatcagttgatgcatgtgtaatagtttcagaaatcactgaattataaatatattgaggtgtgtcgctactggcctatatacatatcatattaggccattaggttaaaaattctactcaatccattccttataattggtctagttagctatattggtctctcacacactctcttattccaagaagaacattaggaaactccaatattgggcctggtccatgtactcttctaagttcgtctatacttggacactgtctccattttgtgggctagggatctacaatccaatgactgcaaaatatttacggcatgcaaaacttcttatgacaagtgtgtttgacacacgtctctaaaatttcaattatgtggatgtgcttatttgtatcaatgcatttcatgcttgcttggcttcgtatggaaaaagtatgagccatcataaaaatttgttaaaaaagattcgagtcatttacattgttttaggagccttttttgatcggttagggtgctagagaacccattacatactagtcatctgggggtattagtattttgtaagctgttttaaacgattccgaattttgtttctatattttgtggtcagatctgatggcctgaaaatcatccccaataatcaaatcttaatgcgcgtttaatattttactaaattatgatcatattattttttgcgatctagtcagtagtcactgtagtgaagttggtgagacgacacccacccaaaaggagtacgtaaagcaattccggcttccaattattttatgctaatcttgtcggcagatgagatggatacatttatacatatcatatataataggttgggaaattgttagtttcgttgataaaataattaaggttttgacttttgactgattctggatttgatttcaggaaatgtaaaattttccagattctgtatgtactttttgataagaaatttcaagttgctgcatgtcaaaaatttcaactaatctcttttgtagtgtataaatttatttactgtccaatagacaattgccaccgatcctaaggagcaacgtacaataccaaaagtttgcatgcataataaaagttcatttaaacataacgtataataattttcagagtgattattgtaactttcaaattttcacataaattttagagtattaaatcaaatagcctttgtaatttttgagtaaactaaatgacggtctttttttactcaaaatcaattacaaccctttaaaatatcctaaaagctttgttttaaaaaagaagataaattatcacaacaagaatataatctaactcactacaaaatgtaaggccaaagaagagatacgttcactgattggacgtgatggagagagctcacatctcgtctggccttatcatcatcgtaatctattgaagatatatatatggtaagacaaattaactttactcacggattctattctttttacccattctcggttttgtaacgaacgacgaaccaccaactagacaacgaaacgtcccacttgtttccattagttaaatttgggtaacaccaaaatcgcattaacttaataaaacactgttccaatatcaaccactgccatattttctcccttatttttttttgacatcaaaactgattttggagaggctttgaaaccccgactataaatttgatttaggtgttattctgatttatgagtgaatagttacacagtcggagtttgaactgaaagttataggattacatttttggtaaaaaattgttgagtcgtatttttggtagaaaacagtaaaattatgttttttgacagaaaattggaggatagtaattttggaggaaatcatatatatgaaaattggccaactctctccatatgattgacacataatcactttagcatttgacatgtgtctattaaataattaatgtaagctcttcaacttctaatttataggttaaagatatatttattatttaattttacatcttattttattttacgtatttaattatactattactatatttattttaatattacatgatttttcaataaaaccattttaatagttttcttatactctgaagttttttttttttttttgtaatccaaactcaaagtatgagtgtataatagtcgtggattacttaataatttgagtaagttattctcttaaatgaatatttatattttcttaaattgatatttatataataaatcactaagggtgaaaaatgcgtaaggagttccatcatcaaattcttaggtttctagaatccaacactaacctctgttaaattggtttaaaacaaacgttgtttatgaattatgtatatgatgcattgttgagaacgttgctagaaaaaaatatttttaatactaaaagtaattgtttattgcatgattgaatgattagataaatataaattatatttaaattaaacactacaaaagaatccgaaaaaaccgcgacgtagcgcggataattacctagtagtgttaaaacaaaattggaggaaattttggagatcacatttttaacataaaattagtagaaatatatattttaattattaaataaaaaattaaagtaagcgctaaatgtcattaagaaaattttgtgaaaggcggaaacaaaaattttaaaagaaaaagaaaggactaatcacatcatcgccattcaatgatatagtttgacaatgatatgattcattaactaccattcaataaatcggtttatgaaatctaacggttaaatattagttggtaaagcatgattaattaagataatcactcaacaatcaattcaggaccaacgtcacctagctaccaccacgaaggaaaatgctaatacaagaaccaaatcgtcttattaaccagttatctttttctcatggaccacatttaaatcgtcacggcaattaagctagattttaagaaagaataaatgggatactcaactaattgccacaaattttattacttttaaaactcggctgctcggcccaaacttatccggtacggatggatagacctatcttttatcgtgtaaagaaactcttgggctccactcttgacgttgctcattttatctacttttgttggtttcttagtgacctttgacgtttatttacatagagttgacagatttgaattgacgttttctcaataatgcagaccaaaattttcacgtttcttacatgtacatatatatagtaaaacaaatctctgaagacacacaagagaatcaagaacaatgaaaaatttaaccagtttcgtaattgttatcttactacaaagcttattgtttcatgtatatggtcgtcatcaaagttcttcgaagaacattttagtagattcatctccatttccttctgatttcctctttggtacagcttcttccgcttaccaggtacttattttgcgtcccactgataatttaatatcagatttatttagtgtatcgtcattacgaaatgtttattttatatataaaaaaattgtgaatagtatgaaggtgcgttcttgactgatggaaaaagtttgaacaattgggatgtctttacgcataaaaatcctggtatgtattttattttggtttccatttggtttattttctatttgaaatagtttaagattagtttaagatttttatttttttttaattcacttattctattgacaagtatatatattggaactgcagggaaaatacttgacaagaacaatgcagatagagctgtggaccaatataatcgatttttggttattttcttatgataattatttctttctatttttgttcttgtcaacttcttttatcatattatattctcatattatttgatgttgttatttattttatattatcttctatgcttaggaggacatccaattaatgtcttttcttggagtgaacagttataggttttcaatttcttggtgtagaatcttacctagtaagtccttctttagttaaatcagcagtattattaatactacattgcattgcatggtaaaaaaaagaaaatattcgattgcatctcatatactaaccagagttgataaattaaaatactgaaactcaatcgacgaatagttatttagatttagcttattatttgtgagacaggaggaagatttggagagattaattatttggggataaagtattacaacatatttatcgatgctctcattagtagaggtacttttttgtctttccggtttataataatttaagtttttttttaaaatattgtaatctcataaagttaatgaaaatacataattgtatcaactaatcactatccagggattaaaccatttgtgacgttgaaccatgtcgactatcctcaagaactcgaggaccggtttcaaagttggttaaaccccgagatgcagtgagtggttaaatagaattagtatttttatgaacccctaattacttagaatggcaatgaacttataaacacttttttttttttttgttatttttgataggaaggaatttggttatttagccgatatatgtttcaagcattttggaaaccgagttaaatactggaccacgcttaacgaaccaaatcaacaattaatcttaggctatctaacaggtaaatttccaccctctcgttgctcctcgccatacgggaactgtagccaggggaattcagaaaccgaacctttcatagccgcacataacatgatccttgcacacgcaaaagcggttaacatatacaagaccaaatatcaggtaataaaactcatacatcaaattaagacctggtttcgtgagttatcgatataaatataatgtttttgcagaaagaacaaaagggaagcattggcattgtggtacaaacatcatggtttgaacccattagtgattccaatgcggataaagaagctgctgagagagctcaatcattttactctaattggtatgttatattactatatatgttgagatcatatttgtagatatgaagtatagtacttcacccacatatggaatatatattgttttatctatttgtattctaacatgtactaggattctagatcccgttatatatgggaaatatccaaaagaaatggtagatattcttggaccagccttgccacaattttcgagcaatgaagtgaagaacttagagaagtcgagggcagatttcgttggtattaatcactatacaagttacttcattcaagattgtttgacctctgcttgtaatactggacatggagcttttaaggccgaaggatatgctctcaagttagaccggaaaggcaatgttactataggagaacttgtaagtacattcattcagtttcttatattcaatattttacgactatattcaaatgttttagtaaattttattgtttattgaccatgtttctattgttagaccgatgtaaattggcagcatattgatcccacaggattccacaagatgctgaattatttaaaagataggtacccaaacatgccaatgttcataactgaaaacggtacaagacctcaaatttgatcaatgatcgagtcatcaaccatatttgaaattatcatgaaaaattattattaatggcttgaaggttttggagacttgcaaaaacctgaaacaacggataaagaacttctaaatgatacaaaaaggatccaatacatgagtggatacttagaagctttacaagcagcaatgaggtaaataatttatgtaaatttatgcagaaatccaattcttaaaatcatgcattcaaatagtctttaaaccaatttttatctaatgaaaatttactaattctatataagttgtgaattgttttggtagggatggagcaaatgtgaagggttattttgtgtggtcactattagacaattttgagtggttgttcggatacaaggttcggtttggtctattccatgtggatctaacaactcttaaaaggtcaccgaaacaatcagcttcatggtacaaaaattatatcgaagaacacgtgaatcgaagagatatcgtagataattattaaacacatttatttttaattcgtattcactgccaaagaaagtcaaaaattacaaaagcatttaaaattgatacttatcattgttgttgattgttgaatgattaaatttgtcttttcctcctaaaagtgaatgtttaatgtgttacatgattatttgtctaatcttgcacaataattctattagcttaagatgttgaagaacacgtgagaagagaatttaggttttttttttggtcaaaggaagaatagtaattcgtattcctaagtaaagaaagtcaaactaggaaagaatttatgtaacttcgttaaatgaatgattaatggttttctttaccttaaagtgaatgtttaatcagtgttacgcgccatacggaagtaattgtctaatcttgcacaatcattcaacacgttttcaaagaaaactttttttgttctctatgatgataatagtgttaaatcaaaagtagtacaaaagtaaactaaacttattttagattaaaaatcaccgaaaaaactaaacacgcgttagaaagcatttgacatcacctccaaatttaatttcacgcaagcaagcgtttctaagatatggattctaaacgctatatcactgttttttgtaagataaattcttcttaattttttcaataaaaaaatttaaaattaaaaataaaatcataaactaactgataatgaccaaaggaaccataaacacctagaaaattatatttctgtgttttctatctgcggtttaacgtcagtaacatctaggaaagttattttacgaaagtgaacttggtttttgtttgattgaaatatgtttcagactttcagaagaaaaaaaaagatacttatttaaaatatgttaagattttagttcacttcaaattatgtaaacatgctgatttttttttttttttttttttttttttttgcaatcatccttcaatattgtctgcgaaacagtcaagtttcaagtacgattcacaacatttttcaaaaaatttattcattcatttcactcccaaaactttttaatttacaaaactacccgtacacgtatattggttgaatagaaattttttgaatatttattatattttgagttacatatagactatgatttaatcaaatacacaatgagtcgttaaacaatctaaagaaaaagacacacgaacaaactgataacatagataacatataagcaaaataggtcggaatcaacaattacatatataaatggttgcgtggttaatgatttcatttggtattttcacgacaagatcgtttctaggtacatagaagtcaacttcgttgccatataaactgtataacacttagtcatacaatctggtttatttatcaagttcaaaaatttaatttaatcaaaatatttgtttgcgaaattttcaatcgagaattaaaaaattaaaaaaagttgcgtggttgagttaatcgtttggtctccatcgctgatatcttcaatttctctgaattaatcttcacatagctgtataaagacctagaaaagaaaacagatatactagtaaccaaacttagaatcaagaaagaaaaaaacagctatagagttgaataagaagaagaagaagatgacattttttaaaccaattagaatcatcaattttttattcctatttttcatatttcttgtggtatacgcaaccgtgttctgcaaattttgttcagacactggaaacttcaaaagaagtaagttgaggtacgaaacttccgatgatagttatgaagctaggagtagccatgtcaccaaccatatcctcagccgccgcaacaccaaccccttcaccaaatgggtcaacgttctccgccgcactagcacttcttgtacgaaaccgtaagtttcttctttttacttgaatttatataaacgtatgaattagtcgtgtgtttgccaaaaaagaaaagaaaaagaattagccgtgtcatagaattgtaaattatggcgacggatgatataatatttaacacgtgagtagtattgaagacatttattaaagaatatgtttgttgttaaaaagtaagatatcagtaattaattaatgtttcacactgtcaataacataaaatatgtgattttgaattcgaagcatagtaacaacaatattaaaaactattacgccataaactatagccatagtatttttatttatacttatttatactttctaacttccaaatttttatattttatataataatcatcaacgctatatatctagaaagtaaaaccagtaaaatctaacgtacgaaattagatggagttgttaggcacatttcatatattaaaattttaatgattttcttttaaactttatgatatttaaagcatgtacatattctttttttggttataatatatgtaaaaatttggtatgctttgtctatagttgtaaccaaattgatgcatagtttatgatatttaatagtttcgaatatattcagtaggtagaaattggggaatttttaaaaagttgacaagactgccccaaaatcgcaatgatgcatttaaaatattctgcaattttttcatataaatatagacacgtatagataagagtgcacacaaaaccacagacgacatacacgagaaagaaaaaaaaccaaaatgaaaacttttgccaactttgcaattctgtttttattacaaagctt

SEQ ID NO: 106 - DNA, 115641 bp, Arabidopsis thaliana
gaattcgtgttattgttgccaaaacgatgtgataataatggaactatgttcattgtattggcgttgcccgctggtttacaacgatctatttcatcgatgaattttggtaattaacgatataaaattttcaatactaaaagacacacctttttcaacatttctttttataacttatgatgttcccattccattatattatagctcaacttacaaactaacttgtcacatgtaaattactcattgactcgtgacaactattgacggcaatattatcaaactcgtggttggaaatattttaagtccacaaaggaggagaaaataaaattcttgaatattgaaaattcttatacctctatgatataaaagaaaataaaatcaaagagaagtaccacaaaaacaaatttttagtatttaaaaatgccattactttggaaaaggtcccaaaatatcacaaaatctaggcttaggaagggtctctaaacgtttattaagaattactaagcccaaaacttgaaaactcctaaaactctttcttcaaatttagactaatcatttttaattctctccaaaatattagtaacccttgtaaagcctaaacattttagtaaattttatgatttttggtggtaattttggaaaataaagcataaaatgtggtattccgaggactgaccaaatttcaaaaattcaaataaatgattaatatcctaaatcaatcattattttttataattgtttttgagaaacttatattaatactattttcaggcattttcttataaattaccctatggttttagtaggcaacaaaaagatgaacgtctcagatttttttgaattcaatttaatcttaacaaaagcgataaatatcaagaagataattgggtacgtgtattgtgtactatttcaaaattgatatttgcttccataacgtaacgtaacgtaagacccaaagattaacacttggtttcttcatggtcgtagattattaaaagtttataactaatgacgacaaagtttaaacgaaaaacaatattttctcaattttcactagttttttttttttattccagaaaattattagtatacaaccaactatttttacgattataaacttttatttgatgatattcataatttagaaaaaccttaaacggatcttaatgtcaatatcatcagctcatgcaccgcctctcggatatgttgacaaaattaccccatacaatataaaccaccaaaccataaccacaaagggtatattcgtatattataaaaatatctgaatagtcgaacttgtcgttacactcaaaaacgaaatctttccctcctctgttctcaatctttctataaattctcttcttcttcttcttccattttcccaacaacacaaagtctctctctctctgataaaatcttaaaacccacctcgagatcatagtcttcatcaattagccataaaaaagcacaatgctttcttcaatcaaaccatcttcgtcttccttctccaccgctatctccggcagcgtaaggcggtcaattcctacaaagctcaagttttctcctttactcatcatcaaaaactgccataaccaaagctttaacgctaatgttgtctcccatcaaaagcctctacacatttcatctgcttcgaatttcaagcgtgaggtcaaagtcgaagcttacgaggccgatcgttcccgtccactggacatcaacatcgagcttcccgatgaacaatccgcgcagaaactgaaaatcggaatctacttcgcaacttggtgggcacttaacgttgtcttcaacatctacaacaagaaagtcctcaatgcttttccttacccgtggcttacttcgacgttgtctctcgcttgtggttctttgatgatgcttgtctcttgggctactagaatcgcagatgctcctaaaactgatctcgagttctggaaaactctgttcccggtaagtaattagggtttattgtgtgtagttgttgcctcaaaagtttcaatcttttttttttacgattgagagctcagtttctggaatactctgtttttccggtacgaattcatgatttattctgttttctggtaaaaagtcatgatttactctgttttacggtaagaattttagattctctgttttcatgtaagtattttatatcttctctgttttcatgtaagaatttagtgtactttcgagcatgaaactgatcttgagatctgtcttccggtaatggtttaggtattttcatgatgttgttgcttgatggatttataattttgtttgttgtctgataatgaaagagtgtgttttgatcgatgttcccgttttttcttattcttcaaggtcgctgtagcacacacgataggacacgttgcagcaacagtgagtatgtcaaaagtagcagtttccttcacacacatcattaaaagtggtgaaccagctttcagtgtcttagtctcaagattcttcatgggagagactttccctcttcctgtctatctctctctcttaccaatcatcggaggctgcgctctcgcggccatcaccgagcttaacttcaacatcactggtaaaactcacaatcctagaatattggtttcacatggtgacatttctttgatttatggtcttatgtgaaactttgtggaattttttttgtagggtttatgggggcaatgatatcgaatttggcatttgtgttccggaatatcttttcgaagaaagggatgaaagggaagtcagtgagcggaatgaactactacgcttgcttatcgatgatgtctcttgtgatcctcactccattttctattgccgtggaaggtcctcaaatgtgggctgctggttggcaaaatgcggtttctcaagtcggaccaaactttgtctggtatgatctaaaaaccaaatcaataatctttaattgtttgttaagttttatagactccaactcaaatgactatgagtggattggtatatattgctttagttcccttctaacttaagatataagattctaacttaatgtgttgtttttgttttttgaatcaataggtgggtagtggcacaaagtgtgttttaccatttgtacaatcaggtctcatacatgtcattagaccagatttcgccgttaactttcagtatcggtaatacgatgaagcggatttccgttattgttgcatcgatcatcattttccataccccgattcaaccggttaatgccctcggtgctgccattgcgatttttggaactttcctctactcacaggtaaacaaacaaacttattcttgtttacctacctctagtacttggttctttagtgaacaatttctagttctaatataattcattgacgttcttcctatgttctttgcaatcattgagcaggcgaagcagtgaggatggtttaggaggcagttttttgggtttgttttgcaaaagaaaatgaaaactaacaaaagagtagccggggaggagagaacattccggtgagatcaacatcggaaaatgcttttccccggtccatggatatgaagaaactggagcttgaagttgatagagtgtttgcttttactttttttttcattgtctcataatagattctgcacaagacaggctaattctatattatctatgttttatttagatgatcgtaataataaagatatcagtgtcatttcttgatcagaccatctactgaattatttttgaggtatctatcagttgatgcatgtgtaatagtttcagaaatcactgaattataaatatattgaggtgtgtcgctactggcctatatacatatcatattaggccattaggttaaaaattctactcaatccattccttataattggtctagttagctatattggtctctcacacactctcttattccaagaagaacattaggaaactccaatattgggcctggtccatgtactcttctaagttcgtctatacttggacactgtctccattttgtgggctagggatctacaatccaatgactgcaaaatatttacggcatgcaaaacttcttatgacaagtgtgtttgacacacgtctctaaaatttcaattatgtggatgtgcttatttgtatcaatgcatttcatgcttgcttggcttcgtatggaaaaagtatgagccatcataaaaatttgttaaaaaagattcgagtcatttacattgttttaggagccttttttgatcggttagggtgctagagaacccattacatactagtcatctgggggtattagtattttgtaagctgttttaaacgattccgaattttgtttctatattttgtggtcagatctgatggcctgaaaatcatccccaataatcaaatcttaatgcgcgtttaatattttactaaattatgatcatattattttttgcgatctagtcagtagtcactgtagtgaagttggtgagacgacacccacccaaaaggagtacgtaaagcaattccggcttccaattattttatgctaatcttgtcggcagatgagatggatacatttatacatatcatatataataggttgggaaattgttagtttcgttgataaaataattaaggttttgacttttgactgattctggatttgatttcaggaaatgtaaaattttccagattctgtatgtactttttgataagaaatttcaagttgctgcatgtcaaaaatttcaactaatctcttttgtagtgtataaatttatttactgtccaatagacaattgccaccgatcctaaggagcaacgtacaataccaaaagtttgcatgcataataaaagttcatttaaacataacgtataataattttcagagtgattattgtaactttcaaattttcacataaattttagagtattaaatcaaatagcctttgtaatttttgagtaaactaaatgacggtctttttttactcaaaatcaattacaaccctttaaaatatcctaaaagctttgttttaaaaaagaagataaattatcacaacaagaatataatctaactcactacaaaatgtaaggccaaagaagagatacgttcactgattggacgtgatggagagagctcacatctcgtctggccttatcatcatcgtaatctattgaagatatatatatggtaagacaaattaactttactcacggattctattctttttacccattctcggttttgtaacgaacgacgaaccaccaactagacaacgaaacgtcccacttgtttccattagttaaatttgggtaacaccaaaatcgcattaacttaataaaacactgttccaatatcaaccactgccatattttctcccttatttttttttgacatcaaaactgattttggagaggctttgaaaccccgactataaatttgatttaggtgttattctgatttatgagtgaatagttacacagtcggagtttgaactgaaagttataggattacatttttggtaaaaaattgttgagtcgtatttttggtagaaaacagtaaaattatgttttttgacagaaaattggaggatagtaattttggaggaaatcatatatatgaaaattgaccaactctctccatatgattgacacataatcactttagcatttgacatgtgtctattaaataattaatgtaagctcttcaacttctaatttataggttaaagatatatttattatttaattttacatcttattttattttacgtatttaattatactattactatatttattttaatattacatgatttttcaataaaaccattttaatagttttcttatactctgaagttttttttttttttttgtaatccaaactcaaagtatgagtgtataatagtcgtggattacttaataatttgagtaagttattctcttaaatgaatatttatattttcttaaattgatatttatataataaatcactaagggtgaaaaatgcgtaaggagttccatcatcaaattcttaggtttctagaatccaacactaacctctgttaaattggtttaaaacaaacgttgtttatgaattatgtatatgatgcattgttgagaacgttgctagaaaaaaatatttttaatactaaaagtaattgtttattgcatgattgaatgattagataaatataaattatatttaaattaaacactacaaaagaatccgaaaaaaccgcgacgtagcgcggataattacctagtagtgttaaaacaaaattggaggaaattttggagatcacatttttaacataaaattagtagaaatatatattttaattattaaataaaaaattaaagtaagcgctaaatgtcattaagaaaattttgtgaaaggcggaaacaaaaattttaaaagaaaaagaaaggactaatcacatcatcgccattcaatgatatagtttgacaatgatatgattcattaactaccattcaataaatcggtttatgaaatctaacggttaaatattagttggtaaagcatgattaattaagataatcactcaacaatcaattcaggaccaacgtcacctagctaccaccacgaaggaaaatgctaatacaagaaccaaatcgtcttattaaccagttatctttttctcatggaccacatttaaatcgtcacggcaattaagctagattttaagaaagaataaatgggatactcaactaattgccacaaattttattacttttaaaactcggctgctcggcccaaacttatccggtacggatggatagacctatcttttatcgtgtaaagaaactcttgggctccactcttgacgttgctcattttatctacttttgttggtttcttagtgacctttgacgtttatttacatagagttgacagatttgaattgacgttttctcaataatgcagaccaaaattttcacgtttcttacatgtacatatatatagtaaaacaaatctctgaagacacacaagagaatcaagaacaatgaaaaatttaaccagtttcgtaattgttatcttactacaaagcttattgtttcatgtatatggtcgtcatcaaagttcttcgaagaacattttagtagattcatctccatttccttctgatttcctctttggtacagcttcttccgcttaccaggtacttattttgcgtcccactgataatttaatatcagatttatttagtgtatcgtcattacgaaatgtttattttatatataaaaaaattgtgaatagtatgaaggtgcgttcttgactgatggaaaaagtttgaacaattgggatgtctttacgcataaaaatcctggtatgtattttattttggtttccatttggtttattttctatttgaaatagtttaagattagtttaagatttttatttttttttaattcacttattctattgacaagtatatatattggaactgcagggaaaatacttgacaagaacaatgcagatagagctgtggaccaatataatcgatttttggttattttcttatgataattatttctttctatttttgttcttgtcaacttcttttatcatattatattctcatattatttgatgttgttatttattttatattatcttctatgcttaggaggacatccaattaatgtcttttcttggagtgaacagttataggttttcaatttcttggtgtagaatcttacctagtaagtccttctttagttaaatcagcagtattattaatactacattgcattgcatggtaaaaaaaagaaaatattcgattgcatctcatatactaaccagagttgataaattaaaatactgaaactcaatcgacgaatagttatttagatttagcttattatttgtgagacaggaggaagatttggagagattaattatttggggataaagtattacaacatatttatcgatgctctcattagtagaggtacttttttgtctttccggtttataataatttaagtttttttttaaaatattgtaatctcataaagttaatgaaaatacataattgtatcaactaatcactatccagggattaaaccatttgtgacgttgaaccatgtcgactatcctcaagaactcgaggaccggtttcaaagttggttaaaccccgagatgcagtgagtggttaaatagaattagtatttttatgaacccctaattacttagaatggcaatgaacttataaacactttttttttttttgttatttttgataggaaggaatttggttatttagccgatatatgtttcaagcattttggaaaccgagttaaatactggaccacgcttaacgaaccaaatcaacaattaatcttaggctatctaacaggtaaatttccaccctctcgttgctcctcgccatacgggaactgtagccaggggaattcagaaaccgaacctttcatagccgcacataacatgatccttgcacacgcaaaagcggttaacatatacaagaccaaatatcaggtaataaaactcatacatcaaattaagacctggtttcgtgagttatcgatataaatataatgtttttgcagaaagaacaaaagggaagcattggcattgtggtacaaacatcatggtttgaacccattagtgattccaatgcggataaagaagctgctgagagagctcaatcattttactctaattggtatgttatattactatatatgttgagatcatatttgtagatatgaagtatagtacttcacccacatatggaatatatattgttttatctatttgtattctaacatgtactaggattctagatcccgttatatatgggaaatatccaaaagaaatggtagatattcttggaccagccttgccacaattttcgagcaatgaagtgaagaacttagagaagtcgagggcagatttcgttggtattaatcactatacaagttacttcattcaagattgtttgacctctgcttgtaatactggacatggagcttttaaggccgaaggatatgctctcaagttagaccggaaaggcaatgttactataggagaacttgtaagtacattcattcagtttcttatattcaatattttacgactatattcaaatgttttagtaaattttattgtttattgaccatgtttctattgttagaccgatgtaaattggcagcatattgatcccacaggattccacaagatgctgaattatttaaaagataggtacccaaacatgccaatgttcataactgaaaacggtacaagacctcaaatttgatcaatgatcgagtcatcaaccatatttgaaattatcatgaaaaattattattaatggcttgaaggttttggagacttgcaaaaacctgaaacaacggataaagaacttctaaatgatacaaaaaggatccaatacatgagtggatacttagaagctttacaagcagcaatgaggtaaataatttatgtaaatttatgcagaaatccaattcttaaaatcatgcattcaaatagtctttaaaccaatttttatctaatgaaaatttactaattctatataagttgtgaattgttttggtagggatggagcaaatgtgaagggttattttgtgtggtcactattagacaattttgagtggttgttcggatacaaggttcggtttggtctattccatgtggatctaacaactcttaaaaggtcaccgaaacaatcagcttcatggtacaaaaattatatcgaagaacacgtgaatcgaagagatatcgtagataattattaaacacatttatttttaattcgtattcactgccaaagaaagtcaaaaattacaaaagcatttaaaattgatacttatcattgttgttgattgttgaatgattaaatttgtcttttcctcctaaaagtgaatgtttaatgtgttacatgattatttgtctaatcttgcacaataattctattagcttaagatgttgaagaacacgtgagaagagaatttaggttttttttttggtcaaaggaagaatagtaattcgtattcctaagtaaagaaagtcaaactaggaaagaatttatgtaacttcgttaaatgaatgattaatggttttctttaccttaaagtgaatgtttaatcagtgttacgcgccatacggaagtaattgtctaatcttgcacaatcattcaacacgttttcaaagaaaactttttttgttctctatgatgataatagtgttaaatcaaaagtagtacaaaagtaaactaaacttattttagattaaaaatcaccgaaaaaactaaacacgcgttagaaagcatttgacatcacctccaaatttaatttcacgcaagcaagcgtttctaagatatggattctaaacgctatatcactgttttttgtaagataaattcttcttaattttttcaataaaaaaatttaaaattaaaaataaaatcataaactaactgataatgaccaaaggaaccataaacacctagaaaattatatttctgtgttttctatctgcggtttaacgtcagtaacatctaggaaagttattttacgaaagtgaacttggtttttgtttgattgaaatatgtttcagactttcagaagaaaaaaaaagatacttatttaaaatatgttaagattttagttcacttcaaattatgtaaacatgctgatttttttttttttttttttttttttttttgcaatcatccttcaatattgtctgcgaaacagtcaagtttcaagtacgattcacaacatttttcaaaaaatttattcattcatttcactcccaaaactttttaatttacaaaactacccgtacacgtatattggttgaatagaaattttttgaatatttattatattttgagttacatatagactatgatttaatcaaatacacaatgagtcgttaaacaatctaaagaaaaagacacacgaacaaactgataacatagataacatataagcaaaataggtcggaatcaacaattacatatataaatggttgcgtggttaatgatttcatttggtattttcacgacaagatcgtttctaggtacatagaagtcaacttcgttgccatataaactgtataacacttagtcatacaatctggtttatttatcaagttcaaaaatttaatttaatcaaaatatttgtttgcgaaattttcaatcgagaattaaaaaattaaaaaaagttgcgtggttgagttaatcgtttggtctccatcgctgatatcttcaatttctctgaattaatcttcacatagctgtataaagacctagaaaagaaaacagatatactagtaaccaaacttagaatcaagaaagaaaaaaacagctatagagttgaataagaagaagaagaagatgacattttttaaaccaattagaatcatcaattttttattcctatttttcatatttcttgtggtatacgcaaccgtgttctgcaaattttgttcagacactggaaacttcaaaagaagtaagttgaggtacgaaacttccgatgatagttatgaagctaggagtagccatgtcaccaaccatatcctcagccgccgcaacaccaaccccttcaccaaatgggtcaacgttctccgccgcactagcacttcttgtacgaaaccgtaagtttcttctttttacttgaatttatataaacgtatgaattagtcgtgtgtttgccaaaaaagaaaagaaaaagaattagccgtgtcatagaattgtaaattatggcgacggatgatataatatttaacacgtgagtagtattgaagacatttattaaagaatatgtttgttgttaaaaagtaagatatcagtaattaattaatgtttcacactgtcaataacataaaatatgtgattttgaattcgaagcatagtaacaacaatattaaaaactattacgccataaactatagccatagtatttttatttatacttatttatactttctaacttccaaatttttatattttatataataatcatcaacgctatatatctagaaagtaaaaccagtaaaatctaacgtacgaaattagatggagttgttaggcacatttcatatattaaaattttaatgattttcttttaaactttatgatatttaaagcatgtacatattctttttttggttataatatatgtaaaaatttggtatgctttgtctatagttgtaaccaaattgatgcatagtttatgatatttaatagtttcgaatatattcagtaggtagaaattggggaatttttaaaaagttgacaagactgccccaaaatcgcaatgatgcatttaaaatattctgcaattttttcatataaatatagacacgtatagataagagtgcacacaaaaccacagacgacatacacgagaaagaaaaaaaaccaaaatgaaaacttttgccaactttgcaattctgtttttattacaaagcttattgtttcctctttacagttcatgccttcatcaaacttcagatgattcatctccatttccttctgatttcctctttggcacagcttcttctgctttccaggtacctttattttccttctttttatatttctgtaatcagtttttggagtcactttataattttggtttttatttgatgtatttagtatgaaggtgccttcttaaccgatggaaaaggtctgaacaattgggatgtctttgcccatgaaaaccctggtatgtgtttattttggattatgtctatggttagcttggtttggaatgagtcttgaagaatgtggaaattgaactaacttggactttaagttgaatattttttttcccatccaattatgttttggcttagataagctaaacaatatgatttttatgttttgaatgaatcttgtggtttagttctgggttcaattaagtttgtgtttatttgtagttaattatatatccatgcatatcatatttaaaataaattacagtttagctttctttgattggttctcgacaaagtttttttatcttataaatgccatgttgattccattgacaatattatattaaaaaattcagggaaaatagttgatggaagcaatggagacatagctacggaccaatatcatcgatatatggtaaaataaatacattattataatattttgttccttttacctgaataaactatttactttagttgtttttaattcttttttatattgacatctatctactatatatgattacaggaagatatccaatcaatgaattttcttggagtcaatagttacagattatctatttcctggtctagagtcttacctagtaagtctttatcttcttaatcatgactgtaataattaaatttggtttgaaattaaacttctaccatcaattgattggttcagatatctaaaccggaaacaatatgttaaaagtgtgtacctttcctttgatatatagataaaaataaaacaaactgttaacttatgtaataaaaatacagatggaagatttggagttattaattataagggaataaagtattacaacaatttgatcgacgctcttattaaaaaaggtaatatttactctccctacttcttaatttttaagttagtatctattgaagcattacatacagaaattttaacttcaaaagattgctatttttcatgtaaatgtttacagggattacaccatttgtgacgttgaaccacttcgactatcctcaagaactcgagaaccggttcaagagttggttaagctccgagatgcagtgagttgataaaattaagtctctatctattttaccataactaaaactgattcattcactgtttataattcaggaaagatttcgggtacttagctgatatatgtttcaaacattttggagaccgagttaaacactggatcacgattaacgaaccaaaccaacatataagcttagcatatcgaagtggtttgtttccaccagcgcggtgctccatgccatacggaaattgtactcacgggaactcagaaactgagccttttatagccgctcataatatgatcctcgcacatgcaaaggcgattcaaatataccgaaccaaatatcaagtaacaataaccaatatactatagatatatgatttaaactatatatttgtatgcattatatcgatataaatacgttttttgttgttgtagagagaacaaaagggaatcattggcattgtggtacaaacatcatggtttgaacccataagcgattcgattgctgataaaaatgctgccgagagagctcaatcattttattcaaattggtatgttatgttataataagttagaccaaaaaattcatcatatattagtatgtatagttcacatactcatgtcttcttatctaatgtgtaccaggattctagatcccgttgtgtatgggaaatatccggaagaaatggtgaatctacttggatcagctttgccaaaattttcgagcaatgaaatgaacagcctaatgagctataaatcagactttttgggtattaatcactatacaagttacttcatacaagattgtttgatcactgcttgtaattctggagacggagcttctaaaagcgaaggattagccctcaaattggaccggaaaggaaatgtttccatcggagaactggtaagtacatttctttagctatcatctaaagtttgtagtgagctcctttgtgtattacagtgaattttctaacatggcttttgaaatatttggctttttgcacatgatagaccgacgtaaattggcagcatattgatcctaacggattcagaaagatgttgaattacctaaaaaataggtaccacaacataccaatgtacatcaccgaaaatggtactaatacctcaactttgtttgggttatatgacttatatccattttataagaatggtatgctgaaaaattaatattaacgatggttttgcaggtttcggacagttgcaaaaaccagagacaacagttgaagaacttctgcatgatacaaaaaggatacaatacttgagtggatatttggatgctttgaaagcagcaatgaggtatgtgaattgtatatttagttagattataaaccaactcatatatacaaatggatctcaaaaacatagagaagttgaatgtacgtaataaccacttaggcaattaccaattcctaataaatttattgtaaactcttatgtagggatggagcaaatgtgaagggatatttcgcatggtcactattagataattttgaatggttgtacggatacaaggttcgatttgggctattccacgttgattttacaactttgaaaaggacaccaaagcaatcagctacatggtacaagaacttcattgaacagaacgtgaatatagaagatcaaatagataaataaatataaatgtaaattaataaagaattaattagtattcttaagcaaaggaagttataactaggaaggcttaattaaaaatcttctcattgttgttttattttttaatgtgtttggtgtatcttatacataactgttttttctaatcttgcacaatatggtgtttataaaaaatttgggtgcacatctattaagattatgttatgaaaataataattgttaacataaatttcaaaatctggtttaagaactgccataatatatggatgcaaacatgtagtcaatgtaattagaagttagttattatagtagaaacttatcatcaacgcggtcacaaatttagttgctaaaaagaaaggtacaattaccttagtctagagtgagaggtaggttttgcaacccacagaacttgagttcgattcctcaaatcttgttgttttattgacaaaaaaaagctactatcaagccaaatgtgttcatgaattccaaacaacattcatcgctatattcatggtcactttgtaccaataaagcctgtggtgaatctagaaatatatctaaaaatattatatatatagttgatatcaaaatacaaaatttgttataaaatataaataattttttttgaatatatcaatatatgtctagaaatataccagtacacataatatagatatatattttgatattcattaaattaaatcgacaactacaattaattgtagagaaatatcaatatgtccatctatagagaaatatcaaaataaatttaaatcgacaactaaaatcaaagaaactgaaattttcttttgggtggagtgatgtttgaagagatatttcattaaactaatgtttgtagtggaaaaaacattatcacaactacagagaaaataacaaattccacttagttttcacgtcacggatccaaaaaaaataagttcaatttgaacaaatttcataataagtttcttcaaagcatgtagtttcgatagtatgtagcaaaacgagtggccaagtctctcttgtttcaaagtggtgatttgatttcagaatttcgatttttttttttttttttttttttttggtaaaaaaatttcgagtttgtatacaaaaataaaatatttcctgcttgcaagataattttcagaaacaaatcctgggagaccacggggagatccaaattcgacgaaggagacgcctagaagtgcgtatgtcatccgaaatgacgaaaactatatgcgaagaaattggattctttatgtacgtggaaagacaaaatccacttcgtttacacgttaattaactatcttgaatcgtaggataatttcatacgggacaaaaaccatacgcaaagaaaagttgattctttatttgcatggcaagaacattatgataactacaaagaaaagaacaaaattcatttcgtttttacactatataagaatccaatagttttcatattcattggattgttaaacatttgacttctgtataacaacacttttaaaaaaccttaatagagatacaataaagaaagacccggagctaccatggataatgaccgtggaatatttcatatgatggagaaagatggtaaattatccttggtatatcgccctcccataatacaaactcgaagtccaacctcctccggtagaatagtaagtagcgataattcccttcttcaacctttttttcttatgccctatagtacgatggaaaaatagagactttccgtataccataagattttcttcaattaccaatgtcccattcggttctatcataaattacgtcagaattaaatatgctcatgatgatcattttgtactccctttgttttggtgcaacgataaagaatttgatgtcaatggtggatgcagtgcatgcaatggctcatattttggcactgattattatttctgtaactgtaataaaatgtatcacaaagaatgtgtcgagtctccacttaaaataaaacacccttaccaccctgagcactctctcgaatgttacattcatcctccttttgctcacaatattgagtgtttatgttgtggaagaatagcatcaggtcaggtatattattgttccatatgtagagttcttatgcattcaatatgtgcgatgaagacgatacctatggttataaaccaaccaaaaaggcatgatcatcctctcattttctttcctaaacaaaattctttaacctgcaacgtttgtggtttgttaagaaaactttattccacatacatatgtgccatatgcaactttgtagcccataaagattgtatgtattctccacgcataatcaagatatcacgtcaccccatcgtctctcctacatttcgtctcttcaatctagagattgttcttgtacaatatgtcgtcaaagtattgacagtgattatggtgcatatagttgtgctatgtgtggtgattatgttgttcattcaagatgtgctttaggaaaagatgtatgggatggtgaagatcttgaaaatgtacctgaagaagataataaattacaagatgtcacgtcttttgatataatatctgacggagtaatacttcattttcttcatgaccatcatctccggctcaaggttagcatactttatgatgaaaacaagttttgtcaagcgtgtgttcttcctatcgttgaaggtaatttctactcatgtatggagtgtgatttcatcttccatgaaacatgcccaaattcttgccgcatactactacatgcgttacatccgcatcaacttacattggaacatgtggagtacgattcttgtagattcatgtgcaatgcttgtgaacgtttttgtggtggttttatctatggatgtcacataagggaatgcaaattctatcttgatgtacggtgtgcttccatttatgagccatttaattacaaatatcatgaacattccatgttcctcgcttcagatccaaaagaagaactactttgtcaggtatgcaaaacaatatgtcataaacaattaaattgtatcaaatgtgattttattgtatgcatcaagtgtgctaccttgccagaaaaagtaaggtataaacatgacaaacactttctcagagttttatttggagaagaattatgtaagggagactggtgcgaggtatgtgaacgtaatttaagagctacagacacaaaagtgttctattggtgcaacgagtgtggcaccacatttcatattgaatgcttatttggtggagacctaatatatgtgaagcctggtcaaactttaaagttttttgatagggatgctgaaattcttggcaaaagtaatctttctcgaccgttatgcatgaacccggattgcaagaacccttgccaagtcaaaatattgaagacatacaacgatatagtatgttcagttaaatgtgggaatcaagttttttattgagtctagtgtgttgtctattcctctatttaagtgtaatttcagttttataattaagtttgatttattttttctttgatgtaattataaatatggtatatttactttgttgattcttactttctaatcacttcatcatcctttaatagaatcacatctcgtctctttctacagtcttgattttttattcacaaaatctttggttagccgatcaatggttaccaatttggttcaaggttctcttattgtgatttcactttctcacggtttatcagtagtggaagattgtcgatgagtagtgaggattaattggaacggaagagattgtcgtctcattggagagtttttccctacatctttgtcttcgcttaagctcattttatggtagatatttgtcaagtgcctaacactgctatgtggttatctaatccgttttcctgaatactgattcatctttttccaatatatacatgttttgatttgcaaccgtttactagttctgtttggccatggccatgaaattcattgaaagaaattcgaaaactcaactaggcgtctccaatttgaatatccaatctatggcgaaagaagtggtgacattcgacaaacatttatcaacaattttggggctctactctgtgctacgttacgtatagttgtttcttgggggtgtatatatttatactaattatatcaagacaagcatttcaaattgcaagataatcttaaacaatacttttgttttaattgtgtttaacggtgtttgttacaattggagacatctaaatttctaattgccacatgtcctctaagaaggtgatacacgattcatgatcaaattggtgattgaggacgattcgatccataagacaacttacacttcttttgctgcattgctttgagtgaccttcctctgttttttttttgtttcttactggtgatgatcaccgttaaaaatccgtttataagagtgacgtcgtttttgttgttttgcaagtttggctgaaacaatgccgtttcgaggagtttctgcatccattgaagtcttctccttgataagagaaatgtggacaacggtggggaagatctgatgctagatgctagatgcttatgttagagttgcgtcggcttaacttcgaagacataaatatattggttaatgggcgtgaaaattcgtaaccaatgtatttttgattatcttgaaagtgatattgcgtttaacagatgcaaaataatgcgttttattgttctgaataaagtttttgattatcttgaaagtgatatttaccctatttatttttatttttcaaaacaataaaatcttaagaaaatgtttcattacacaaccttttgttttagtgaatgtcttataacataattatttgatcgtgatcgtcttttgtagaaaacttcaatcatgtagttttgaaaaaaaaaaaaaaaaacttcaattatgtagttggtttatcataaatcatgaacttcttcttaagctaaagtcaactatatgcacgtcttttaatttgttttcatttttaatcaattggtttgagacttctagctgtaaattgtaatgcattgccaaataatttagtaaggttattatttcagttaattaaagacccaaaagtcttctttaatctaatcaactgatagagcgttaatggacgtgagccccaccatattaaatgcacacaacaagaacatatattacacttgttacagctaatataataaactttggataagttattgtaatatgttatagtattacaataatgcatttgagatctgttctagtttccgatgtggtattaacaatatactttccagttttcaatatggtattgtataactttacatgcgttagaaagttaacaatttaggaaatggttgagaacaaaatttgttttagaaaaacactacaaatgggtttatattattattttcataaaccaatttaaaacgtaaaagcacaattatcttgatcaaaacaaattatagtcgtggttcagtactgctttcaagtcaactatatgcacgtcttttaatttgttttcatttttaatctctataaaccaatcaattgattcgaggcttctagctgtaaattgtaatgcattaccaaataatttaataagtttattatttcagttaatcaaagacccagaagtcatctttaatttaatcaactgatacaacgttaatgggcgtaagccccaccatactaaatgcacacaacaaaaatagatctcaaatacattatttccaatctgttaattttcttaatacatttgtcacagctaatataataatatttggatatattatcgtagtatgttatagtagtatgtacttttcagttttcgagattgtattgtagtataacttttcatgcgttagaaaatttaacaatttaggaatattaggaaattgttgaacaatttttttcttagaaaacacactacaaatgggtttatattattattatcatgagctaatttaaaccgtaaaagcacaattttcttgatcaaaacaaattaaaatcgtggttcagtactaccttcaagtcaagctttccaagtgttaataaaatcatgggaatgctttatacatttgcttagaattaaataagtatccgtgatttgattaaactagattttcgtttttgtttgactctaccaattagactgattgcatcttttttttttctttgacattttgttagtttccattttttttcttgtcaactggctttgtatgtatagattgtatatacacaattacaaaataattggtgattcgtgatgtcagatttagtatgttggataaaagggtgatttaaaaatatgtatatagaagactaaataactaagaattatacctgaaaattatttatttaggtgagttttctttacaaaatcaatatgacaaaaatgcccctatataacagatttagcgttactgttaaatattttatgattttagtgtataattagtttgttagcatgctaaaatagcattatcgagataatatcgttagcgaaatatggatgaagtttaatatatggatgaaatgatatggggtacaaaccaacttaatatgttaataatatatttgacgatataaacaaattctcagtgattgaaccaatgattagatttcaaagactgatatatatgagaagacgataacattattattaaaaagtaacaaaatatttagcatgaagagcaaaaaacttgactcgcgaccgaataatcatgtaaaaaaatacatgcatcaaaatagttagcaaataacatattatcaagataacatgataacaaatatctcggtaatatttattaggttaacatgaaaacaaaatatttgtatcaataagtttataattatgtcatgctaagtcattttgtatcgggataagttataacttatatgatatatttatatttaccatcttaactcattgattatatcatacagaaaaaattaacgagttactataacgtgcaaaatatgaatttcatccaataagattattattatcactatctctagataaaaacttatttaactcgataatttgattgttaaccaatttgtgttttaacaaaaactaccattgccgtaatcttcacaggtagtatggcgataagaacaataatataatatagaggtgttatagtatttgccacataaacagtgtaagataaatagtggaaaaatgattgacttaatttctaaatctttggagtatagataatgataatatcctagataaaatttagaatgacggaattttaaattcagaaaaaacattacaaatttttttcaatcatagtaaaacactgaaattctaaatgattttaataaatgaataatttgcgttgatgtcaaaatctactgggaataatttttaatgtcttaaattttgtgtctcgagaaaaatagtagatccttttcttgtgatcttcgaatggaaaaagcatagcatgtaaaatgttgttcaaccgtatcaaacatatcatacataaaaagtgggtatcaagcggatcaaaccgttcaaataaatttttaaatgacgaaaaacttaaaaagcggtttaggtattaaacaaaaaaaatatagtatctaacataaattttagataaactatttaataacattacgtaaatattataataaaattatgttaaaattagtatgtaacataaattatactattatcatttttataatttacaatgataattaaacaataataaattatagtaactttatatatgactaatttttcaaaaattcactttcaagtttttaattattgtagcaatcctatttattttttaatgtactaagtaataacatttaaatataaataagtacacaaattaaagtatcttataaataatttcctatgttattattttatatatgtaaattaagatttttttaaaaccatttaattttagaatccatatgcatattattatttgtgtttgaagttagtatgcatattttatatatatatatatatatatatatatatatatatattttaaagtaactgaacaaaagaagaagaaaaacactttgaaacgcaccagctgtaagaactaataagaagatcacttggaaatatgaggcgttattattttgttgcaagtggatcatctttttctgttcgcaatttctacctggaaaaaaaaaaaacattcacacccttattttttatcatgagcttggatgaaattacctagcttactaattggttcttgaccaaatcgtcagtttttaaaatatttgctgcaatagtaatggagacttttctgaagtgctgccttcaaagttatccttatattttactctattaaaaatatctatgtactttgtacaaagaaaagggatgagtaatcatggtaatttgaagacaaaaaatacagatgtggaaagtgtattttaaccacacaaaaaccttgtattttacatcaaagaatcgttaaatttgaaaaacaaaatgcggaaagcggtagtaatattctacacatttcacaaccaaatatgactatgatatttaaatctcaaatagctgaaagacacaatggtattttaatacgaaacaatttttaaagaccagaacttaaatctaactaaaaagtaagactacatcgagttgtaaacagcgaatgaaaataattttttaatttaccggtcgatgtagaaaataaaattttttaattttttttcatctggtcgatgagcaagtgtcccaaattgacagaaaataaaatatgaaaatattctcaacttgctcaattattaatcatgaaataatatataaaagcttgatcgccagatgatcttagagacgacgacgtaaaccatgtgcacgactagttaacttttatttgtttgtgctatatatgtgggaacagcaggaaacgaacatcatatcataccaaaaatccttcacccaaaagaaaagagagagaaaactatcaaaattattggtggaatagccatggattccatcggtagatttcatgagacagaaactgatgataaactatatcagcagcttgtatattatcacccaaaatacacacccataccacaaacaaaaagcccaacctcctctcataaaacagccagccacgatctcctttttcaaccactttttttatgtcctcatccacgtgttactaaacaactttctgattctatcacttttccaatcagtaattcccctgaatacatcgtctctgcaacaaaaagtgatcaaaagtatgaagatcattcactactccctttgttttggtgcaacaataaagaaatcgatgtggatggtgggtgcgatatatgcagcggctcaaattttggcacagactattatttatgtgtccactgtgatagtatataccacaaagaatgcgtccaatctccattcaaaattgagcacccataccatccggagcactctctacaactttcctatcttgaccttaatgctcgcattatggagtgtttttgttgtggaagaagagcaacatatctggtatattactgtaccatatgtgatgttctaatgcatacagtgtgtgcgatgaagtcgatacccttaggtggatttcacgagttggaaaacaatggtaaactattttttgtatatcatcacccaaaataccaacccataccacaaacaaaaagcccctcctctgataaaacagccaaccacgatctcccatttcaaccacttttcttatgtcctcatctacgtgttactaaaaattcttctgattctctcacttacccaatcagttattcccctgaatacatcgtctctacaacaaaaagtgatgaagatttgtcagtactccctttgttttggtgtaacaataaagaattcaatgttgatggtgggtgcgacatatgcagcggctcaaattttggcacagactattatttctgtgtctactgtgataaaatttatcacaaagaatgcgtgcagtctccaatttcaatcaaacacccttatcatcctgagcattctttgcagctttcctatcgcctacctagtgctcccgatatagagtgtttatgttgtggaacaacagctacagatctagtatatggttgtaccatatgtgaagctgtaatgcatacaccatgtgcaatgaagtcgataccttttgttatcgaccaaccaaaaagccatgaccattccctcactctttttccgagacaagcttccttaacttgcaacgtttgtggtttactcagaaaaaactatcccacctttgtttgtcttagatgcaactttgttgctcataaagactgtatgtattctccacacatcatcaagatttcacgtcaccatcatcgtatctcctacactgcttctctccaatccgaagaatggtcttgtggagtttgtcgtaaaagtattgacggtgattatggtgcatatacttgtgaaaaatgtaaggattatgttgttcacgtaagatgtgctctacggaaagatgtgtgggatggagttgaacttgaaggtgtaccagaagaagatgatataacaaaagatgtcgggccgttcgagataatatctgaaggagtgatacttcattttcttcatgaccatcatctccaacttgaggttagcatattatatgatgaagagaagttttgtcaagcatgtgtcattcctatctatgaaggtaatcattacatttgtgtggaatgtgacttcaccatccatgaaatatgcgcaaaagatcggcgaagaatacaacatgcgttacatcctcatccacttacattaaatgccgtgagtaaatatgatacgggcgacttcgagtgcaatgcttgtgttcgtaattctggtggctttgtctatatgtgttcgagaaaggaatgcaacttcgatctagatgtacgatgcgcttcaatttctgaaccgtttaatttccaaggtcatgaacattcattgttcctagctatagacccaagcgaaaaacccatttgtcagatgtgcaaatcagagagccatataccattaaattgcattaaatgcgattttgttgtatgtatcaagtgtgcgacgttaccatttaaagcaaagtataagcatgacagacactctctcacaattctgtggggagaagaggtatgtggaaaagattggtgtgaggtgtgtgagcgtaatttaggagatacagacacaaaagtgttctattggtgcaacgagtgctgcactactcttcatattgaatgcttatatggggaaatcctatatctaaaacttggtaagtatatttttgatagtggtgggaaagagttccaaattcttgggaaagctacttcttctagaccattttgcaatatttgcaaaaaccgttgtcaaggcaaaatatttacgagagataatcgcatagcatgttctttgatatgcgccagtgacattgtttaagtgttctctaaagatgaaccaccatccactaagttatttgttgtatctttgtttttatttttattttggtcaacaagagatatttctctatgtaatacagcttttgttttgaattcatacttttgttttatttttggtaaattattttgtactttcatatatatatatatatatatatatatatatatatatatatatatatatatattatttctaatgttttataattgagatgatcataaagataacgatgttgataactgtaaattaaacgattcaaatgcaacaaataactgaaaggggcttcaccttatatagttaccaaatttaatatatagaatatctctaaactaacgctcataccaaccacctcctctttgcagatgacacttcttctgcaagatggatgacactagctgctcaaatctgtccgatattctttctaagtataaggctgtttcacggcaacccagtcaaccactcgatgtcgaacctttactttctcagctcacttccatgatgttccttctagtctcgtttggttttgaaagcctccccctccctgtctcttactctttgaaagttgtcatactggattattttttgaatggtttctttgaatggtttctttgttctcttatttggattgcgtcatccatctagtgggggggggggggggtctggcttttgacgtgttgggacctttggtcttgaatacaaccgaagtggaaggttaaacgggataaaatcctgctcatggctaccagtatatggagatggtttgattctcagagttatatttgttatttaccttaactaattttccaaaacctctctaatttaaatataaatatatgatttttctttcacttttatttgatcttatatttactttactttaaatttatcaaaatacatatagttcataaaatattagatttttttctgtatatgatgtgattcaaaaaatttaaaacaatcatatattattcaatcaatgaagaaataatatgtgtataatgtccaacattgcttaaaaaatgttagacaatagttgagagtcatactataaaaaggacaaaaattattctgaatatgaatgaacaagaaacttgagttctcaaacgtccaaaactaatagcgttcggtttacttcggttcttaatttaaaagaatagaaacttttaaaaagattcaaaaaattataaatatttaaccattattaaagtgaatcactataactgtttcaaatattaaattttttatgaagtttcaaatattataaatgtttgaaagttataataattaaataagaagtttaaaaattgtaaatatttaaattttatactaagggttaaatcctagaattgacgtgtttaggtcgataataataagtgacgatatattatgggtgaaatcctaaaattaacgatcaaaatataattatacaattttaaacactaaacaaaataaacaatattaacaaaacaaacacaacttaatttgttttttttaaaacacatcttgattattttatagaacaggtgaatcttagaattaacggttttgagtcgataataatttgggaccatacactataggtgaaatccgagaattaacaatcaaaatatttgtatacaatcttaaacactaaacaaaacaaactatattaaccaaacaaatacaacttcaaatttatttttttaaagaaacacatctcgattcttttataagaagtttatctacttaacatttttaaattacattttaagaaatcaaatcgggtcgtttttttaaaaaagtttttgactcggaaataagtctttcggatccaaataatttgagactttccaaaaaaaaatctctttgatagaccgcaaatttccttcattataggcgatcgttgttaatatatctttcggcaagaatattgcctaaatcaaaacatctagaacattctaacgtaaatgtgttaacaagaatatctttattgttatataatgatttgcattcttcccttaaatatgtgggtatgattctaatttttgattcgtatctatgatttttttacttgttctccaagatattctgaaaccgaaacagctaaaaccttacactctcttctatcgaacaattgcgtcagtctaaacgatccctgagaattctcatctagcaaaatattttgtatgcatacttctagagatgttttgctatacaagactgcatgacatgttcagttgtggttgaggatcctttatacgtgaaaacacaagatttgaagattctcttgacatggtattgtggtcttaattaaacttcaacgttttctttttgttttctttgatgtttctgcattcttagtaaaagtagaaaaggagaaggatggaaaaaaagagacaagggaagaaacttgggactcgaacggcggtggcattgacggtgaccgtgtatccacagaggagaaaaagcttgacaatccaagacaaacggaagctccggtgacgcatgccactttatctacatcgcccatctctcttcactttatctaattagttgaattagtatggttggtaggattcactattcgataatctaattttaaattagcattcgaagatgggtaaatgtaattacgcaatgaaattggaaactatagaacttttaaatcaaaattacctttgcctatacttaaggtcgaaagattcgatttcataagcatgaaatattagcaaatacccatcgattaaagattttttggatatcaaaaccaaaacatgcttatgaaatagaataagtaaaatattatttgaagaacagaacatcaatattaaatgagcgtcacatattatatgtagccattcatcacggtcgttctttccggttctggaaagatccttggacctctcatcaacttcataggagcgctaggttctactactgatcctttgtgtataattttacaatcgaaataaaaatcgaaaaagagaatgaaaagggtcatggttctcctcactgcatcatggccatgactctctttttcttcttacttctcttttgcctcgacggcaccgtctctaacgacgacagtttgttggggcatctttgtctacgaattctcttcttttaattattctttgtgtggattttctttattgaaattgaattcttatgttgtatggtgttgggctatttagctaactaggctttgatgatcatgtaacattttaattctcattaaaaccctaagtttcacatatacattacacttatttacactatttgtcaatctaataatacttgcaaaatctataattcagaaaattataacaccatgttacaaaaaataattttatttcattttatctacttaacatttttgaagtgcataattgctctttttttaatttataaaatttttgacccgggtctttctttatacttcatacatattagtctaatttaataaaatcaaatcctttactaatttagatttttgagatctttgggttttctttttctaattaatgtaaaattaacaaaccatttaccaagaaacatttgttggttcaaaagttttaggaaacaatgagatgattatgtcaaatcatcattatttataaacttaaatatatttgtttcctaaataataagaaaaaatattaattctatatttaatcccacaaaatgaattaggaatatgtattaactaaaagattttttatccttattttctatagcatctacataacatatctttaaattataaaaaaatcacataaatattttcgggattcagatttcaataattaggatgtgaacaggttttctaaaaatatcgttcgaatatattgaagataaaaaaaatacaaataggaaatataataatttaaaagatacaaaatatttataaagaaattttgttttaaaaaaaacaaatttcaatgaattcaatataaaatcttcaatacgaatccgatattgattcttaaataaaaatattaatataatatacaatttttcttattagactgaaattttaaattgactcgaagtatcttaaataataatattattaaaaatagaaaataaataatttgatttttagttatcacgggacggattatacggtggaacgggtttagatgagacatgacaaaatattatcccgtggtgtggtctatcaccagtcaaattctataagataaaataatatatattaaacttactaatatcataattacgactcactaaaaaccgtacacaaccttatcgagaattattaatcaacacaaacaacaacaaattctttatcttataaaaaaaaaaatatatatatttaacccgcggtataccgcgggtcatatcttagtacgttataaactttatactacgggtgaaatcctagattgatattaatacaaattatatactatgggagaaattaacaatcaaatacaattataaaatcttaaacactaaataaaataaacaatattatttaaacaaatataaaattaaaatttcaaatttttagtttaaaaaatatagttttgtgatgtaccatacatttaaattaaacaaaataaaaacatatatttattgatcaacttaaaaataaatatttaattttttaataaaattataggcatgcagtataccgcggattaatatctagtttaaaaacttaaaaatattataaattaaaatttaataatcatattgaaacgaatgacgacgttttgtaactcccataagattatcgagttaccaaaactcaggcgagagagagagatcagaaacggaagagaagaataattcagtgaagaatgagactactctctcctctgatcatcactcattgatcagatttgcatttttgagtctccatttctgaatcatccaatccgatcgacgttctccggtattgatttcgttgatcgggtttttgttaagtttttaatatcgatagctccgattccttaaccaaaccagtacgtaccatacacgagagagactagcacatcactagctcagctcacattacaccatacgagagagactagcacatcactagctcagctctcaagtctctcatgcgagactcgcacaattcaacaacaacaacataaagcataatccctctaaattgatctctttccttatttatactagaacggagtttgttagagatatttttatatcttcttcaagcaagcttccttctcacgtgcctcttcacttgcacatgtcttcttttgctttgtctcccattcacatgatacaccaatcgtatcagttttcagtcatacaatcctttgtcagcaaacacactttgttagccgatccaaaataaccaattcggtttgaagttcaccgattttcgttccacctctacacggttttttgtagtgaaaaatcgtcgagaaaattatgaaaattgagagcatcgtctcgtgggagagttcaactagatctttatatttacttatgctctttttattgtaaaaaataattgattatatacttcttcattatatacatattttgatttacactgtttcactaattgtagtttccatggtatgaaatcacttttagaaatttgaattatttctatgttttttttttttggggtaggagatgggatcgaacccccacttttattaataactaaaaaaacaatcacacccgaacattcagagagcccgcatacccatttacatactcaagaacaatcgacataacactatccaaagtagaattaaacaaatgaaaatctaagggtaaagtgtaaatatatagctaactcattcgcaagacgattagcctttctatacgcatatgaaatccgtactacccattcctttgaaaaaaagttatttatctatgtccaaagaaaaccaaccaccatctctaagccaatctccagctcgaagtgtatgataccgcgatccagctatatgtgagccataatatgctccccatagttccatggtatcacttttagaaatttcatttatttctgtcatacatattttcccagatgtaatgcatatttttttttttctttttggatattcgaattattcacctttcaagcgaacgacgacgtttggtagcgtcacattgattattatcaagtattcaagttactccaaaacttccaggcgagagagatcagaaaacggaagaaaaggtgatgagagagttagtctcttctgatcatcacttcttcatcttcaaccattgatcggatcacattttgtttatcgaattcaatcgaagattaccgattttgattcgaaattctcctgttttgatttcaccctccagcggtgatcggagaatttcgccatgtcgtggggattaggatggaagagatcatcggagagtttccgtttaagtctcagctacggcgccgatgatctgaacgacgatccgattcaatcaccgtcggcgtctccattcggatctccaacgtcgatgtcttctacatgttcttctccatccgccgtggaggatcctgaattagggtttcggattgatttagattggacggcaggcgattcggaggatcaggtagcgttgcgattggaatcgcagctgatggtggctttgcctgcaccgcatgatacagtagtggttgaattgaagggaattggcgatgacgatgaaggtggtttagagaatgttggattagagatgagagttgagaaacggagagagccgttacgagcagttacattgatgaaagcggttggttccggtcagcagtacgacggtgtcggcgttttgacaaggctaatgcggtctgatatgatgcctgcagccattcctgcgccggctatcgacgttgcttcttcttgtggggtgcattggaagactgtgacttcgttgagtctatctggttgtggtttattggtatgttacttttagcatttctgaatccaaggaagaaactttgattaggaattgggttatgctgatccgtctttaatgctttgcaatgttgggcaggtaatgccagttgaagtgactgagttacctctgcttgagaagctatgccttgagcacaataaactgtcagttttgccacctgagatagggaagctgaagaaccttaagatacttagggttgacaataacatgcttatttctgtcccaggtgaccgttatcgcatcttaatgataaaaaaaaaacatattggaatcattagatttttcagctgatgttggttgaaactcttgtgtagtggaactaagacagtgtgtaggtcttgttgaattgtcgttggaacacaataaacttgtccggcctcttcttgatttcaggtcattggggcagagagctggtattactgttttaatttcttcttgaagttagttaggatgctgattaagtatacgattgaaatgcagggcgatggctgggttacgaattctacggctttttggtaatccccttgaattccttccggaaattttacctttgcatcagcttcgtcacttgtctcttgtaaatatcagaattgtgtctgatgagaatctaagatcagtaaatgtacagatagaggtaagaagaaaactcatcagactatctgctgctacttttcattctctaggtcactaagtttatgctaaggataagttttcatgattgcagacagaaaacacttcctattttggggcatctaggcacaagctcagtgccttctctccccttatattccgttcgtcgtcttgtcatcatcctcttctagcatctacattggtgaagataatgcaagatgaaggaaatcgttctgttattggtaaagatgaaaatgcggtgaggcagcttataagtatgataactagtgacaatcaacacgtggtatgttggtttttgttctgtgctatggtttgaaaaaacttttactttcttttgggaacaatcaccataactacaggtttgataggttgagcaagcttgtgttgctttatcatctcttgctcgagatgttggcgtagcaatgcagctgatgaagtgtgatataatgaagccgactgaaacagttctgaaatcttcgtccccagacgaagtgatatccgttttacaagtcgtggtcaccttagcttttgtatctgattccgtttctcagaagatgctcaccaaggatatgctaaaagctttaaaatccttgtgtgcccataagaatcctgaagtaagtttgttgcatttttgctctccttataagaaaaccctatagtttcttcgactgagtatcctttcccttaggttcaaagacaagccttattagcagttgggaacttggccttctgtttagaaaatcgtcgtattctgattacttcagagagtttgagagagttattgatgcggttaattgtcacacctgaaccacgagtcaacaaagctgcggctcgagctttggcaattcttggtgtgtttcttgtgtatcaaatcgtcattttgcttgatattctggttgggcattacatagaacgtttttcttctgatgacaggagaaaatgaaattctgcgacgttccataaaaggcaggcaagtaccaaaacagggactgcggatactcaccatggatggaggaggaatgaaaggtcttgcaacggtgcagattcttaaggagattgagaagggaagtggcaagcctattcatgaactattcgaccttatatgtggcacatcaacaggaggaatgctagctattgcccttggtgtcaagcttatgacattggaacaatgtgaagaaatttacaagaatctaggtgtgtaaaattccctttacagcttcgttgacttattggttctggactttactttggatgtttttctataggaaagcttgtttttgctgaatctgtcccaaaggacaatgaagctgcaagctggcgggaaaagttggatcagctatataaaagttcatcgcaaagttttagagttgttatccatggatctaaggtatacacaacgctgttggtctattcacagttgatttcttctgtagcgacatagaatcaaagatctagacttttggttatgtttttaaggacttatcattttgatattatttagcgtcttggattttaaatgtaagaattccaaaaaaaaattattgccactaaggattgtaaagatatatgcttgtagaaaaccaaatagctcttcgtagttccgacatgacttggaatcagattttataatatactgtcttgcagcacagtgcaaacgagtttgagagactgttaaaggaaatgtgtgctgatgaggatggagatttactaatagaatcagctgtgaagaatgttccaaaagtatttgttgtatctactcttgttagtgtgatgcctgcgcaaccatttatatttcggaactaccaggtacaacacttctctttttacttttggttaattctttattctctgttaattgcgtatgaagtttttaccactttaaatttgtctgtctattcttcttgtgtgtatcatgttctctcttttctatttgcagtatcctgttggaacaccggaaatgtcgtatgcattttcagatcattcaggcggcagtacactaacttcatcaactgccagtgatcaagctggctactacaagcaaagtgcttttatgggaagttgtaagcatcaggtttggcaagcgatacgagcatcatcagctgctccatattatcttgatgatttttcagttggtacaagtctaccttctctattctccactcttatccatgactctttgttgtaagcttttacgctgatattatcttgtttcctttctaaatcattaagactcatatcgctggcaagatggtgcaatagtggcaaacaatcctacaatctttgccatcagagaagcacaacttctatggcctgacacaaaaattgattgcttggtttcgattggctctggctctgtaccaacaagggtaattcccgtttttcctgtggctccagattgtgcaaaatctatgtttatgttggaaaaccactgaaatacatatggtggataaaatcttgccgtccttgtaatgttaagtaattatttttcattgttgatctaactcccttgtaggtacggaaaggtggatggcgttatttagatactgggcaagtactgattgagagtgcatgctcagtggaacgtgttgaagaagctctaagcacattgctccctatgttgccagaaatacaatattttcggttcaacccaggtaacaaacagcattttacaacatgcaagaacactcttatcctgttgaacacctatgaaaccttgaatttcttatccatgccgatttccataatgcatgtgttttgacgtagaatctagttaatctttacatatctgggtatatgcagttgacgatcgctgtggaatggagttggatgagactgatccagcgatctggctaaaattggaagctgcgattgaagaattcatacaaagcaatccccaagtatttaaaaacgtatgcgagagattaacactccccttcctaaacgatgagaaatggtgtgataatttgaaaccacgatttatgaatggaaagctaccaaatagcagaggtatctattttaaaatttatttgcttttcagcaaaaccttctcaaactgttagcttagtaacttctatcatttttctttcattcctaaacagtagagagcagtccttctcttggatggagacgcaatgttttgcttatggaggctcagcatagtcctgactcagggagagtaaagtatcatgctcgtgcgctcgagtcattttgttcgaataatggaataaagttatcctcattacatactactgctactcctggatgccaaaaaccatctccaggaactgcttttcccacaccatttacctctcctcttataactggaagcttgcctccgagcccccttctcttcactcctgagcttggcccacaaaagttcaataggattgatatggttccgccacttagcttggatgggggacatgttgggaagacggttatgtcgcctccatcatctcctccgcgacaaagacaactctatcttccactacgacagatgcatgaaaagttacagaatttaccccaagtggggatcttacatctctcacttcaaaatgattctaatggttcaatactgaggttagtccaaacttttcagtttccaccatatcacactcagttctaaaaaggttgattctagtgaattgattacatttgctttttggtttcatttagttggcaaaatgatgtatttgtggttgctgaacctggagatctagctgataagtttctccaaagcgtcaaagtcagtatattgtcagtcatgcaaagtaatcgccgaaaggctgcatcagttctttccaatatctgttcaatctcggatttggtgcgtagcaagaaatgcttccaagttggaaatatcatccaccgttatattggacgccagaccctagtaagaatatgttttcatattaacttctttgtggtgttactgttatagcgttgaaagctttattttatttttgatgttacttgttaatatactgtaggtgatggaagatgatcaagaaattgcatcgtttatgttccgcagaactgtaccttcggcacacttgactcctgatgatattcgctggatggtaatgttgttacttgacttttgtatacctaaaattgccgaaaggctagcttttgctcacatatatttactctcgcattccttaaaaggctagcttctacgaaaatattgtccgtatacttatgttcagtttgtttgacgggtacagaacccaaaccatcaaagctagtgataaacataaggaaggctaataagaagaaggccaaaagtttgtcttatgctatgaacatcttatctgaaacaggtaggagcatggagagataggataatagtcttctcaggaacatttggaccaacacaagctgtagttaaagcctttttggactctggtgccaaagctgtgattggtccatcaaacgagccacaagagacaccactaatcacatcccaaggctcatctgagtacaacattggagatcagaacgggaagtttgagattggagaagaagaagacgaagatgaagaagtaaacgaggaaacggaaagggaagagatggaaccaccgacaccgacaagtgactgggaagatagcgaccacgagaaaacaaacagagacggtaagtattgtggtctttgggaagatgatgaagaagaagtgtctgaatttgtttgccagttatatgatcagttgttcagagagaactcaagagttgatgttgctcttcaaaaagctcttgcctctcatcgaaagctcaggtacacttgtcatcttcctaatgtatagaaagacaaaattacaaattttattaatttttatacttttttgacccgtggggagaggaaagaaattgagagaaagaaaaacaataacattgtcgaagttttgttcgtttctgcaaataaaagtatcaaataagttcattgcgtttgaagcatttaagaggtatgaggaagaaaagatattaacaactttttaaataaaacttgtagttgttttcttttgaagagaccctgtcaatggctcaaatgtctcttttgagaaatcgaaactctgtatcgacaaggttttatcaacaatccaatccctcttcctcgaaaacacacacttgacactggtaatccgtagaaaccatcaaaggttttatcaacaacaaccttccatcagatttcaacgcatttgtaataatgtaatcacaacttgatgatgattggttactaacgtatcaaagaccatacacatccatggaatggtcaagtccgcaccgtagtcatattcgatccatctcgcaggtttcaacagctgattcaaaacgaaaatctttcgttttcatggcgtatagcaatagaccgttcaatgaaacagattgatcactgattaaataataaattcaggaacgggaaagattcaaaaagtttgaaatgtaaataaaagagatcaagatttaacttatcaacaaaagagattaacaatgtgattcacagatgatgcgatctccccaatgccaaattacaccatattacaaagaactgtttgcatccgattgacttcgaactctaaccctaattacttttcttgggttttacgttaaaagaaaaaaaaacttaatgatttaaaaggatgaaaaagaaaataaaaattagtttgatgaatcagatgatgatgtctgagtaggagaggcaggagtagtgttagtgttatcaaccacctctataggcttagccaagaactcaagtgctgtgaccacatctcccatcaatggcctagtctctgcttcttcttgcaaacacatcgctgcaatcgctagagcttgatgcaacccttttactgggtagttcccatctagatttggatccacaatctgcgcaaacatccttctatctttcaacaacggttccgcctgccaaaccaaaaaaaaaaagactttcatcggtttctttcttctcaagcaacaacacaaatatgttaacaagactcttgcttgatgaaatacccaagagatcaagttttgttcttcagttggtctatcgccatcaatagctcgtcttccggaaatgatctcaagaaggacaacaccgaaactgtagacatcggatttagcagtgagttgaccggtcatcgcatattcaggggcacagtatccgtatgttcccatgactcttgtggacacatgatctttgccttcagttggtccaagtctagctaacccgaaatccgatagctttgagttgaagtcagattgtaacaatatgtttgaagctttgaaatcgcggtagatcacaggaggatctgcgtagtcgtgcaagtactcgagccctttcgctgctccgtgcactatccgcattctggtgaaccagtctagacttggtgacccttctggtaagtctatgtagtgaagaaagattaaaactttagattacaatgcaaaagctttgatgatataacatgagaaggtcacaatctttaccgaacaaatgatcttccaaagatccgttaggcatgaattcataaacgaggactcgttgctcgtcttcgacgcaatagccaatgagattgacaaggtttggatgttgagccagactcaataccattacttctgcaaagaactctcttgttccttgcaacccattcctatcaagcctctttacagccaccacctaaacttctcatcattcaatcaaacaaaaattagcaacttttcgccaaatttcacacacttacatagaagttttgagagattgaaaaggacctgattgaggctggtgagaaaccctttgtagactcttccaaaaccgccttcaccaatcatacaatccatgctgaaattgtcggttgcagctattagctccttgaatttgaagattcgaccgcagttcttcacgttcccatacttctttatctcttccgttatatacttctgcctgcagcttcctgcatttatcaatgttcataaacattttcagaaaccaaatgatatgtgatcaaatctttgagaagattgagttagatgaagaagagacaacgtttacgaatacctttccgatgtgagcgaaatgtgaacagtgcaaaaagtttacggctatggcctctataagctgtaagaccttcgtcaaatgaatctctaggcgaattaggtccaagctgatgcgggttgatgaaacaaggacaaagcttcatcattttccttcttcttccttcctctgtttgttttttcttttctgttcttgattcttcagacaaaaacaaatcctttgtaatgaatcccccaaggaaagattcgatcttgtctctcttaccgatcctttcagatccaaaccctgtctgggcaaaacgaatctgaaagaaagatcagatctttcccaggaaaatgatgttgcatgacacgagaatttaggggacgatcacaaagttttgctctctcttattgttatatatgaatgttcccatctctcaaatttggataaaaggattattcttctttttcttatttttagggttctcttctctgttcgtgaataagccaacgcgtctctctcttttaacaaacttccaatcaaatctttactccaaaacacattagttcgtggtaagcatgtaaacattaaacttctttctatattatatagtcatcatactatataatataaacataggaagacacttaacattgctacaatgctttgaccaaatcttacagataaactgctcaacatctctctgattccaaatccaaaaactaacaagataaaccattaatctatagctaccatgatgagcaaaagattactatcttctaagaagatataaacttatttcattgctgacaaatgaagagagaaaattcgtaaaattttgaaaataccgatctcgggaactatcttttgattcattgcggtaatgcggcttcgacttcgttccacaactcaacgtttctagtgaacttctctttcacttgcccaataagctcctttgcttcttcgactttcgaatccttagctagtccgttaacaagcgacttcatgatactaaaactcggaacccaattcttctccatactctctttacaaagactcaaagccgtctcaaagtctcctcctttgcataagtaatatataagagtgaagtaacactcactatcaggcttacatcctctgttcaccataatcttaaacaacttcttcgcttcctcgaaatcatcttcattacaaaacccgtgaatcaaatggctatacgttaccgtattcggtttcatccctgcagataacatcccatcaagcaaagccttcgcttccttagatttcttcctcttacacaaactctgaatcctaatgttataagtcgaaacaccgatattaacaccacgatctttcatcatcgccaacactttccctacttcatcactcttatcctctgcataaaacccagaaatcatcaaaccaaagcttgaactattcggctttatccctttcctctccatctccgcaacaatggagtacgacgaactcgctgaaccggattcacaaaacactttgatcatacgattataagtctcgagatcaggttcaattccatacatcttaggcatctcaatgtaaactcttttagcttctttgtaatccttagctactaaacaagcaaagagaagcgcgtttaaagacttcaccgtacgagagatttcgaatttctcgagatcacgaaaaactcttaaagagtgatcaagcatattagcttgagcatacaaaacaatggcgtgagcagcaaaacgttccgatttgagatctggtctgttttcgatgaatccgtcgaggagattcgatacagcggagaaatgtttcttctcggcgagattctcgacggcggcggagaaagcgattcgatctatgcggcaatctggagtaagagaagctgcacggcagatttcgaggatacgatctggatctttctcggatttgagaagagagagagctgctttgcttttttctttgcttgtgagaggagtttttgaatctggtgagaggattgttgaagccgaggagagtgatcggatttgtggtgatgcgttgaggtgacggaagagagatgttgatgaacggattcgagagagtaacgccattgttgttttcttagggttttagatgaagaagatgactgtgaaatgaagaagaagacggagactggagaattagggattgttagggtttttgtgttgtgtaaaatctaatcatagccgttgatgggtattttaaaagtcttcacaatggacggttgagatgaaaacgaaaattaaaaaagttgagatccggatttgttcggggaattgaacccgacgtgaatcgaacacgcaaccttctgatctggagtcagacgcgctaccattgcgccacggatccggtaattaatagtctctctaacttatatatattgcagaagataaattgtattatggtgcgaatggttgctgcggttgaggtgacaaatctggtgatgaataagtcacacacgcatacgcttcccataaactacttttttctactttaatttctcgatcttacaacggtccaaggctagaaataaggggactaatcagattggttcagtgttcaatccaagcgattttcaactggtgagagactatcttcgaaataaggttgaaaaggggcaaaacagctccataagagattgtaccaagtcgagttgtggcttcttcaacacgtaacaccacatcctttcttcaagttttagagagtggttctattttattccgagtagacaaggatgggacgaatagaccgcaagatcgcaaagtacccgcaataaacggagagagcgaaggcggcacttggagacccattgattggaaatttccgatcgttgacgaagccgagatgttgataggttacagggagagtttcgtgtaccgcaagaaacagaattgtaattcctatggaagtatacttggttcatgactcagtattattccctttgcgatgatcacagctttgtcttgtgcaggatccgacaccagagaagatagatggaagatggtgttttcttaaggtttagctgatgcatttgatacgcttgtgattggttttcttttcatagtaagattggtttttcctcttagattcagtaatgttaggaccacatattttattgtccattgccagtttaacttatggaattaattaaaactccaactctcgatggttggattcatttaatttagggaagtgattgggccattgtatttggtcctaactcctattaatcagacgttgaaaagataccctttcttcttcaacttttagctaaaaactgacagaagttggtaagaagaaacaactcactctttattttcatatacaatcatacactgaaataaactttcaactttgctcctatatattctaatctcaaatgtccatcaaaaaaaaaactcccacaacaccaagaaaccaaaaaaaaaactcaaatttccaagtcattaaataacaaagcgatatacatttttcgattgaaaaacgagagtttaacaattgaatatgcatcttacaagtgatcatctatcgccatatttcggggaaacaaaaattttgatttcaatctgacctcaaaactcccaaaaaaaataaaaataaacaaatcatttcattaatttatttattgcttcaaaagcggctcacggctctcttcccactggtccaatctgctcgaagctttctcaacctaaattacaaaataaatttagattaataccacgattcattgaattccatcattatcatatctaccaaaactcatacaaagatttgtgcataaaacttttcattataaacctaaaaatgctcctagattaaaaaaataaaaataatttacctctttgtcccaatcagttcgtaaagtgacaatcactaagattattgtttgcattaaagtaccaccaatcatcccagtccatattccctgcaccatatcaaacacacacattaaatattacagctattattatttaataaggtacaattattgtaaccaaatttacatgagaaaaaatttaccttagctcccatatcataagtgaagccaagaacgaatcccactggaatccccacaacgtagtaacatccaatgtttacgtacgcaacaaatgcttgccatccacatccaacagccacacctaaatattgtacatcaaattaatttcagtttttagtacgtttattaatgatgtataacgatttgtgtgaaatgtgggggttttttttataccggacaaaacaggctgaattccattgaggacaattgtgatggctaaaaagggagataaatccgcaacggcctcagccactgctggactatcagtaaacgcatagctgatgacgtgacgccacgataagaccacgatggcttcgaaaaccgatagtaagaatgatactcccgttgtcacgactgtggagaacgcggctgctctcgggtttccggctcctagctcgttgcttactctcacactacacataaattgaaaaaagtgtattattagtaaaccataaggagcaaaacaataactatagtttggagtgaataatgttagttttgttaccaaccttgcagctgcgttgaatccaacggagaccatgaatgagattgcagaaattgacatgctgcaaaaacaaaacaaaaaaatgagttttcgacaactggtttgtgcaagtgtatgccgtttctagtcaatggaaacgacatgcggtaagaactctaacaaaacgacaaagtgacgacaaaaacttatagatcttctactgaaactgaaaaagacgtaacgaggtgaggagtcgtcattttcgacttcttcagaaagaaagaaatcataaagcactttaaatacttaaccactacaataattacatttgtgtcacaccataatgcgacaaatgatttgtcatatgtcagattataacaaacatggaaataaacaaatttacagctaatattcatggacaattttaaatgaaaataaatttctctttctgcaatttatgttattaagtctcaaaaggtaagaaataaaattgttaaaccaaaaaacagaaagaaatcaaattgtttttaatgaaaaaaagttaaatttaaatttgaatactacttgaccactacactagttaaatttgagtcaccttaatacgacaaactatattattgtttttggctaaagatgctacaaatgatttgtcatcatagttaattgtagtattaaaatggaaattgttttgaaaagatacactttccgactttaaaagcaaagtttcctgctaaatttcatagacccttttactagattttagacgttactcaattttacttttctctttttgcaatttatgtccttatgttattacgtctcaaaaggtaaagaatcaaatcactttgaatgaaaaaataattagaagttagaaaattgtaccagatagcaagagaatccaaagcaagctcagggttcttgagaagtccggcgagtaaaacaagaatctgagagtaccaagattcaagacaaagcatgacggcagaagcagctgataatcggaaaaaatcccaaagaccttcaaaagctttccaactaaaaccttcccaagtccgacgacatctcggactcattttaatataaacaatctgagccacaacaatgatccaccacgagaagctatgtatcaaagacaaagccaaaagaccgtaaccaagacgatacacagcgatccacgaaagtatgagatggatcacaagcgttgcagctgatatgtaggcacttggagtgacgatgctttgtgattggagaaacttctggatagggaaattgactgcgtaagcgaagatcaccgggatcataccgtagacgaatactgaagccaatgttgccacttgctctggctctccaagtgctgtgaggatcggatttgagaagaggaagagaaatgacattggtagacatgttaggattagaacaactgttgatctttggaggtaaactccaagcatttcgtatctatgagctccatgtgcttgaccacataatgtttccactgcacttcccattccaagctatatcatcaccagagaaaagaaaacaattagattcagaggaattttaatcaaaatttcaagaaattttctctgttttttcaactgatcaggaaaaaaccggtaaaactttagtcaaatttcagtaaattttctacttttttctcaattttaataaattttcaatgttattttttattaataatttgatataatacatctgatcattttggtgattggttttaaccaaaaagaaaaaaatcgctttggtgattcgtaaccatattagtggttacaactaaatctaaacaaaaagagatgaaaaatcattttgttatgttaccagaagtccataggtgaacatgttgaaaccactgtttccaagtgaagcggcggcgagttcgaagcttcctacgtgtccagcgaagatacgtgtaagaattgacatgccgttgttgatgacgtaaacaaagatcgccggagccgccagatgaaagagaaacttcatctcaatcatcatcgctagataaatccggcgaaaatacggtaactctcgatctgttaacacagtctcgagacgataatcgacgaacgacttcgatgattcgattaatggacggtgaagattttctagcgattctgaattcattttttttttttgttcttggagaagagaagaactgagagtatttattatttattgggaatatcgaaatctgagaagtgatgatctaatagtgtttctcttttctagttctgtgttgttgtctctgcagctttggcagagtttatataatgtgagtttttgccgtgtatagctgacggaattaataatatattttttaataatatggaaatgaagtaacgaggaaaggctgttttacctgttttgcccttttgtattatttgtttttttttttttctttctcgtactattatgaggctatatcacacataagatgtgtccaacctaaatttgttttttttaaaaacagccattggagttttgttactatttccaaatttaagaaaaagtatataagaaaagtgtgtatatatataaatatttttaaaaagtaagtttctgaatattaaaaagtatgctaaattttgtttatttggatatttagttgagatatacagtatgtgaagatgtgttaaatatgttaagtgtattttgacttttttagttaaataacactaaattttaataaatgttcaaatctacaaattgaataacaaatcaattgaaaattttcaaaaaaaacaaatcaattgaaatcataaatctaattaacaaacttccaaaactaatcaagttgacaataactttatgaaaatcaaagaaccaatataaccccgatccttttcatagtttcataacggtttgaaaatggaagttgaattttttaaatgaaaaaatagaatttttgatgattactcagttggtataagtttcataagttttagggattaaattaaaattaaaaattgtataatatcacagtaatttttcatcaacatattcaaagtcacaatatgtgatcagatcattgttcttacttcataagaatattatgttatatataaacttgtaatgttaagttttggtgaatttttttaatctaattttcaaaaaaaaatagaaatagataaaatcgagcacacacaaatggttttttatatatatataaaagggaaaattactagagtaatccatattttatacataatgacccaaaagaaatgctaaaaatatgagttatttgaataataattataccaaaaatatcattattttcctttgcagaaaaaaacaatattacagaaatgtcactactatttaattccagcatggcaataaaaccacatttatttacgaaaatgccatcgtcgtttttggtaaatctgtggctcttgttgcgacggatttgttatcgatcacagatttgttggtcaaccacagactttttacaacagacttgttttgtaccacagactttactgtgttatattacgccagattttttttttccgcagatttttcaaccgtgactgatttgtttcatatagtttccacagattttatttaaatttcaaaagtaagaatgttgaaaccaaatatgtcactgatttgttttccataccgcatatttttctttatggtggcaacagattttctatttgtacccaaaaatctgttgtgttataacagatttgttaacctcgaaaaatgttatataggcatgacagagttgttttgtgtaatcagagatttaattaacttgttaacaaatctggtgttttacaacagttttttgtttaaaaataaaattactagacagtcacataatgataacagatttgtttttagtgatgacagttttgtttttcagtgtcaaagcataacagatttactcatgtcaatgttatggctgatttgtttatgactacaataacctttttagtactaacagactttttttggcagatttgtttttaaaatttcaaaattttttgttatatgagatttattagctagccctcaattaaattatttccggtttgattgtatgttaaatctggtttgactcgattttttttttttttttgaaaatgttacaacagacttttattaatatcggcaaatttttacataatattgtcatatttgaattttaatgtattaaatatccaattgtgagtcatgataaattctccaagggttttcataaccgttttttttcttcttctattcctaccatcaaatcaattatttgtgaattgatacatgtcaaaatattattggtaagctaaaacaagtcattttataatatgcaatatcaaaattaaaaaacatttctttactatttttaaaatcaaaaacgaaatatgtgaagcagattcttctttatctaaattttgttcaaaattattatttttttaaaagtttgttaacgtggatttttgtttttgttttaattatgtaatataggttttggttttcttttttatccacgatttcttttttggttttataattctgttgaaaaataatttgattttgctgatttgtcaaaattttattggtagagtgacttgtgctttaaaatataaaaaatttgttttatttttttattttttgttttaatttgattacaattaatcattaaggttatttcgtctttttatcaaagatatgggttactacagtttttgaaaccaaacgtgtcatttaagttatttatgttaagagttgagtcaatctaagcaaatataaaagcacatacaaaagttgttacaagctgaggttttggttaatcacacaattttaagctgaatcaacaaagaattcgaacagatatcacaaacataagggtccaacgcaaacccgagacgtatttggcggtggttcacaacaaatattggaaagtactcttttatgtttttgccaaaatacaaattagatgttttgaataggattaatacatttatcaatcaatgtactctccatacgttttgaaaatggaaactgataaacacaaagacaaagtatggaggccacattgatggataaattaatccatgttaatttgctgggtgttgtgtgagtgtgtgacgtcatatgtatgtatctaagaaaaaaaaatgtatctaacaatatgatcaatataacgggattctgaactatcaaaatgttttggcatactcgtacatgatcatgtagtatagtgtgttatgtatttgaaaaattaccccataacaatagtatgttgtggagctattttcaaaaaaacttacttgtgaccgaagttcgttttataaacatttgacttaattttattataaacaatgtttaacccatcgtagaatattttcaaatatatatttgtggataatatatgttataaaaatttcaaaccattatatttctaataaattaaaaataatgcatttttaacagaaaaaaaataggattccaccattgaatgataaatttaattagaagttgatatacatacatattaaagatgaacaaattatggttggaacaatttgcatgatccatgagcccaactttaagttttcttcaaaccttttgtttatgaacaagaaaaaaaaataggtaatgtaatagctaagaaaatgacaaataacatgggtggagcaggcatattattttggcctcgtgatcgctctctcctaatgaaaacgttactattaatatccactttaccacgtcttcttcttctcttaacaaatagaaaagaaacatatatccacttctttttaaacaagattcaaaattactatatttttacagtaaagttacagaaataatgcatgcacttgcgaatatgtaagacgtggaataataaagagctagcgttatgctataattacgacaatgcgacaatacatcactgagtcctactcatatttattatgatagtatatgatatattgatatgtactagtttaattagtactgaattattattattattattattattaacatttgaaagaatccatccagtcgatcgccgtaaacgatgacattttggattttattttgattcattttatttgattgttctatataattacttattttcaacagattatccctaaagaaattccaatcatgtgactgagtatagactgtatagtaacaagacacgacacgagcgaccatttatagaacggtcagctgcatctgaccttattattattgtggtgcttagaatttaggctactctattaagcagcaacaattatataattaggcaaaaacgaaaagtgatttctccaatcaatgattagttaattatatttttagttccgtggttattgtaacatacaagatcccactagaaagattcgaatgtgagtaagctaattccaaaattcgttttctgtactaaccaatactcaagaactattccttgatagtatttaaaaactgcttcgatttgtgtaaatattgattcacccctacagaaataactcaataagtgacttcacatttacactagaatccaagattacttttggaataccactacaaatgatacaagattctagaaacctaccgttactactttaatttattcgcacggaacattcacaaagatactgaatctggtctctcaaatagagagatattgtattttatatttttattatttgccatgaaatatacaatttgtatctccccaaccacaaatgcataaatttgcaaaatattttcttattttcaaatatttgttgggtgtgcctaaagaaaatactagaaaaggggaaaatgacaactatttggtaagctaaagaatttaatgtattaacttaataacggagaatcactgttacgaaaatttgaggttgtgatactgatacgtgtcaacgatttattagatctttgataatttagttgcatgtcgacttgcgtatctagagacatgtgtccaggccatatttatataagtgttgacgtattatgcattatcatgcaaaaaagttatcgaacatatcatattataaaatatatatggtgtatatgcacgacacgtataaagtaattatatgaactggtgcctaactctttgatcaataatatcgatctctatctatgtccaacctaaccagttcaattttacgaagtagtattcgaacggttagactattcggttaagagaaattaagtggttagctcaatacgatcaactacgtctaattagcacatatatgaaaactcatatatgagctaaccattatttttatatttatattgatataatattaagtctcgttttaaagtttccgtctaccctgattaatttctacttaatcgttaggttcatcatatccactttgattaataactaattttaaaaaaataaattatttattattttttgtctaatccgatttcttttttattaatcttcggctaatcttgtatatccaaactacttttagagtgcaaatataaaacaattatttttgttatttaattatttattttaagagtttctgatgttttacaataacataagttcaaaattttaataaaaatcatattttttgtgttaaaaatataggtttatgtatttattataattatgaaaacaatattagattaatgtgttttaaaaatattaaaataactctaaaacaaattccgattaatccttgattttaatccgattttttgattaatcgctaggtttataccaatcgcccgattaacgctaagcgatttttttaacaaaaatattaagtaaagaaacatattttatgtaatattttggttagttcaatttatatttttcatttatattatattagtaatcaatgaaattggaaattacattttgttaccagaaaaaggagaagaaaaagtgagcacaaaacatgacttaaatagagcaaaatctgctaaaaaaaaagaaaaacacatagcacaagtggaagcctctcgcataaaagaaaaaaacatactatcttggactatctggagttacaaaaaaaaagactttaacaaagagaaaatctggagttacaaacgagttcagtgtttctaattttatttacgcataaaatcaaggatatagtattattttttttaaaatgattgttggtacgtattattaatcgtgacattatgctttacccaatactaccaaagttaaatccaattaaaaatccatgtttcgactttgtagaaattcagattataaataaaataattgacgtcaataagagaaatgactttatatatttaatgatatagtgacaaatatatatacatatattgtattgaataaataaaattatatatatatatagaggatatacaattacggaaataaagggtattttggacaaaagcaaaatttggggacaacaactttgagcgttacttagaacaaacgtaaagaagatgagttgtgtagttagttactttacggggaccatgcactatacttttagtaagaatgccacgtggattaataagcaaataaaaaacacaccaaactcgtgcttcaaatcacacatcaagtatggactcatctggtcaacgcgttttaaccgcaaacgcggtgatctcatcaacgccaaaccataagaaacaatttcatacatacagttaaaaaacaataacgatgttacaagaaatttcataaatctattaaatgcgtctgttgcagtgatatgtgaacataaagggcgtgaggtggcccagcaaattcttcaaaccgacttaaggaaaatttaggtccgtttaaacctaaaaataataatgtggtgattgattttattgtatttatatatatatatatatatatgtaaatgtacatattattaatattctaaatttatgaattttcccaattttattctttagttattttatatgcaatgaaaatgcttactttaaagaaaatttatttcgaattccagatatatgatatataaatttgaaacccttaaaacaacaaagatataatatataaatgtattagttcaaaattttcaaaaaaaaaaagagataatcaaaaaatttagaatgtacttaaaaaaaaatctcgagtgtgaaacacattttcgttttcgtttttgttaagaacacattttcgttttcaaggaaaagtttatttctatcaattttgttaactttttatatccaaaccataacaattatatatatttttcaactcgcttaaggtcctaaaaacctcgcacaacactgtttacaagtagctttaataaattgatccaaagctacattttgatttaggaaaagggaaatattctttatttgcttaagtaaattaaaaatattattagttttgattacgtgaaagagaactcattttgttgcatgcaatgtaaattactgactggtattgattaatcaagagatttttactttttgtgcggattcaacttaaacaccttgtgtgtgtgtgtttaataagagcccgttttattatatgttttatgtgttttaaggactactatctcatgctttttatatgtgtataatattgtatatgttgaccgcgaatgtgaatcttctaatactttcgtgattagcacacttatgtagttgtgtatttgaatgtcttcttcaaacaaatgctttttcttcaggagtttggacatttcagatttttccgtccacaatgattgcctgagctgtaaacaaatatagtctaatgaaagtccacaattttgactattggttataatatacaggatatatctacatgcagtattttattgactttatgtgagtttctctagctaatttgacccaaaacctactatataatttcatttaattgatttggggggacatgaactattgtttatcctttggtgacccgtcaatttgattcgctatagataagtgagtgttaatttgttaaaatgactagtaatttatatatgtgtgtgtgtgtatgttgacatatatctaacatcaaattcatcttccgcagtttttaaatgttggcctactagttctatgtttttcttcttgcctctaacagttatttaattacaatttttataccaattcaagtctataaattttaacgtcgtcactataaacctaagcttcaaaactaaagcagacaaaaattgatttcattttcaaatttcaaagtttaaaacgtatgatttggcatatctaattttgtttgttggagaacatcgtttgtgctaatttagtagtgagcggagataaactatgtaataactcttgggaagcaaacctaactcacttataataatttcataattcgtgctcctccattcaacttttggtagggattcttcaaaagacaaaaataacattactttttaatttaattaccaagtgtcaatgataaattagtatattaattattaatcactaggggttatcctaaggtatgcacatggttttctttggaatatgtattttccttagtttgattagaggatttcttaaaaattgatatttgatatgtatgatttcattgataatatcaatctatacgtgactgatacatctgaaatacaatatctaattaaatatgtttactaatatattaaaaatgatataatattttcgacttgagagttaagattagattaataaaaatatatatatatacactgttctgaatagcttgcattcttgttatatgtgttttaagtgtttttaataatttaacgagttagtaattttttgtcaacagaaaattcaatgctagtttaaattccaccatggggaatccatatatagtgtctcaacctattaatggaccacttagaatatgtatgaaactcttttgtgtttatctttgttgcattatcacaaacgtttatgttaacttttgttagtacatactctttgtcgggatctcatagtattggaccacaatgttaagattcgtctatcttatcaacgttgatgatcaatgtgtatatatatttttttccatcaatgcgttatagtgctggaccataatgttaagattgtgaaaattttaaaatcaattagaaatgattggaacttatatcctttgattcatattgaataatttcatttataatataagatattctaacacacccttttgatttatttggcctataatagtttaaaatatagaagaagataaatatatatgtatggtaaaaatgaattaattgaactctatgacgacaaatttcttctatcttaggtttggaaagttgtaatatattatggtatttgatgagtttggacgcatcgaaactctctaatttacccaaaatctagatatttttttgtgcaacccatgctcatcatccaaattcaattcctgagtattgaacagccagatgcataaatggagatatttactactctctcacatgccacatgggggatcacatttatactctaaaataatagtttacctgtatttataaatgaattaagtaaatatagatttaagataagattaactttgtccttaccaagagattttcaaaagatactgcgctaatgagttgtcgctacaactaaaagaatcttggattcgtcttcattacaaatgtgtaatgaattgaattgacagatgttcacgacatagctgaactgttttctagctaatatatccactccaccatatcttttttccatagataaccataacattatgacatcgtagattactatatttagtaggctacgttggtataaatgcatacatacgccgacttggaattttgtaagccgtgttcatatctatacctatgagattgaaaactcgagactctcgtgggattgttgtgtccacgtctgttgataaaagaattagtgtggataggtttccgagtagaaaattggaaatttgtttcttttgtaataagtactactttgagtttttttcttctgcttcttgtcagtgtggaacgtggataagtttcgagtggaaaattggaacttcgtatcgtttagtaagaagtggttgagctttcttttgccacctcacctattcgtagataaaaaaagaaaatccttcgaacgtaggcattcatatttattttttctttcaaacattcatattctttaatcacattaccagccaattaattctattatcctgataactataaaacaataaactgatctgatacatatattataaaattgtggaccatcataagtccatgatatttagtgactttagtctagtggtcgcggtcgacataaaaatcaatgccatgcaggctgcagccatcatcgacttaaaaggtttgtgacatcctataagatatagttgagtttgaaaatgaaaagaaaattagagtttgaaatttacagaaaatatgtttggaaataacatttttttatataagtttatatgactctcctactataattataaactatcataggccaaataaatcaaaatgaatactattggcttacaattataaaaaattgttaattacagaaaatgatgtatttataactaattttctttcttcttaatagttgtgaaaatgttaaaaattgaattagttaggaatagatggagtaatttgcatggttaaccaataatttgcactttaacaaaaaaaaacccaataatttgcatgcaaaaacaatcaaagacaaagagaggcccacattgcccttatctattcttagagactctatcccattaactaaattatgggcctgttgaccaatgtctccatatacaaatgtttttcgatatttctaacggtgtgtatgattgaatattaacggtgtgtgacataggtggggttgtctagttgtatattgtggttctttcacaggaactaggatgagtgattggtggttagcgagactcgatgtttgatcaaggagtacaattttatgggtccatctttgttaagctatcaccatcaatctttggtaatctacaaagtgaaagtaacctacccattgaatttcaaaaacaaacatcagaattgtgagttttggaagatccttaaaaaaacatgaattgtcgtactcgtgacattatttctgtatctcaatgccgagaagactactactatattgtctatttcaatcatacactatggcaaacaaaaatagttcagagaaagtaagcatctaaacggctgcaaagacagattcttaaatttagcataaaaattactcaagtaacacttttgaattatgaaatcgacagtctataaataaatatattataaccttacgttataaaccctacaagaccttttctttacattaaaaaggttttcaagaatcataaatcaataaagataaaaagactttccgaaacttatacctcaacaactcatacacttgaaccggtcatgtcaacatccgacttttgtagctgactgtaccagtttgatctacacaaacacacctattgactagtaaaccggtataagagaagactggatccggcttagttctggtactatgacagaagcatcacaagaagcatagacaagacaaagatcaccaaacgtgtcactccttcatcgtggagacctgaaagataaaaagaaaatacacatttcagatttcgaaagaacctttaaagagttctttttgtgaaatccgtgagatgtgaaacacttacgaggttgcgaggaggcagcagctggaagagcaggaattctaacagctgcaaaagaacaatacagaaaaacgtatgcaagttaagaaaaaaagagaggcaaaaatgtcggaaatcaagaagataaatacgataaaccacgcacgttttttacaggtagaggctgaggatagagaagatgaaggccacggagcgggaatgttgtcattgaggtcacaagtaaagcttatccccgtgtctttatcaaatatcgcatccgatggtaggctcggtaatagacaaccagattctttaaaccaaaaagaacagaatactcaagttaacaaaatggtttttgggtttttgtgatgatgaatatagaattgaaaatcgaggaaattaatttataccttggtttccaactgtttgaatccaaccacgatgcatcaacaagcacgaaaaacaaacaaaacgagttagagacatatcttgaaatttaagaagcgagagaagttgtagtataaagtatgaaccttgaagagagaagtccttgagacttatatgacaaacactgaatatgttcttagtgatgttcagtttctgtaactttgtcccaaggctggttgcgcaatctaaagcttgcaaattggttataagtgtttgcttttgcaagtgagacacataactctccattgcacggcaacaacccgtttggttactcaactcgttgctgcagttaccaccaatatgcttcatgtgcggaaagacaagaggacaaactgaaaaccaataaacacaaaaatgtgaaatgttcacccaaaatggaaggttaaattttaaaaccagattgcttttacctctattgattttgcagtttgctaatcctctgagagtttccttaacccgagaagggtcaagtttagtagcgagccagcggtttactacgttcttgcagtcattgatcctatccgaattatcagttaaagtttctgatgctttaagagatatattcgtagcagcatcgagtatcgcattttggcaagcctcttcgcaacattccttcacaggatcaattttttcacaggccaaaagaagtttcgctgtatccaccgtgctttcaaactcatcgacattgataacagggcacgacgaagaagtgagattcgacgagtgaatagaacagatcttattaagctgacctgaagcgccttttcctaccaagatttgctctaaatccgagagacagtgcttagactgggttctgtttaaagcaagcaaaccggtttctttactcgctttaccaaggattattgtgagtgtagcatctagctgaggacaacacatcacatttgccaacaatggagcaaaaacagtccaacagttgtgtgaagtagtctgaatcaaactctcagacgcactgaaattaagcgagcaaagccctgaagatacacgaaaaaactaataccgattagtaaattacaaaaagcaaattactaatagagaaaagtgatcaagttaaaacaagaacaaacctgatagtttaggcatggtactatttatgtatggaaccattggagaaggtgcaatgaaaggaagaaacggttgaggagaagtatctggtgatatctcaggtaagaactcctcaggtttctgtgatgaacctgaaccagataagatacaaaaatcatcacacttttgattttgcaaaagcttaaatatctctgaagaaagaaacctaattcgttaactacaccaaaaccctaatctaagtaacctaaaacaccatgaagcttacttcaacattccaccacaaattcgatcaatttctacataaagaaggtgaatttacaatgacccatcaatataaacaagcaaattgttccaaaacaagcgaaatctcaacgaaaaaaacgaatttttctatcaaacagaaacagaattagaaacagataattctaaacccatttccctcaaaactccccaaattaaggaaaggaaactcacatagagatatcagaaacatggattgaagaatcacgaacaaacccatctcaaattcagctcttctcgtcatcctcaagcctccaaaagagagagagacagagacagagagagattaagctctgtttttatggtctctttcaaaagctttggactttggacaagagaggacttttttgagattctgtgtctttttcccactattgaaagaaagtccgagaaatctaaggagaagaagagaaaggcgtttctttgcgaattttggacaccaaaaaacttggttgagaagatagacacaaaaacaaaagggaaactcagaaacagctgtcttcgtcttcacagagaaagagagagatagagaggagagagaccgaccccacgagtaatgaacacagtctgttgtgggagaagagaagggaagagagagcgcttgagagcatttattactcctccattaaattccccccacctttttctctatctctctctcactctttccatagtggaaattaaacaaaaccaaaacccggaccggtaccggaacttaaccggatttcatatcatatcaaatttaaaccgggttctgatttatccaaattaaccgaatgattgttgaggatcatataatttagtattattaggtaattatttagttttaaaaatcttaatgatgtttaatagtttttttgctactttgcttgttttgtttataatcggttttgttgttattttagttggagatgaaaaaaaagaatatctcgaataaatttttatataaaaatgagaatgtctcaattttatccgaagttaaacttttgaagtgataccaaattttttagttttgtataataagttgaattttttttagtgtaaatgttatttttggattacaagtttggagttattctaatgatcgttgtttagcctataataaatttattatcgtgaaatcgattgtacttgaaagtaaattctctaaaacaagactataaattgacaaaaaaaaataacttcattgaaaattaacctcaatgaccaaaaaaaaagctagtagctagtacatcagctaaattgaatgttcatcgtaccgcgaaataaattaacagaaccaaaccgttggagctgttataacgcctgttggtttaagccggtccaaaattgagaatattggatcgcatttataacttcgcgacttggggacatgaaagatatgtgatataataagtaaggctattattgtggtcgtatttaattcaaccaaatatgttgttacattagaaagtttttactttcttgcccataattttcaattctttgtccataattttatattttttgtccataatcttaaagcatgtaacaagtataataaatcaatcattctacaaagtacaaagtgaattagtgaatgaattgtgttcgtattaatttcagactctttaggatacgtgtatatattattagttatgggcaaaagtcatacacgattattctaagtcaactttttaactagaaaaatttctacaatatgtcgttttacggataaaaataagagaccccctaaaataataggtaaattacagttcaccaccaaaaaaaacataaactgtaaatcaaataattaactttcataggtgaaacaagaaaatacaaaataattaactttcatattatttattgattttttactttctgataggttcgtcgtgctgaagaaatggaacactaatggcacgtgactatgcttaaggcgtagggtatggtcacgtgagcggaaccgtgcttactgcttttggagataagattaaagagggatccagatcataatgctggactattaatgggcctttacaggcccacgttctaatattaaaatcaaccaattttctttccttatattgtcacaccaccttaattttcctttttgagttttgagatcacccaaattcattatcccctaggttgtgacttgtgagtgaccgaagatcttgtcattctttttctggcttataaagattaactttaacagtgacatatgttttcgtttcatcttcatatttcatgagatatttgaataaattttataaaaagacccaagagaaacaatttactttcataataaagaatttaaaaatcgaatataatcttacgctttaagatgatcaagatgttctatagtgaaacttgaaaacttattattcctcacactggaggacataacatgttaaactggtttcttcattgcagccagtatccgaattcatgatttttaaagttttcttcagtaagataaaaaataaaagtctagtacaccatttgaactatcaacgtaacgctgaatatttcatgctttcacataaaaaaaaattggatgatctttaataataacattaaaatgtggattgctttatataaatagtttatgatgctcttaacaattgacaatttggccgagtggtctaaggcgccagatttaggctctggtccgaaagggcgtgggttcaaatcccacagttgtcaaataaattttgaacaattgtactgctagtattcgtttttgtggtttggatttgcgaaactgttttttttttatagatcttttcttgacaaatataaaacaaaaatttattgggctgatggttggcagagaaaaacccggccccaaagggcccaaacctaaataatccgataaaaggtccaactttttcagattcaattaaaaacgaccagttaagtaatggacatgctagtaaatgtgatggatcattgacctgagtatccttggggcaggtttaaactttaaactagggatgtatgttgtcaatttgagacgaagaaaatagcaaatcaccgatcagtctcacgggttccaactttgttggatgtctacttttcttctctaaagatgtctttttattaattcgtggagtagtccacttaacactttagtctttatcaggaaatcaaattattcatctctattatttattttgtatgtttctcatgcatacatgtaatatgtaatccacacatttgtttgttttacttttatggttggcgaatgatcgatagaatttacagatccaatcttggccggccttacggctttgcacatggccaatcattctctatttatagtccttgacaaccaatatttatagcttataagataacaaactaattcatggtaatccaatcattaaaaatttcattatgtaaattaaaagattagtcgactggactctagagtttaaatttgagaatatgcactagataactatggattgtaaaagaactaacaaaatagtcatggtttcagagtacactctctttcttcactttcaattacctttttacccattttcgtattttatatatattacatgctatttttcaaaatcatataaaacacttagaattatctcatctttcttttttccaccaccacaaccaccacatcttccaccatcacaaccacccgatctctttttcgataaatctaggctgccaaacgttatttatattgatagatcatctctctttcaatttgcagaagatttgtcatttttttattcgattttgattctttcttggaatctccgtcgttatgtttttttttttaaattgtatgttatttttttttagggtgatttgcataaataaccatttttgataaactatttaaaaatatagcaccttcatagataaaattaagtaaataacactaccgaggagtgaaaagtcaagtaactcctgtaatgaagaagagagggacgtgatctatcactcgtttcggtttggacacgcatgaaaagagagaagcatgggcaatgtggtggtgtcgtggtagtggtggtgtcgtggtagtggtggtgtcgtggtagtggtggtgccgatgataacggcaacaacagcggtagtgatggtggtgtcgtggtagtggtggtgatggtggtgccgatgataacggcaacagcggcggtggcgattatgacaacaacagcggcggttacgatggtgacatcaacaacagtggtggcgatggtgatggctcaagcagcggtagcgttagtgatggtggcggcttcagccttatatgcttcatcatcaatgatttagatgttttgaattcttattttttaatttttgtatcattcaaattcttaatttttttctcatggatctatgaatccaaaatcttcatatttactttagtgggaaagtgaagatttttggacatactccggcaaatatgttgttagtggtggtgaaactatgaggtgaatgtgaaattgagttttgatatgcatctggagatagaaatggacatgtatgtgtatgcatttggaaagagaaaagggtaaaaagatctgatttacagtttacacacacaatatcactcgtcttttttttgtttggttacttacctaatttataaatttttgtgcgttatttttccaaatttccctttcttttataccacgctactttttcgaattacacgtgataactagaaatctctctctcaacatgctactttttcatataacacattatttattaaaatcacatgtaattttttctaaaaacatgatttaaatgttaaaactttctcaaatctactattttatcttcgtataagcttgctcctagttcaacttttcaaatgaaacgatatttgtttatataacatgctatttgtgtaaaatgtacgttataaaatgtcatcttatttataaatatcgtgctattttaacatgtttcatgcgatttgctaaaaaacatcaaatatatttacataaacttacttttggttcaatttgcaaggatagttttgtattttcttatgccgtcatatagttatttatccatagaaaaactgacaatagttagttacttgattctttttaattttacagttagtttctaatattaccctttaaatttttatttgtttattatggtttgctattatagatattttacataggatatattagtttgagtttcggttaaagatttccgattatcatagagagaactgcaataattgttagactttagaattgatttttttttttttctttttttatttcatcaagttttacgaatacaaactgtcctttaaggaaagccaaacggaaaccattaaactcggaaaacttaaaaaataaacgcgtagcatatcactaatttaaaatgagacaacttaaaagctgtaatcattaaaggaatcattcattcattgaactaaaatagtgggattagtaagcgttatttggccatccaaaatagctaacattataatttaacaaaggattcgtgttgcgtaaagtactttcattttgtcatacggtgtttctttgttctcccttaaattatttaagttcatgagaaagaaagatatacattcagttattttggcaggtcactcgtgatggtatactaataacatgggaacaaaattcatatataaccccttatttttggtaggtcactacaaattattttatagaaggtggtgcctttttattagttgcacccacttttgtactttaaaattacgacaattaatgaatagaataaagcgatacaagatggagagactaggatatacccctacgcgtttctaatttctgcaaaatgtatgataaaaaggataaaaatgttatgttttcttctaaaataatatatagttacttgatatgaaaatttaagatgtgcatcaaagaaaaataaatcaaaagtatcgtaaacattttcattatctatcttatcaagaattcaagatcaattcaattgtttggtatgtctaaaaacaaagctacatttttattttttaaagctatatatgtagggctggctcaaaataataaaggatccatagctggaaaaaaaattagttctcatttcctgtgttttgttatgtaaatttttttttggatcgtaattgtactagatttacttaaaaaaaaagagaaattttgggtggaccctatacctcagctcttcaagcacatgtgtagagtcgagcctgtatatataattatcgggcctgtatatataattatatatctcttaagagtatatatatttgactattgagtcatatacacctatctttgttgaattcaatctaatatatttacaatctataacaattaagaaatataaatacaactacgaactatgaggagaactttatcattcaagaaagaaaaaaaaaactacgaggaggaaatgtaaataaatatacaataataatgctataatttcccttgaggtggtgggacattgagtgataacaacacactgaccgtttcatctcacaaaaagacaagtatacactgacaccaaaaaaatcacattaaaaagtagactcttttatataccaaaaaaatcacattaaatccctgcaaataaaaataaaaatatcgacatttgttttttctttacttgagagttgagatgttccaattagatcatgtgtgaattaatttctcggttcatttcgtttttctcgaaaacacaaaaaagatatttggaaaggttcatttttctttagcttttgtagtaaattttcatggaactatgtggaatataattcatagtaactgaagtacatacagtagttgttaaaaattatgtgttgtcagcaaaaaaaaaatcataactagtttatgaaattttcaatttctttgcgtcacattttttttttttttgttaaacgtcacatttttttgtgataacttttatattgttggaaagaaaattcggttagttaagtcatattgcattgttatgattatcttgtaatttgctattgtatgtaattctttcaatgtttaaatataaacgatacatggataatttaaataataatgtattttttctttttgtcgagtttcaagtaatattattgcgcaaatgtaaatagatgattgttcttttgtttgtgtaagtgagtaagatttgtagttaaaaacttaaaatgttgtgttaatgttgttgtgtggcttgctatttaaattcggacttaacgtaatgcatatacatattctaagaaaaataaaaataaaacaaaatgtgtaagtttgtaactgctaaatttactaaaatctgtctgatactcctgtctctcattctcagccgttcagtgtgagccatcttttgtacagagtacgtcgcagacttttacaagtggactattcttgcttttgttattcaatatttcaattaatacaaacgcaaaaaggctgattcaattttaattaactactagttcttaaccattaacctgattcattactgagtgacaataatgtaaacgtatgttagtaatattgtaatctcgtataatctgccaatgctaaaagcattcaacatatgatttgtttagtttgctttaatcgtagattcctatatacaactatttcgttctctttcgatataaccgtgaaatgagtcatatttgaatcgatctcgtaatttccaagaaaaaaactcctaaaatttacattattttttgtagattctaaatttatatacgtaatcacatattagaaataacggaaatgttttttttttttttttgacaaattctcgttaactcatcggcgattttattggggtgtgaaaggtccttcaccttcatatcaaagtgacatagtcacatagattcctcttttgatttgacccaaatataaaacagatggtcgaaattaaaaattcgtttcattcattagatgaccgaatattaagaacatttattgaacaacatattcctcccacgcaaagtttataagaaaataagaagtgaattatagatataatatgtgcaacttcacattttcattagttttaacacttgattttcattatgtgtaacattgtgaatgctacatgattttctataaaaaaaaattaaaaaaatacttcttctgttatccaaaaatgaaaagaaaaatgaccaactttttttcttctaaagagtcgattaatattatcaatttaattttagataagaagactatatttaatttacccctaatttatattaatctccaatttccaaacatatgagaatttccaattaatcttattttgtaaagatatatttaatttttatgaattcgtgttaaaataatttaaaaacgatacttacgtagagtataatcaagttggaataaatccttactatcaggattttttgttattattttattccattttttagttactggatgtgactataagatcatccaagaatacaaatgtttttttgggaaaaagacaaaatttgggttctaactctccataataaatgtaagtatccttttgtaagaaatggataatataggtgtcaaatttgaataattttattttcttcatttgtactcttgtcttcacagatgctatatatactcctccatttctctcggtgtgaaccttatagcaaaatctctaataattgattatatgaattaatggttaaattttatagtaattaaacttgaattaatcagtgattaatttagagattaaagaagagggtgaagttgttgttgcatggcaaaaggtcgaaagccgacgacaatgaaccggagcgatcgataccttggaagctacacttacggtgacagtcacggaaactccgttaccgacgaattagagctcggtgaggaagacatctggtcaccggccgtcattcacgacgacaccaccgagaatgaggaatcctacggcacgtggaacttacgcgctaccttgggaaaaaacgggcgcgtgggaggattgtcgctggctttcgagggctctttggttgctccgccgtcgtcttcgccgatgatagtgcagaagattcacggcggaggaggtgagggagaggaagaccggagaaaattggcgtcttcggcgccggtaaacgtaccggactggagtaagatataccgagttgactcggttgagtcaatacacgagttagacgacgaggatgacgaggatgaggaatccgggatgatgccgccgcatgagtaccttgctaagagtcaagcacggcggagtagaaagatcggaggtggtggtgcgtcggtgtttgacggcgtcggaaggactctcaaaggcagagaactaaggcgcgttcgtgacgcgatttggagccaaacagggttctacggctaagtataattaacaaaactaaaaaaaaaaacattttagatttcaattaaaattacttgtttttgccagtatagaagtaatttttgtgattatgcaaatttttaattttgagttttattatgaacgagaccaaaatttcaagttcctcgtatatgttgttgttctgtctatatgtatattataactcgaaaataattttgtcttatgttaattagtttaattagctgtagttataaattatcagtgcaacgtaagttttgagatttttaaaaaatgctagataatgttcttatttaattaatacaacatcattttcagtttagactcaagaaatacaacatcatttcattttcatttaatttatctttctaactaataatattacaatgttagagttgagtttatcaaatctcttatattgaaaatgtaagatgctactttttataaaacaaaaaaaaaaatagtagaaagcgacatatataagtagttttattcccaaatgtaatttctatgattgatatagatttataaagatcaggtgctgtcatcaaatattttaaatatttagaagttagaacggttcatactttattggtcagatttacttcaaaatgaatttaaagtataatatataaatgttaaattattaatgttcttttaagtttaactaatttaggttattgatatcatgtgaaagggaagttgtataataacaagaacagatttgtcctggaaacataatttatgtaaacagtccaaagaatccacttcaaagtgggcactcacgagcaagaagaggacactttttagaagttttatttgtctttttatcagcaaaaaccatgatggtgaatcaatggcgtagctactatttacaaagtttctttaatttttttttttttaatagaaaatcactgattaactaaatattatattttgttgttaatagacagatcataagcaaagtcgcggtaaaagataacaatacaacaaaactaaaaatgaaaataccgtttctgatattggaaacgctaatttcttatcgtttttcgattagtattattaaagcaataaaccctttatatactacaagaatataagttactaattggaagattaaccaattaactaaggattgagtcatgggtagaacatagttttgctttgtaaaatgatcatcatgcatgcagactataattgattttgtttaataatgcccacataatgcaaacaatatatcactccgtcactcttcccattcatagcctttaagtcaaatatcaccaaaaaccaaaaatgtattatgctagtagaacactaaaatatgtaagaaaattcatgatcaatattgatggaataaaaagatctataaattacagaattggacaattgcttccttcatttgtgtatatttgactaattttccttgattgaatatctttaaacattgtagtgagatgcatatataaattaatagcaatatatggtttgattatgacaagacaactgacatattaggagtattccaatcatccctataatagaaaaatgacctaaagctcaatagcctctaagtttaaatgaatcttttatgttccaaaaagaatattttaaaaaaaaactcatgaatttttgttaggtaataggagaagaagaaaattattttgtccaaaaatttgtaattcagtaacatacacaaatcgacccaacatcacttttgactaaatgactaaatgtgctacatatgcagtgtaaagtggatatttatgcttatacatattacgtgtataagtgtaggtcgatgctccaaaaccatatgatacggttacttactcctacaacgtagttttgtttatcataagtttcaagtgatttctaaatcactatatatagttgattatatggtctctccttggagcgtatttcgatgtgtaatctttctagattcaagacttaccgatcataatatatgcaaaatgcatagttagtttctttaatgtatattggaactatattaaaaattcatttcttcttttctaaacaatatttttaaaaatcgaaatgaactacgcttatcaaatattatatatcaatatctaatactgtataaatgtggaaggaaatggagtaatgggtataatagtgatcaaagagagtgacataagtttggagagtgttgtgtcaaagcatataatacaggcaaatttgtcaaaaatgttttggggtctctttggtcccttactgcatttgccatttttaaaaaaagtccctttgaaaatgagtttagagagttctcttcatacactctcatgtctcttcccaacttctattcaccgttcatttctatattttctaataataatctagaatctttttttttttttttttttgccgacaggtttctattaaaaaatacattgtttaaaaaagaaaaatgattagagatcaataacatcccacatatgacagaaaaacaccgtttaaaaaattagatgaaccttttttcttgacaagtgttaggaaggtaccatatttctagcagcagccataaagttataatttcaattttcaacatccatctgataatttagttttatatttttaaatttcaactttagccagaaaatagagatttctacaggtgaaaatacttgaattaagaaagaacaaaacgctctagaggtacttttgtagcaataatggaataacattaggtccatcaattcactattacattgtatacttgcatagttaagaaatgatatagtacatttttatagtcagatattttagtgtttgatatgattcttcataataacaatttacacgttcattgacttgatgctttatagttatcgattctcgaagaactatagttactttttaattttcaatggcttaaaaaatcagagaatatatatttgtttatctacttaatctgcatcttgtaggaaaaatttattctaaacatatactatacatccgacttaaacaataatgaaacattattctctagaatatctttacgaagagccaatggtggtcataatctaatatttgtcacctaaagtttcaacagagcttacgctacatattctatttcatttttttcaatattatttgtagaaaactttttaatattttttttcaacaaagttaatttattaaatgttgcaggtttggttgccatgacaaggcaaatatcaaagatattggtgttaagatgcgaagaacagaaatgagtttgtgcaagaatggattttacgagttcgggatttgtacctatgtctcgccggaattatatctaggaaactcaagatcaattgctctatacttgagcttttcttccggtttcagtggctaagaaaacagaagtagataacaaagttgtttataacaacgactcaaaaaacacttgcaccaactaggacaaataagacaatcaaattggaatcctcaaacatcatccaagagttcactaaatcaaaatccaagtccaactttaagactgaatgatcatagtagaagcacctacaagtgctaggtcagcaacatagacaatttgacatgtgctagttagccacgggcaatgcgagtaaatcttcttctcgagtgtaaccgcggagaacgaatttcttgaggattgcagagttttttgcaaagtacaatgcaagtttcaattcatacgatggtgtatgctttttatctctacaaactcgagcaatgacagcaaacactgaggtgcgaacgagaggaatccattcagcctcatactgctaccaagtacagtctgtaaaatacacaacacaaagatgattgaagttcagataccgttaaacacatttcacaagttttctaactaaactgaagagtttgtgcaagtttccgactttcgcaaactggaaaatgtcgttttcattctcaggttcgttctcaggagagctactagctgaaatttttttccggaagacacaatgtctctccacccattgaagtcgagacaccagctctgttcttccaatctaggcactttgctcttaagaacaagcactccttccttttgaccagaaggagacctgaatgacacgaaattatcgagttctgtctgagttgtagctgttcctccaggttttactgctgatgcagagatggcatccatgacgcaatgcgtcctctaaggccccgttattctggtttgacacaacaatgatcacaattagcaaaagccacaaaaagcaaaccatcttttactctctgtaactgtaaggaacgagataaatatcacctaaaaaccgaagaccaagattttgactttaagaatctcacgtgagatatgggctacaggatagtttccagattgacttattaggctcacttggttcagactgacaaaatatttttgcttcacctccaaggtatagatagaaagtttgattgctacggtttctcttaacatagcattgaacaagtgatcctcctggaccaggctataagaaatatcagagcaaagattattagtctgaagaagcacacaagtcagttataaagtaaaacatagaatgtgacctgtttcaaggagattggaaaagtgaatttgctagaaacctcaggaacgttaacgatctctttgaatatttgtcgccagttcttacacacacctacacaagaaacaacattcttcctagaaggccaagtgtcttcggatcgctctatcctcatcagaacatctctcagaagctcaggaggcatattagcccaacagctcagttcttaaaccattccttgagacttcccccatttttcccacaatacccaaatctcacatcgaatctctttcgagacgacatagctctaccacacttcaagcaatgctgacttttcaagaaccctaacaaggaaacaatagtaactatgagatctcaactgatccctacaacttatgaatattggaaatatggaaatgtgttcctcttctcaaggaacaagaccgattcttcggccttttaatagaaatatttggaccaaatttctccttcatattcatcctttggatttggttctatctagcatttaaggagctaattaaagacagccacttgaagttttatacaaacatatatttcgttaacctaagctcaaaaaaaaatcatgacattttttcttctgtaaatgtgtagttgtatataggattaaatataaatgaagatggagatattttttgttacttttatcaatcagccatttttttctatctatgaattcactacttataacatgcctgccacttaaagagccaatcacattgatatagttttgtataaactctttagtttcttgggtgtccatggaaaatttcaaagataccacacgaaaatttcaatttttaatatagagaaatataaaacaagaataaaatgttgctagttgttgaaatttatatttattcttggtgttatctcatatttgacttggaacatatttcactaacgtgcttaggtgtccttatgaaatccaataaatacattaaacacaccaaatctcttaactcttctaaggctatgtcctaagatttccttgttcagtacaaaaaatgggatgtctctgcatcaatctgaagaagaaggtcaagaaaccaacaccagacatcagtggagaacaaaacacagaggtaaagagcagagaaataacaccaaaagaacaacctcgtcaaagacaaccagctccaagagccaagttccagattgtggtgcaacctcataaactcccacttccacttcctcagcctcaagaaaaacaaaagctgatcaatcatcaaaaacagagcaccctgcaacaaccagaaccgatcttagggagaccatttgaagatattaaggagaagtatagtcttggtcgcgaattaggtcgtggccaattcggtataacgtatatatgtacagagatttcatcaggcaagaactttgcttgtaaatccatcttgaagagaaagctcatcagaactaaggcaagaaccttataaacactcacattttaacattactttgatttgagttttaggtttatattggtaatcctattcctcattagaccattaatcttcagaaatttgatgacatttactgtgacaggacagagaggatgtaagaagggagatacagataatgcactacttatcaggacaaccaaacattgtggaaatcaaaggagcttatgaagacagacaaagtgttcatcttgtaatggagctttgcgaaggcggtgagctttttgataagatcactaaacgaggacattactcagagaaagcagccgcggagatcattagaagtgtggttaaagttgtacagatttgtcatttcatgggtgtgattcatcgcgaccttaaacccgaaaacttcttgttgtccagtaaagatgaagcttcctcaatgctcaaggctactgattttggtgtttcagttttcatcgaagaaggtatatagccaaaataagaaatatgcaagggataaactttctttcttgcaacctaagaaatgatttctacgcgctgtttcttgctactgaagaaacgattattctgtttctgtttttgcttctttcttgaactgctatctgattttggatgtcatggttttgaatgaacctaaaagtaaaacccgagcaacattcctcgaaaaataaactcgaattcagtgactaaaccaatctgtttttttcagggaaagtgtatgaagacattgttggaagtgcatattacgttgcaccggaggttctgaagagaaactacggcaaagcaatcgatatttggagcgccggagttattctctacatccttctctgcggaaatcctccattttgggcaggtaaacttcaactgaaccactaggtttggttctgtagtttctaaagttaagttgatcttaatttttggttgtcgtgtgcagagactgataagggaatatttgaggagattttgagaggagagattgattttgagtcggaaccatggccgtcgatttcggagagtgctaaggatttggtgagaaacatgttaaagtatgatcccaagaaacggtttactgcggctcaagtcctaggtaaacgttactagtatacttggtttgtttggtttaatgtttcgaacgaaggaaattgaaccggttttggtttttctttagaacatccttggatacgagaaggtggagaagcttctgataaaccaatcgatagtgctgttttgtcgcggatgaagcaactccgagctatgaataagcttaagaagcttgcatttaaagtaagtatctttgatgtttcgttttacttgatgaaattagaccggttttgattcattaatatgatttggtttggtttaagtttatcgcgcaaaatctcaaagaagaggaactaaagggtctcaagacaatgttcgcaaacatggataccgataagagcggtacaatcacttacgacgaattgaaatccggactggaaaaactcggttcgaggttaaccgaaaccgaagttaagcagctcttggaagatgtaaggcgttttgttctctttactaacttaaactaaccggttttgatcaatttggttaatgttttttggtttaggctgatgtcgatgggaacggtactattgattacattgagttcatttcagctactatgaaccggttcagagtagaaagagaggataatttgttcaaagcttttcaacatttcgataaagataacagcgggtatgtgtcggaaaccgatatgtaccaaactgatgaaccagaattaaaccggattaataaccaaattacatgtgtttgtaggtttatttcgagacaagaattagaaacagctatgaaagagtataatatgggagatgatattatgatcaaagagattatctcagaagttgatgctgataatgtaagtcgaatatctcaatttataaaataccaaacacaatttgtttagtttaatgatagttttaaaatgttctaattcatatttttgtttgtttttaaaaaaggatggaagtataaattatcaagagttttgcaatatgatgaagagctgctcacaatcacaccaatcaaaattggttcaaccgaattaaggaccataatctccgatttaattcatttttagttcagtacataaaatttcgaatgtaatttggataaataaactgtccataatattcctcatacaatttgtttttggtccatcattggtattgtactctccgtaaaccgatttcggtttaagaattaaccgaattattttttttggcgaaaaagggttgttcgtcgtctacaactagcgattcatttctcaaaattgagtcagatagttcggtagaatcttttcaagccgtgtcatttcttgttcggtaacagttttttctcttgtcatgtatgctctgatacaccatggaagaaggttggtccagttacagaaattgtctaatttcagagtttcagttcaaaacggatctgctttgtccaattccttctcttttgctagtgttgctgatgcgacccttatagatagccttaaaggtaacaactttacagtctcttacctagttgattcattgggtttaaccacaaagctcgcagaatcgatctccaagaaagtaagcttcgaggagaggagaaatccggattctgttctgagtcttcttacaagttatgggttcacaaagtctcagatttcaagtatcattactatctacccacgattgcttgcattagatgctgagaaatccattgctcccaagcttcagtctctgcagtccagaggagcttcaagctctgagctcactcagattgtttctactgttcctaaaatcttggggaagagagggcacaaatctataactgtatactatgatttcgtcaaagacattatagaagctgataagagttctagttacgaaaagttatgtcattcttttccacagggtaacaagaagaataagatcagaaatatctctgttttgagagaattgggtgtggctcagcgtttgttattccctttgctcatctcagatggccaacctgtctgtggtaaagaaagatttgaagaatctctcaagaaggttgttgagatgggttttgatccggagactacaaagttcgttgaagctctgcgagttatttaccgtatgagtgacaaaacaatagaagaaaaagtcaatgtctacaaaaggttaggctttggtgtggctgatgtatgggcaatcttcaagaagtggccttcttttttgtcatactcagagaagaagataactcatacttttgaaacccttaagagttgtggtctgcttaaacacgaggtcctgttattgttgaagaagcatccaaaatgcatttgttcttcagagcagaagattgtgaactccatagaaacattcttaggcctaggattcagcagagatgagtttgcgatgatggtcaagcgatatcctcagtgcattgactatactgctgagacagtgaagaagaaaactgagtttattgtgaagaatatgaattggccactagaggctttggtttcgatccctcaggtatttggatacagcctggagaagagaactgtcccaaggtgtaatgtaatcaaaactctcatctcaaaaggactgatgaaagacggaagtgaagcccctccaatgtcatctgttttaacaagtaccgatcaggcgtttttaaggaggtatgtgatgaagcacgacaagttggcacctgagttgatggctatcttcactggagaaaatgggaagtgaaaagaggagcttctatatatagtcagaacacctaccacacaacaagagcatcattaaggtttgtattgttgtgttagttttagattcttccatgaatctgttgacatcaggccatgagaagtgaaaagaggagtttcatttatatatctctgatacctatttagacttttgtaatctcaatttgactcattttaatatacaatccaacattgaaaataagtagcaatacttttcaatcttttttgagtcttgaactcttttagtggcctagaaacgtggagatatgttcttctttgcattcacatgaagcacatatcttggttagtcaggtaacttacaatatattgatcaatcctaagagcaagttttcgaagatagtggtttggttccagatttgatatcataaagaactctggttatatcattccattgaggttgcagccgaggagaagaagttgttacgctccatctttacatggttcttagcgaatgtgacctttgtccctttgtataaatagcaaaagtttcagcttaccatttgtgttcctggttttgcttttggctacttcttgtaagggaagatgattctcagttacagtttcaatagcataccatattaccgtaatcttaaacgaatgactttatccattaggtcagtgcaaccgtgcaactgcaggtacagatttgtctacagttaaaaaatgttatgccaagcaaagagagagagcaaaagcaattggaaccgttagattgatatgttttaaaaacaataattagaaccctccgatcattttatatttcgttatcttataagaaaatgctgacatcagcagatcctaaaatcaatttgcctatcataatcatcataaaccctaaaaaatcgttttttttttccttctcctcaaatttgaacccttgaaagatccatcactcatcaactctttaacggcacgagtcaccactgatcgatgattgagtcttttgtcttccctgctcaacataagtttgagatttgtgctcgaattgagttagattgattggtagaattgcttcaaaaattgttattttcgggatttgtagtaatcgcattgcctgttgtcatgtatgctctgatactccatggaagaaggttggtacagttgcagaaatggtgtaactttagtctttcagtgcaaaaggcatcacctacatccaatttcttctcctctgcttctgctgcgtgtttgagtcctagagttggtcgaaaaggaaacaactttacagtctcttaccttgttgattcattgggcttaaccacaaaactcgctgaatccatttcacggaaggttagcttcgaggacaagaacaatcctgattctgttctgaatcttttgacaagtcatgggttcacaggttctcagatctccaccatcattagggattacccacagttgcttatagcagatgctgagaaatcacttggtcccaagcttcagtttttgcagtctagaggagcttcaagctctgaaatcactgagattgtttcttcagttccggaaatattgggaaagaaagggcacaaaactatcagcgtatactatgatttcatcaaagacactttgcttgagaagagttccaagaacgaaaagttatgtcattctttgccacagggtaatctggagaacaagatcagaaatgtatcggttttaagagaattgggaatgcctcacaagttgttattctccttgctcatctccgatagccaacctgtatgtggaaaagaaaaatttgaagaaaccctcaagaaagttgttgagatgggttttgatcctaccacctcaaagtttgtcgaagctctacaagttatttacaaaatgaacgagaaaacaatcgaagaaaaagtccatctctataaaagcttaggctttgatgtgggagatgtatggtcaagttttaaaaagtggccaatctcgctgagagtatcggagaagaagatgttggactccattgaaacatttcttggcctaggattcagcagagatgagtttgccaagatggtcaagcactttcctccgtgcattggattatctacagagacggtcaaaaagaaaactgagtttctggtgaagaagatgaattggccactaaaggctgttgtttcaaaccctgcggtatttggatatagcctggagaagaggattgttccaaggggtaacgtaatcaaagctctcatgtccaaaggattgatgagaaatgaactcccttcgatatcgtgtgtcctcatgtgtaccaagcaggtgtttttaaacaggtatgtggcgaatcacgtggacaagcagctggtgacggagttgatggctatctatcgtgcttcataaatttaaactctttctctctctttaaactgtaattttcccatatattactgaggtttctagccaaagagctgcaggggacatgtgaatccaaattctatgtttgttgatttcttctaaagcagagatagtttctgaattcactgtgacattgtttggatatggagttgaatgatgcaatgcagctcttgagttctacgattgatcacgtaagccttttccgttcctcaagtagtgtttgatctttattttcacttttttctttaacagttttgagataggagtacactgaatcacagctggtcataccaaaatcctcttatgataattaaaatcttgctctgtcgttgctttatatcattcatttgatttgtgagatgttttaattctcagattggtgatcttggtctttacttgctatggcgtttcatactcattttttctgagcttatggtacattgtcccacatcattaggactcataaatcatattatcatccaatccaggttggtaaaatctggaatctagctattactctagaaacttcaaagctctggatggtttgaagtttggtgagtttttgcgatggctgacgaccattggagtgaacacactcaagtttatttctctgtttgacctacaaggtaatatgctttttagtgtacacactcaagcttattactctaggtttattgaataaatcgaaggatatgatcatcgaaaccgtttcacactcaacgttgttatggggtatcattgagataatgtattgctttggttgttcattaatgtgctcactcaacgcatttgcccccaatatctctggaaactaattgtaacagaactctcttttccttttttttagtcttattgtgtttttagccatatgagatatggttcccttgtaaaaaaggcaatctacaagtttacaagggtacgttaaaagttaaaactatggtaagttcctttcatctttgaagaattcagaatctattttcataaaagtttgcacctttaacctgaatttagctatgggatgatcgaaggccatttactttacttcttagagctttgtttactcagcgatggacctgtgcaattgtgagttgctagaaatatttctcggaaaaccttattcgcagtcgtatttgtggctattcaggtcttgagaaggaaaggagaattaggaagtcagaagagatgagaaatgtttcaaaatagctctttgaaaagttgaaatatcggttgaaaatgcttggtggtttaaaggtggaggtgcaggtcctgtggctatatagagggtttaatattttggctgagggattatctattgttgagaagcttggtggttcgtatactgaaggtaaattatgatctttgtacagtttctgataccgtcatatactctcattgatgaacttattctggactgggtgctggtgatgtctaattctctgtattccggaagaggtaaaaggacttgcattttagcagaatcacggggaggaaccaaaaagcaaagctttctatggaaaaaatccaaggccttttacttttacttgttagagccagaaaaatggataagctttgtttgccctgcgtttgagggtttcttaaattgttttggatgatgaaatgaagaagtttctgttgttgcttgacattaagttctgttgtcttgttactttggtgttctaacaaaccgaccttaactcgtgcatgatatacttaacttcaatgttgtcacgacaagtccagctccggttccttggttattcaaagataactgtacacaacacacaacacacactcttcactagacataatttgtaagaaatcattactctaagaatctcctcaaatcaaaatatgactttgctctgtgatgcatttatagtctttggaaaactcagtaaaaatcttcacatctctacaatattcatggaatttataaaacactctctttgtagctgtagccaagtggtgagacctgggttcgaatcccagcagtaacattaaccttattaattttgttaaagagaataaattaaaggacgacgtataccaattggcaaatcattagggtttatgaaattttgagtgattttcagagaagtttgaggatgactgtgtgattctacttctcgaattgaaatagatagttgggtcataatcgcatatccttgtcttctgtcatgtattctctgattcgccatggaagaagtttggtcgagttacagaaatggcgtcatttgagagttttagtgcaaaaggcgtctcctttgtccaattccttctcctctgcttctgctgcgcgtttgagtcctagagttggtcgaaaaggtaagagctttacagtctcttacctcgttgattcattgggtttacccaaaaagctcgctgaatcggtctcaaggaaggttagcttcgaggacaaggacaaccctgactctgttctgaatcttttgagaagtcatgggttcactgattctcagatctccaccatcgttacggattatccacaattgcttgtagctgatgctgagaaatcacttgctcccaagcttcagtttttgcagtctagaggagcttcaagctctgagctcactgagattgtttctacagttcctaaaatcttgggaaagagaggccacaaaactatcagcgtattctatgatttcatcaaagaaactttacttgataagagttccaagtccgaaaagtcatgtcaaccttttccacagggtaatctggagaacaagatcagaaatttatctgttttgagagaattggggatgcctcacaagttgttattccccttgctcatctcttgtgacgtacctgtcttcggtaaagaaaaatttgaagaatccctcaagaaagttgttgagatgggttttgatccatccacctcaaagtttgtggaagctttgtgcgttgttcaaagattgagcgacaaaaacatagaagataaagtcaatgcgtataaaaggttaggctttgatgtggaatatgtatggacagtgttcaagaggtggccaaactttctgacacactcggagaagaagatattgaacaccattgaaacatttctaggcctagggttcagcagagatgagtttagcgtgttaattaagcgctttcctcagggcattggattatccgcggagatggttaaaaagaagactgagtttttggtaaagaagatgaattggccactaaaggctcttgtttcaaaccctgcggtgcttggatacagcctagagaagaggactgtcccaaggggtaacgtagttcaagctctcatctccaagggattgatcggaagtgaactcccttcgatatcgcgtgtcttcgtatgtaccgatcaggtgttcttaaacaggtatgtgaagaggcatgaggacaagcagctggagactgagttgatggctatctatcgtgcttcatagatcacaaggctgatcaaggattttggtttctatctttaaatatctgaaatcctcaatttagactttagttctcaatttcatatcgatccaaactgtttgtctctctctatagatgcttgaaattgtaagttttgaatccattttctgctatattactgaagttaaattccaaattctttgtgaccttgttcggatatagatttgaatgatgcaatgcagctcctgcattcttgaattggtcatgtaagccttttctatttctcagttagtgtttactttcacattattctttaaattttgggattggagtactgaaattacagctactgataccaaaatcctcttatggtacaataaagtctttgctttatatattctttgctcctgagatcctggagtcctcatgtaagctctgtctttgctttatatattctttgatcatatgattcatctgatttgtggaatgtttgtatttcagatttgtgatcttggtttttactcgtacacgttttttgtgagctttatattacattgtcttgaatatattgtcaggggcactggaaacctatcctacatcattaggacacatcaatcagataatcatccagtccaaggtggtaaaatctttatatctagcttctagctgaagaagcttgggacgttgaacgttgttttgagcttttgctatggctaacgacctctggagtgaatactcaagttttctctctttgactcgcaaggtaatatgcttattagcgttattataggtacattgagatagtataatgtgttggttgtttattaatgtgctcattcaatgcatttgctcgatatctctaggctatctatcagaactatcttttcctttacttgatcttattgagttttagacgtatgagatatggttcccttgaaagaatgcaatctacaagtttacaatggtacgtcaaaactgtgttaagtttctttcatcattgaagaattcagaatcttgtttcaacttggactcagcaaacacttttggcaattgaatctcttatttattctaggaaaattacattatcaactatttgttcgttcttgataggaacttgagggtgaatctcttggcgcagaaaaaatgtttcagagaactttttcttatagtttgtgattctcatatctttttttttcagtgatgaatccagaaactattgaagagagctattcatacagactatagagcagtcaccattgttacatcagagcagtcactaatgttgcatcagagcagtcaccaatgttgcatgttaattttgtaggatcacatttggttgacagtaaccagattacaaatgtactctggtatacatacagttggttcgtgatcaacaattgaatagtatctaaaccagaccaaaatgaatccggttctgcttggttaataataccaagtcttttaaattgatgcagaacgtgagatcctagtgaaccaaactgaaacaatatctgaagatgacaggaggcgtaatgaggctagagtatgcaatttgaggtcattcctaaatagataaagcaaatgacatttggtgaatgaagaagctctacaaccatatgttcgcaatttaaaacaaaccgatatcgtttgagatctcagaaatagtgtgatcaccttttttctcctccaatttttgaagatctcaaactttgttttgggcttgaaacataatgtccatatccgcctgccgtgatactatatgggccgagtcaggcctgtcaggcacctgactcttttgagaaaaaaaaagaatcataattgaaattcttcaaggtttactatcggtggagcaacacataaaccctaaattttgggatttagggtttcgcgatttggaagcggattcatggtgagtttcttgttattgttcgtaattccagagaaattttggtatctatgattcatgactgcgcgattcatcttctcgaattgaaacagagagtagttgggtcggaatagctttcaacactgtagcatttgtagcattgtcttttgtaatgtattctctgattctccatggaagaaggttggtccaatcgcagaaatgcttgagtttgagtgtttcagtgcaaaatgcatttgttttgtccaattccttctcttctgctagagctgctgatgtgagcattagagatggtcgaaaagggaagaactttacagtctcttacctcgttgattcattgggtttatctaaaaagctcgctgaatccatctcaaggaaagttagctttgaggacaaggtcaatcctgattctgttctaagtctgtttagaagttacgggttcacagattctcagatctctaccatcattacggattatccgttattgcttgtagcagatgctaagaaagcacttggtcgcaagcttcagattctgcagtctagaggagcttcaagctctgagatcactgagattgtttctacagtaccgagaatcttaggaaagaaatctattactgtatactatgatgctgtcaaagacattatagtagccgatacgagttcgagttatgaactcccacagggttctcaggggaataaaatccgaaatgtatcggctttgagagaattaggcatgccttctcggttgttattacccttgctcgtctccaaatcgcagcctgtgtgtggaaaagaaaattttgatgcatcccttaagaaggttgttgagatggggtttgatcccaccaccactaaatttgttttagctttgcggatgctttaccaaatgagcgagaaaacgattgaagaaaaagttgtagtctttagaagtttaggttttactgtggatgatgtatgggaaattttcaagaagactccttctgttttgaaagtctccaagaagaagatattgaagtcggctgaaacgtttctagacctaggatatagcagagctgagtttctgatgatggttaagcgttatcctccttgcattgaatattctgtagagtctgttaaaaagaagaatgagtttctggtgaagaagatgaaatggccacgaaacgccttggttttgcaccctcaggtgtttggatacagcatggagaagaggattataccaaggtgtaacatactcgaagctctcttgtcgaaaggactgctcagaaagggaagtgaactacctgcagtgtcctctgttttgtcgtgtaccgatgaaggatttttagacaggtatgtgatgaagcacaacgagctggtgcctacgttgatggctatattcaccaaaggtagtgtttcatagatcagaaggcacacctacaacaatgagcagtgccaaggtttgttcttattttgttgttgtcagttttagatttctagatgaatcttatgatgtgataatggaaaaacgaaagaaaagcttttgttaaagtatctatgagtgaattcatgatatgtcaaaaatgttgcatggatacattggctctttagtacttgttacgagctgctaagagagtcgtgtcaagttcaatacttttccttgtcatttccataattgcttgtctgtttggattctattgtgcggaagttatgatttatattttcagattcatattttcacttaggaagctttagttggaatcaaagtggatgactctgattgaggatttcaatgatcgttgttagaacctttcttgtagttggtggattgtatcaaaattgatatgttcttaacttctggattgagagtcagaagttggaaaaatgaattcaattcatttgtattaagaggttttcgaataagagatcacagttatagtatagtattaattggatatcacaatctattcataatattagctagttagataaaattgtgtttgatcttggcaagaggtgttaaaatagtatcatgttgacatgttggtatgactattagtcgtaatttaagtttatgtatatttcttgtaagaaatgtccatgtatcataataaatacaagtgtatcgagtttttgtatatatagaggtctatgacttgggaagaagaacacaacacaactcaccacaaacacaatctaatccaaaaaatcaaaagatgaatgccacaaagtttgttgtgcttctcgtgattggcattttgtgtgccattgtcaccgcaaggcaggtcaaagatttgtccacggagaccaaattaggggcctctcttccaaaaactactaccaaaggcattggagctcagctttctgcaactggcacaacttacagcaccagcagtgtcgttagctatgctaatggttttaacaatcccaaaggtccaggggccaattcattcgaaagtgccaacacatttaccagcggacaagtcactgccaagggtcgcaaggcaagagtttcttctacaagtgcttctgccgctgaaggcgatgctgcagctgcagtgactcgcaaagctgctgctgcacgtgcaaacggtaaggtagcttccgcatcaagggtgaagggttcctctgagaagaagaagggcaaaggaaaaaaggattgagcgtgaggtgctctcatattctcatgcatgcgtattcctcaaacctatatattaataatatcctaaaaactacaaactcacaatctctatcttgttcataaataaaaccagagattgtcacctctatatattattatgaaatgctactctttctcatgtaatggcttttttaaaaataaaataaatgcaataaatcttatactaatcttcctcagtaatgttaaatatatatatagaacacttaatattcttgtcaagaacatgatgactctcagtaacaacagaggtttaaatttaatcactcactaccaaagagaaaaatggttgaaactggtaacaagctaaggtttcttcttcatcttcgtatgcacgtaaagacttgggatttttttaaagtatttcttcctgaatatagttgtcatgaaatggtaatgtttcgttatctctgtttcttctattcacatcaaaaataaatttcaaattttatatatcaaaatagatctgcatgtggttcctccagattttattgacatcttagagaagccattaccaatgaagctgcctcaaagggagggtcttaagctgcagcgaatcgcaaagctgctgctgcttctgcaggtggtgccacaggttccgaatccagggtaaagggttcctctgagaagaagaagggcaaaggaaaaaaggattgagagtgaggtcatctcatggttattgtacaaacctatatattaataatatcctacaaactacaaactcacaatctctttcttgatcataaataaaaccagagattgtcacctttacttatcatgaaatgctactactatctttctgtaatggctattgatgatatataaatgatagcaaaatttataatattctgaatgatacattatatcttctctttattgattctcaaatatccaccgaccacaagcattgcttatagcattctttgtacattctcatacaagtggataagagttccgagtatgaaaagctatgtcattctttgccacagggtagtaagcaggtgatcaaaaccagaaatttattggttttgagagaattgggaatgcctcagaagttgttgttccccttgctcatctagcggaaaaatttgaagaatcactcaagaaggttgttgagattggttttgatccgaccactttaaagtttgtcaaacctctccacgtcttttaccaaatgagcgacaaaaaaattgaagaaaaggttaggctttgctgtgggaaatcttcaacaagtggccttgctctttgaaattctcagaggaaaagataagtcagacgattgaaaccttgaagatatgtggtttgaacgaaaacgaagtccttcaagtgttgaagaagtatccgcatttcatacgtattttgttaaaattgcatcatcttcgtttgtttcattccattgactttaatgttcttttgaacaattattaactatgtgttttgctatttatcatctaatatagatgtcatgttttatattatctcaattgttcatgtccataattttaggaagtttgactgtttgagtgatgctcctgtcattagcatcactcaagagattatgaattctctccaaattttgatttttgtgaatgtccaaattttgattgtagtacatgtgaccgttgggttagaaagttggaaacaatgcacaaaaataatggttataatgaaccaaaaagtaaaccaattaaatcaatatttgatttgtccttaaaccggtccagaactaaaaccctaaaaatcttatctttcctctccgatattggatctgtgcagtaattttactaatcgatttcgtgttcttcgttgcttagtaagaaagtagaaagtttctgagaatctcgggcacgaattgaatcagataattcgctagaatcggtttaacgctttaaaggcaatcgctttgcattctcatgaattctcttatactcggtgctgctagaaggttcgtggggttgcatttgagagtttcagtgaaccttttgcaaaatgaatctttctcttcgtattcgttctcttctgctagtgctgctgatgtgagccctaaaggggagacctttaaatcctcgtccttccttgattcactgcgtttagctacaaaactcactgacaagggaaattctgattccgttctggatcttctcagaagttatgggttcactgattctcagatctccagcatcatcaggagtgattcaagagtgcttatagacaatgatgcgacatcccttggttcaaagcttcagtttttgcagtccagaggagcttcaagctctgagctcactgaggttgtttccacagttcctaaaatcttggggaagagagagggcaaatctctcagcagatattatgatttcatcaaagtcattatagaagctgataagagttccaagtatgaaaagatatctcattctttggcacagggtaacaagatcagaaatatcttggttttgagagaactaggcgtgcctcaaaagcggttactgcttttgctcatctccaaatcgcagcctgtttgtggaaaagaaaagtttgatgcatcactcaagaaggtagttgagatgggttttgatccaaccacctcaacgtttgtgcacgctttgcatatgctttaccaaatgagcgacaaaacgattgaagaaaaaatccgagtctatagaagtgtaggtttctctgttgatgatgtatgggcaatgttcaagaagtggccacgctctttgacacattcggagaagaaggtagccaactctatagaaacatttctaggtctaggattcagcagagatgtgtttatgatgatgttcaagcggtttcctccgtgtattggatattctacagaggcggtgaagaagaagactgagtttttggtcaaggagatgaattggccagtaaaggctgtggcttcaatccctcaggtacttggatacagcctagagaagaggactgtcccaaggtgtaatgttatcaaagttctcatgtcaaaaggattgcttgaaagtgaactccctccaatgtcttctgttttgacaagtactagtgagtcgtttttaaatttgtatgttagcaaacatgatgacaagcagcttgtggctgagctgatggcaatcttcaccggaaatcgtgtttcactcaccgatcagaaggcacgcctagaacaatgagcaacgttaaggattgttttttgttttctgttaggtttagattcattagtgagtcttgttgcttgacttttggaagtagataatagattttgtgtatgagtgtctaagcctttgaccctgaaggatgatgaatcagtcttgtatgaaaaaaatctttacaattatctttctttgtcttgttgatatgaattatggttaagatctttgtgatgtgctttgttctgttttggaaattaaacagagcatatgatatatttcattttactagtttcgtggcagaaatctttcctgtttcgcaggatttggtagacaactctgaggagtaagatccactcgcaaacgatggaacggtttattcaaattcctagtttgctttttctacttgagtccttaagtttgtattagagtcttcagtatacttcataccttcttgttcaacccaattccaactcttcagtctctgctacatcttcaaactccatcaagcctcaaactaataatctttcaagtgagattataaatcttcaagcttcttggattggatatatcaatagactataaaagctagtagaaaagagtagaaaagctagttgaggatttataataaggtaaataagtagaaaagacttttatagtctattgatatatccaatccatttacttgatccatctctgtatgcaatctgactgacaaattgtaattgttaaactcttttttactagctttttttaactcttcaacattaaaagtctagaaacagaagacaactatttactacatgatatttttggttatttgttaacaagaagcactgtggtaaagcagccgaggatgaataattttagtgtttgtttgatgagtgttaatcttcatggaatccataaccacaaagatttggttgatccatctatataaagcaaataggtgtagttaatcaattcaaggtcttttagtgttatcccttgccaaggagggcaacactagagtctagagtttcgttttccacttgagtccttctgttggagacagtgtcttcattacacttcctaaccgattccaaagcttcaaatttcatcaaacctgcaacataatgatgacttcacaatggtgtcgagtgagctccattaaaacatgtataggcctaggattcagcataatgatgatcaagcgctatcttgagtgcattgtaatttgatgaaagaagttgacttgaccagtggcaactagaggctggagaagaggattgtcccaagttataacctaatcaaagctggtacgtctcgaagcatgatgataagctggtattggagattactgtttttgctccaaggaatgtcatatcaagaaactgtgcattgttcttgtacctcgctagcatcttcctttgttggttacatggtttgctattccaaccaagctctggtactataaggcaaaaggaaaggagaaggagaccattaactagtctatattacaacaatacattatatgtttcgtggatatctctttttcttatcttctctgctgttttcctttcttttgtaaagattgttctttgaacatgaatcaatacactttagaatctattaagatagcaaataagttgatgcaaagagcaagtgtgagatggataattgaacgggagtgaatgaacctgtcactagatctctaatggttgttgttacctcctggctcctcctcagctgcctaaactgcgtttagctcggccgcctatcactttttttttgtgtgtaggtttgattggtctctctcattcagaatcatatgatcaatttgttttcaagttttgcaatgtttttgaaaacattacatttacgctaattggatttttaaactcgataaccgtgattacaaatagagacgtaatattttttagattatttctcatgtttttttgtgatttgttcatcttatgcataatttatttttcacttatgttcaacaatagtatacaaaaatttagaaatgctcatcatatataaaatcacttttgacgttctgaggctccaatctattaaaaataaacgatatagatgataatatatacgtcttttaatcaagtgaatgaatatttagtttttttttttttaataggcttcactttgtttcttactcagtttaatttttatttggtttttataaaattacaacttagttttaatcaaaggttctaaattaaatttgaccaaaaacataaaaaaataattacgtaagagcttttttggcagaaaataatttagagtaattatttattccttcgacgttaaaaaagaataggaaaaaatatgtttaaattgcatcattcgaccaataagattagaactcatcctttttttttttaaggatatatagaattcatcactgaatacatgtttttatcccaaattaacgcaaaagagagaactcgagatctgggcatagcgactcactcagatctatacaccttcttcttcttcttcttcttcctcttcctcttcgcttcgttcgtaaactcatctgatctgtggtaaccaccattgttcctctccttacgatttcgaatttctgttttgatctcactaccattgttgcaatttagatctatttctaattgttcgtgattcgcttttttttttctgtgatctggtttttgtagagtgccattatcgttgagagattatgttgacaaagttcgaaaccaaaagtaacagagttaagggactgagttttcaccctaaacgaccatggattctcgcgagtttgcacagtggcgtgatccagctctgggattatcgtatgggtactttgatcgatagattcgacgaacacgaaggacctgttcgtggtgttcatttccacaattctcagcctctcttcgtctccggaggtatatataattcggaatcattgttagtgaaatcgtataagctcaaaagaatggatctatacatgatttgttgcattacaatgatgttgatcttgatattgcaggggatgattacaagattaaagtgtggaactacaaaaaccacaggtgccttttcactcttctagggcatcttgattatatccgcacggttcagttccatcatgagtacccatggattgtgagtgcaagtgatgatcaaactatccgtatatggaactggcaatcacggacttgtgtttctgtattgactggtcacaatcattatgttatgtgtgcttctttccatccgaaagaagacctcgtcgtatcagcttcgttagatcagactgttcgtgtttgggatattggtgctcttaggaagaagactgtatctcctgctgatgatatcatgaggttgactcagatgaatagtgatctttttggtggagttgatgccattgtcaagtacgttcttgaaggtcatgatagaggtgtaaactgggctgcttttcatcccaccctgcctcttattgtctcgggtgcagatgaccgccaagtaaagctgtggcgtatgaatggtaattatttggtggtatacttttgtgcttacaatttttatatgctatcaatcgtcaatgatgttactgatatgaaaatattctgcatgccttaatccttagatgaatctcgaaattgcaaagacgagttggtaacatgtttttaacgatatcattgcagaaactaaagcttgggaggtggatacattgcgaggccatatgaataacgtttcatctgttatgttccatgcaaaacaggacataattgtatcaaactctgaagataagagcatccgtgtctgggatgctaccaagcgaactggacttcagactttccgtcgtgaacatgatagattctggattcttgcagttcaccctgagatgaatctactagcagcaggacatgacagtggcatgattgtgttcaagcttgagagagaacgtcctgcatttgctttgagtggggattctttgttctatgccaaggatagattcttgcggtactatgaatattcaactcaaagggattcccaagttatccctatacggcgtccgggtactccaagcttgaatcaaagtcctaggactctatcatacagtcccactgaaaatgcagttttgatctgctcagatctggatggtggttcgtatgagttgtacatcataccgaaagatagtgttggcaggagtgacgttgtgcaagatgcaaagagagggacaggtggctctgcagtattcattgcccgtaaccgatttgctgttctcgagaaaagcaccagccaagtgctagtcaagaatctaaagaatgaggtggttaaaaagagtcctctgcctattcccacagatgctatcttttatgctgggactgggaatttgctttgtagatctgaggataaagtagttatctttgacctccagcaaaggcttgttcttggtgagcttcagacaccatttgttaggtacgttgtttggtccagtgatatggagagtgttgctttgctcagcaaacatactatcattatcgcgagcaaaaaacttgttctccagtgcacgcttcatgagacgatacgtgtgaaaagtggagcttgggacgataatggtgtcttcatttacacaactttgaatcatatcaagtactgtcttcctaatggagatagtggaatcatccgaaccctggatgtcccaatctatatcaccaaggtgtctggtaatacaatcttttgcttggatcgggatggcaaaaacaaggctatcaccattaatgcaaccgagtacattttcaagctttcactgctgaggaagagatatgatcatgtcatgagcatgataaagaactctcagctatgtggacaggctatgattgcttacctgcagcagaaaggattccctgaagttgccctccattttgttgaagatgagaggatccgattcaatctggctcttgaaagtggcaacatcagtgtggctgttgcatccgctacacagattaacgagaaagaccactggtatagacttggagtggaggctcttcgccaaggtaattctggaattgttgagtttgcataccagcagacaaagaactttgagaggttatcttttctttatctcattactggaaatttggacaagctttcaaagttgatgaagattgcagaagtgaagaacaacgtaatgggacagtttcacaatgctctctacctaggagatgttaaagagcgtgttaagatactggagaatgctggtcatttgcctctagcttatatcacagcttcggttcatggtttaaatgacattgctgagcgactggcaactgagttaggagacaacgtgccctcattgcctgaaggaaaaactccatcgcttctaatgccaccgacacccatcatgtgtggtggtgattggcctcttcttagagtgatgaaaggaatatttgaaggaggacttgagagtgcagacagaggaggtactgttgatgaagaagatgttgaaggggattggggtgaggaacttgacattaatgttgatggaatggagaacagagatattgaagacattttggcggctgcagaagcaggtgaagaagaaaacgatgaggaaggtggatggggacttgaagacttggtgctcccaccagagcttgacactcctaaagcctctgctaatgcacgttcatctgtttttgtgacacctccccaaggtatgcccgtaagtcagagctggagccagaaatcttctcttgctgctgagcaagccgcagcgggaagcttcgacactgcaatgcgtctgctccacagacagcttggtatcaagaactttacacctttgaaatcgatgtttctagatctgttcaatggcagccatagctatctgcgtgctttttcttcatgtcctgtggttccacttgccattgagcgtggatggagcgagtcttccagtcccaacgtccgtagcccaccagctcttgtttatgatttctctcagctagacgagaagctcaaatccggctacaaagctacaacaactgggaaattcactgaggctctccgtctcttcctttctatcctgcacaccatccctctagtggtagtcgagacaagaagagaagtggatgaggtcaaggaattaatcgttatcgttaaagaatatgtccttggtcttcaaatggagctcaagaggagagagatgaaagatgatccggtgaggcagcaagagctcgctgcttacttcactcactgcaacctccaaacacctcacttacggcttgcgctgcttagtgcaatgggtgtctgctacaaggcaaagaacctcgccactgcttctaatttcgccagaagactgttggaaacaagcccagttgatagccaagccaagatggctagacaagttgtgcaagccgctgaacgtaacatgaccgatgaaacaaagcttaactacgacttcaggaacccttttgtggtatgtggttccacatatgtcccgatctacagaggacagaaagacgtctcatgtccttactgcaccgcccggtttgtaccaaaccaggaaggaaacatctgcacggtctgtgatctagcagtgattggcgcagacgcatctggtttgttatgctctccatctcaagtccggtgatcaatttcagatttcataatcaatacagagatgctctattaacagaataagagtgttgaacttttggtgtttttgtgattgtgtacttaccaatcaggtttgaggatttttctcgttgcaggtttttattactcttttaaaagttgtttcttatcttttagtacacatgagaactttagcttcttgctttataatttctctttttgatgcatagtagcactggataacttgtaatttcaatttcggaaattatggtttacttgtgaaattatgattttataaattctccaaatttttgaattttgtgagtgtcgttcctaattacaaatttatctacaacgaaatgtaccgataaagtccaatgtatttttttaattgaaccgatagtaaaccaaattgtttagtcaactaactgtagttctagggaaagataacactgtaacatgttgattgctaaatagttttttctccttgcatgttttatcaatcgagcttttataaaaagattgatccgacagaacccgacgcaactaaaccgatagtaacacaaaaacagagacacatcagagaacactaatctctacgtcagtgctgagaactcataatttccgtagcctctccgttgtagatattcgcgatgaccagctgtgttcacctttgtagacaaaaaataaccaacacaagatgtggaacaaaattttgaaccagacgactccaaaactattttgtgtggacaacgcttcttgcaatgagagcaaataggtcgagtcatatgatgatcgttggcccgaacatatatcttctctccattgaaggagaagcttatccaagatgaaccaggcttcacgtataaatcctgcccaagcagacattcaatgtgtagggtgacgcaacagtactcaccacacgtataaaaccgctcctttgggtctatctcttgctcgcaaatatcacaccaataagtcgtgatgcatgtctcctcgccataagaaagagtgagcatatgtttatcatgctcataccttacctcttgaggtaaagtggcgcatccaaaacacaaagcaaagtagtcacactcaatgcaattgaatgtttcgtttgttgaaaactgttctaactttttgcaaacggaacatcttctttgctcttctggtttcgatgttaggaataaagaatgttcatgacttttatggactaatggctcagacattgtggcgcactgcacatgtagcttgaaaagatattcatctttatcctgttgttcacactcatagaagaaaccggctttgcacttccaaggacaagctgaacatggatcaacactatgttccacaagaccccgagatcctactttgagagtgagcatatgtggatgtatcggatgatgcattttgcgagagagatttgcacatttttcgtggagaatataatcacattgcatacatgaatagaagttaccggaatagattggcatgatgcatgcttgacacaacttattcacgtcgtaatctctacccgtgttctcatcaagtctcaaatgatgatgttgatgactaaaatgctcgatgattcgatcacttatcctcacaaacggcggttcaactttttcatcttcttctagtattccctcaagttctttaccgtcccacacgttcttttgtgtggcacattttgaatgagccacatatgaacaaccttccttgatgcaagaataaccaccgtaatcattgtcgatctttctacgacaaacacaacaagaccaatctccttgaccaaaagaatggttaaaagagatacgatgaggatggcgagatatccttatgacacgcggtaagctgatacacctttgatgagccacaaagtcacaagggggacatatatagaaaggacagcttgtatgtgtcaacgaacataggctgcaagcaaagggagtctgtcttggaaacagagcaagagtatgctcatgccatttggaatggtctatagaatagaccggaggtttctccacacaagctatgttcatagcatagtcgcaagctgagcaataataaaatatctcttgaagacttacatcacaacaatagcactgcctcgtttcattagactttcgcaacaaagcaagccgaagagaatgtcttggatgaagagggtgtttgatctcaactggagccttgttgttttcgttatggttcttgccgttgcaacctcggcagaaaaaatgggtagcatcttgttctggtgacctgaacttcagccagaataaagggaaacaacaccacttgtcattggtttcccacacgaattcttcatccacgtgtaatataccattttccaatcttacggctacttgaggacataaggaaataagtttcttccactttggatccatagagatgacgagggagactattttacggatgagtgatataagctctggctctggctcaagacttaatgttttaccaaagagtggcaagacctccaaatcctgctccaacaagggatcaacatagtagtcgagatctgcttttttagcgataaatgatatgagcttccttagcggctccggctgggaatccaaatccatagagttgtagaaagatatggtttgagtaataagtaacatgagctccgactccgccttctgctgcgttagtaacatagcatattcgcagaatgtgttactaacgtagcttatctcaataacgcgtgcaatgatctccgtattcgcatccccattatccacttcccaagggtcgtcgatagagattagttgagaaatggctgatatgacctccccctcaaaatccatagtgttgtacagagagtagtatgagtaagaaaaaaatatgagagatattgagtatgatctatgtgagtttttttaaatttttttcttatggttagctagggctagataattgagaggttataagaagatggataaagtttggagttcgtagttgagtggtggttgctaggacacgagtgcttgtgttagttgtgaataaatttaatgttagcaccagcctattcagatacaaccctacaaattcaatgcattgtatctaacaatgttttactttttcccaactaattgttcctttgttaaacttcacaggtatccaatcatgcatgttctcttcaccactgatcttattttaagtttggaaagtccaaatgcgtagaaaaagactttaagagagataaagaacatgagtcagagcaacaaaaaaaaaaaaaaccagaaacaaaaattcgaagaccagtaagtaatttattttaaagtcctaaaaaaaacattatctcattcaatgttacaaaccaaaaaccaaaaaaagttctctgtagaatcgaacttaggtacttgtgattgccgagataggtgtccgctagctttttgtatgaacacttgtgtactcaaattaaggtctatgtgagaattcgtagtgcatatataatcaaattaactcatgttttcatcctgtgaaaaaaataaaaaaagtaattataacggttaaaaaacacatttaattacaaatacgtaagtttacagcagtgttatacactttcttaaaaatacctacatgtagatacattgccgattaaaaaaattatacatgcagatacatatcagatttggaagtgataggatcaaatacaaagaaaagaaaacaagaacacacaaaggtaacataggacaaagctactttttacgtaccaaagaattatgctgcacttttagtagttgggacggtgtcgaagtcgtttctcttgtaaccccacatgtagcaatcattcccttgattttagatacatcctcctttcgttttcgccaatcttttgccgatgttctaggcaaaactattgaaagaagattcaagcatacccttaatgaataactttacttctccacgaaaagaagcattagacgttgttgctgctcgctgatatagcaaagttctttttcatgcctctgcaccatgatcaatttgcttcttcttccttttcctcaaacctaagacttgcacattttcagattgttttggatacttcttttccaaaacaataaaaaaaaaagattagttaatacagagtaaattcgaaaaatactctaataccaaacagatagctataagaaattatacatatggcaataggtttatattacgtgtgacaacagcatgaatttgttttttttttgggtttaaacaacaacatgaactttaaaactatatactctcttgtcaagttcctatgagctacatcagattattccaactaaaaagtatgaatattagtttccgtgtgtgttagtcagaccaaacacacctctttctaacaagaagaatccagcaacacatacatgattatgtatatcttctttacaagtgatacttttgtaaaatataattaccttagtctatgtcatcaaaactagaaaatggaattaaaaaagaagctacaacacgttttgaagatataatgaaaggatgtggtaaactaagttttgcctaattattaatgattttagtttgcaattttttcttctcccgattgaacaaccagtcagatagcttcattctagtttgaatgcttggttgaaaaaataaaagaagttgaagataaaaaaatattcagagaaagtgaagtggttttaatggagaggaaagaaattaaagaagagaaagagagagcaaccatattgtttttggttacatttcgtttgtcctataagagacagagctcttatttccattcatttatttccacatgctctctctttttccttctcattaaattcttctttctgttttgtagttttttttgttttttttactttcctattaatatttgtatactattaatagatatggtaaattttcgaattaaataatcaatttggaagttttaccgttgttgaacatcaatgatcgaatatgaggtcactgtatgtaattttgtttttgtcaaacaatttcaaatactcttccaagatgaagcaagatgtggtgttagattcgtttactcattaaggatgataaatttacaaactgtaaatgtcttttgttggacaagatcatgtagtggatatatatagatttgtcaataattgagagtagagctatctcatttaatacgtcctcgccaaaacaatttaaggttttggtcctaaactcgtgggtattctgtgagatgtgtaattaagatctgcgaccacttcgcaggtttttggttggttatgcatatctgttcacatatttgaacaatatacatatataaatgtatatgtagagatgtattatatgttttgacattcggttatactttaatattttaaagaaaaataaacttctgattcacatatataataataaaaatttaagtacttttcttattattgtttttcttttttgttaattcgatcttatacttcacgtggaaattctttgatcgtctggttagttcatggtttaatctcttaacaccaaatttggatttgatttcataaaatgcaaaattttaggtgtagaatttactagaggttcctacagattgcatgtagaactatccatcattatatttatactatgtatcatgggtgaaatgtaagtagaattgtcttttgaaaatttttgtattgcgaggagaggtgtctacggtaaaatcgtctgttaaaacgttcatcatataattgcatatgacacattgagttaaatttggtctataggttattctatgtaaatacaacaagatcaaaatatatttgagaaaatgatgtaattgacgagttatgtctaatccgcgggataacgaacatcatcgacaccttcaatttcgtgatagaataaaaatataaacaaattaattaaaagttcagaatatacacaatattataaacaattcagtcagacatctttacattaatgagtgagtgagtgacataaatcatctatacaaaaaagagagaagaaactaccctttataacattgggctacagttttttgtaatgaattcattatcgctaatagtagtatcttctcacgaatgtatatgaattttcttctttttttctgtcttttttcttgttactatcctaacttcagagcctgcagaagataaacatgaaaacaaaactacttaaaaaaaactctttaaaataattttaaattgtccttctcttttagaaaactaattaataaaattatatagaaatataacataagtaagagcgtgatcctcgacgatagacattgataatacctcatctctgtaaatataaaactatgcataagagaattgatatagattcataccttgattgatcacatcaactaacatagaatctttaaactatttaaacgcgtgatattggcacggctcaatcaaataaaccgatctttaaaacaaaagagtacggttttctgattgaaccgcaccaatatctcgtatttgatgtccgatagtgcgctcatcgactcttcagttgcttattacaccaaactccatccacatattaaagaaaaacaaaacaaaaggaaaccaaataagtcaaagcaagtaaatgattggaacaaattgataggtaagttactagagacaggtacttaccgttaaaccagtttagaaaacacggttctttttttagcagatatgaaaatgagaaagagacaacatgagctatttcaatgttttttcttgggtttgcagagtgaaggagatataaatacgaagagggtgatgaagaaatgacagaggaaaacaagcattgaattaggccaacaacccccacaacaaaaaggaagttggttgtattaaatttgaaaaatatgtttgtttaagaaatagtgaaatacttttcgaaataataaatatcaaacaaaatatttaggtcgtccgttacaaaaaaaaaacaaaaaaaaaaacattgaaccacttttaagaatttcatgatgattgcttgctagttcttgtttattaaaaagtccataagaaacagctaaaccattatagacgtttctctcttaaaaaaaaaacaaaatatacgacaaaatatatcataatgattttcttataagccatgaaaaagttactattttgtgatggatattctctttgagtctatgattacaaatttatcgcatacttctaacacaaaaaaatacgtcacaatttttgttaggtggaaaacgtgagaatgtgttaaaaatacgttatttttgcgattttagttttcatttgtttaactttatttataattggattccatcctcatgaaacttgtgaggcaatatttataaataatattattacatcttgcatcttgcatgtattatgaattatatatatgctcttgatctctctcctgacctacgtaacgcctcgacggggaaatcggaacaataactacatgatatgttcatgcataagcttgcttggtctacgcattgttcttaaatctgtttgatgtcactatgtcacacatgacacgtccatatctttgatttactattttaactctaaaacgttaacatagaagttgaaaaagtagtcagttgatatttgataagaaaaacagcatttataaatctcataacgatattcaagaggaacgtaaaatttactcaattaggtagctttcatctccaagtatatacacatgggtctatgaatagtgcatgtacatgtagtatatgtacatgtgactttttatgtagagaggtttgtagaataaaatgaaataaaggaacaaggaatgccatagagctttcaaaatcggtatttatgaggacttgtatgagagacaaaggcatgttggtgggctctgctactcccaacatctatttgaattttgaaactaatttggtggtttcatttttgaaatacatctatacttccctcttaattttacctagtaaagtttctaggcctgggatttcggctaaacccgaggaaatcgaatgtttcggttctcggcgcagagagataaagagaaggcaaaccgttcggcaaaaataatattgtgattcggattacggttcggttcggttcggcaagctaaaccgatcggttttctcggtttagaggtacaccctataaaatagaagaaaccctagatctatgtcaacaattcatgtcgtctccttccttttctaatcttaaactcttctcctcaagatccttctttgatcttcttctccttcttcagtcttcttcttcttcgttctcagcttatcatattcgtttactgctgtgaaaccaacactctctggcatcaatccaatttttttttttttctcaccgccgcgacatcaaatctctcgtctagttgccggtggtggcaaacatagacatctgcactatgtaggaattacagatctagtcaagccgctaattattctttctttccctttgaaagtcggacgcgcatgagtgaacggcgtctccgtcaccgtcatcattcttcacttgtcaaaaacctagatttcagatgggcttgggcatgttgtttattttggacttggacttttattagatttagcccattattaatttattattgttggtttataattgtaaatttaataattgagcccataattttaattttggtctaattcggtttgaattaaccgatttagaaaaagggtcggtttagttcggaattgattttaatccctgtaaccgaaccgaaaaaaccgagtaccaaaccgacccgaaccgaaatttaattcggtccaattcggcagaatttttaaaaccccaaaaaccgatttaaccgacccgattaaaccgacaaaaccgaactcccaggcctaaaagtttctatgaaaatccactactaaattaaaaaaaaaaaaaagaaaaggaaagacaaatgttaaattgcatcaaccaataaaaataaagtttttgttttcacattttctgtaccaagcatattaaagtgtagactttaaatggttgcatgcgacctaattcgtaaacaaaaaaaaaatcgtataaattttttgttttgtatcttgtaaaataaaataaatcaaccaaattaatgagtcaagacaaaaaagttcaacgagaaccgaatgttattctaaaccaaaccataatccggtacaaatttccggttctgcagcaggacaaatggcaacaaaggaaagtaacgatgataagtttgatcgaaagtttcagacttcaataagttttcagtttcgtgcatagattaggaatctcgaaaccctaattctgttttctacacgaaacccatcaaaatcgaattttgatcgtttctaatttctgccatttgattctcttcatcagtcacatttaggggaaacgagaagccctaatctttggtatgttgctccctctgatttcgcagtttctgggtttttgttttcctctgcgaaatccctaattgaatatcagatttcatagattgtgttgattgattttggtgttttaatttcagattctttaatcgccatggctaatagctctttcaagttggaacacccactaggtaaaaactaaaactttctgggttttgttagtggatcactagaaattatggatctttgattgttacccttttaaaagagacgattttgaatggattgttagagactttgatatacgatcgatcaaatctcttatgtttctaatgattgatcagttcactgatgttctttcaccattatttgggggttttggtaatggcagagaggagacaaattgaatcttctcgcatcagggagaagtatccagacagaattccagtaatgttttccagcatttatgtacctctctgtgtaaattcttgcatgtagctttgcttttgtaacagaggtagttcatggtgtaggtgatcgtagagagagctgaaagaagtgatgttcccaatatcgacaagaagaagtgagtaatgagtagtgatattctgttcctgctgttctttcttgttggcaacttatgagttctacacatcttttgtttacttgataatctaacaagaaagagtgtgccttgctttgaacattatcttgaagaactttatctatgtgtagtattacggaatgagattgatcttctattgaagactaaaagagtcttatatcagggaaatgtgttgatctgtgactctttggttgttggattcaggtaccttgttccagctgatctaactgttgggcaatttgtgtatgttgtccgtaaaagaatcaagctgagtgccgaaaaggctatcttcgtctttgtgaagaacacattgcctccaactggtaaacacacaacttcttagcataaaagctggtttatgttaatttcgctctcatgaaatccgctgctaacttagtactgtaatctacgcatacacttctctgcaaattcgaaacaatgataaaagatttctttattgatgtttttgcagctgcaatgatgtctgcaatctatgatgagaacaaagacgaagatgggtttctctacatgacttacagtggagagaacacctttggtttggtttaaatgtgtgccttccaatgcttttgtgctgatgtgtatattatatgctcttttataacactatgaatatgcaaaagttatatgtactactattaatgtaaatgttgctttgaatttaagttgttagtttgggttttacttttggacacacaacttgtgtcatccaactattattaattctcttttaccattttttgatcatctattaatatttaggcaatatatttgtggtaaaaaagacatctactaaataagtagtgtatctttggtgttatttaaaatgaattaagttctcttacaatgtcattcatgtttttgcaaacactgaggttgaatttgactatctggattctggtgcgtacatgtttttttttttttttagttagcaaatctagtgtgacgtgtgtggtaaacaatttgtgagaaaagaaacaactaatgataagcgaggccgcgttgcctacatgttattaaaatattaaaccatgtcgtaaagaacaaaagactttcgatcgtgggatgcaccaaaacgcattaactcatatgaaagacaaaacaaataaaaataaataaatagattgatagataaattgagatcttaggaagaaacaatttcttccaaaacatcgaaatttaatgattctttcttatctttcaagaatcagagtctttcttcttcttatggacaagattcttcatccacttaaaacttacgaaatcaacaatcttggctgatttggtttggccagagttcttaccgccggcatctttcttgcttttggtgttgtcttcctccggcatctccccgatccctccggttccccattgatctgcccaactcggtgcttcacttgccatattgcgatatcttttcgcaaactaaatagaaaatcatagttagatatcaaaatgaattcttcaaccaatcaaaagaaacataataaaaacatctagagatacaaattattcgttttttcatattggatcaaaacatgacttacgttcataactaagaaaatagaagagaaaagaaaaattacctgtaatgttttgagaggtcttctttggaggagaaagacgattttgatttagcaaaatgagtgccaacgcggagaatggagacaaatagtagatgtgttgttcttttctttattagacaaagtgtaaaatattgtagtttatgttgtctttttttttttttttttttttatctttagatttgttaatgtgtaagatattttttttttaggttgtctttgaatgcactttattaactcaagtttgttcgtttccgacttgcgaagcaaacattgttttggaatatttaggtataaagcatatgatattggtcgtgatttaagccatctaattatgtcccattccatgtgacagatctatcttatgttctttagatttacagctaaaaagactttattttcacataaatcttatgcaattctaagtgttctattatgtatgtactatatattattaacttcaacttctagtctcttaaggactctcattaggtaattcataggttttgtagctttgtcaagttatttaaatcggatatacaaagccagcttggaatggaatgtaatccaaaacgtctaaaatgtgtcttatgtaacctaaagcagaacactcagtgattgctttatcaaaagtcattagttcgaagtttagtacagaatactataacgaatattaaagcaacaaaaaaaagtaaaaaattgctataaaaaaaaagtattattgtatctagaaaagttaatacaaccaccaatgttgatccataaataaaggaaagcatgaacaaatagttatttttctttttatgcaattttatttttactttagttggtgcttctatctgaaagcttttattattgaactcttttagaccatgaccgacgaaaagagtaaaaacgacagcattttaatcatatgaaaaaatataaatgtatagtaaagaaatactacaaccagcttctctgtattttactaatatcagattatctacactaaaagaggacttgattcgtatctttaatacctcaaagaagatactacttagttctcttagtagactttgatttcttcattttactactattacctgacttactattactactactcatgcttgtccatttatacccaattggtatagcgaatgggtccggcgtttgttgctcctcctcttctacccgtcgatgtgagccttttccggtggctagtctcagccacgtcgatggccgtgaaatcgaatttcgagcatcgggtttctcgccatcggaatggtcttcttcacccgcggtggcggagtagaggaatcttgggcttgagagcggcgtgtagaatgtctccgccggcggaagctcgacaaacttggtgaatgtgatgactactttgaccgtagggaccaccggaatagacagctggatcccacaagaaagattttgtttagcataaagaaagcaacaaatttcataatcatctaaagaatttgacttgggtatttaaaaagcacaattccccaaaattagagatctatagaagtgaaaaaaaaagcatgggtccctaaaaaagctaaagctttggttcctccgtgacccgtccgtgatcttgtcacgtcagcgttccattgacgagactagccaatgagaacttgactcgtaagttggtttgacccattaggtataacggtcgtaatgttttaggcttaggaagaacccaaaaagagtaacaaacggaaaaagtgatttactggttttaataacaatctgggacaattaaaaataatgctaacaaaatctatcttaaattagcctaactctttcaaaatgaagtaaatacactattattgactctagattttaactttaaaggtttagaattcattttttttagtttaaggtttgattttttgggtttaagattcagggtttaggattaaggtttaatttttaaaaatatttagttatttttttttgcttttaaactatagattattttgctaattttggtataagatatgatagttttttgaaaagtccttttgaaaaactgtaaatagagaaattaaagatatttacgagattgccacttttgttaccttgactggaaaagttcccggcgggaacttagtggtgagaagatcacgcattctggcgacggctttgactttattagctaaaatgtcaagtaacggaagcagctcctccgtttttaacggaaattgttccgttaaccacactgacggatgcaagcttttcacaaattccttctctttgatctgaggagacggtggaggattcaccggagacaccgttgaaggtagagccactgatcttctcggtggctgggcttgagctactgatcttctcggtggctggacctgagccattgaccttctcggtggttgaaattgagacactgatcttcgcggtgattgagattgccgcggcggcggtggtgcggcggagggataaacgtcgacgctttttctcccaacggagatccaatctctatcttctttaacaaagctactgtgtcgtctctgtgaccgtggcggaggagctaagaaactcggattctcagctactaagaatccttcatcgtcttcgtctaactccaacggtaaaacttgttcgcttccatctccggtaacaattttccgagatctgaaactaaatgtcactttctggatttcgtaaaccctagctttccattctccgacgttctccatcttctcttgccgccgccaattcgttcgtccgacgagctctgctttagtaacatccattcccggacgatataagcttgactgagaacagaatccggcgatgtcggagtcactaatcggagctccggcactttcaaaagcgtcgagaattttccgatcgtctcgattcagtacaagcaaagatccaggagaaatatctagagattcatcaccatcaccgaggaataaaaagctttgatccgctctttgaatttttaaaccatcaaatccggctaatgtagtatcagcacggaggttaccgtcgcgtttccagatcttgtaagtatcagagggagcgatttttccgacgaacggaatcacagagctctcgaaatgaaaagagatctccatgtaaaaatctctcatacgacggagaacagctatcaaacgaggtaatctccgccgccatttacaccaagctaaacggtggtgatgccgtaaaagcactttcataacctcagaattccggcgacaaaacgcctcttgtaacggattccatccagaagcattctgtaacgaaatatcaccaccggccgacgaaatcgccctcgccgcgaacaaatcgtcgagtctaaccgccagatgaagaggcgtttcgcgtgaaggaacgtcgcgacggtcaagcacggcggagatctgatccgcgactcgctcttgact

SEQ ID NO: 107 - DNA, 97451 bp, Arabidopsis thaliana
gaattccggcgacaaaacgcctcttgtaacggattccatccagaagcattctgtaacgaaatatcaccaccggccgacgaaatcgccctcgccgcgaacaaatcgtcgagtctaaccgccagatgaagaggcgtttcgcgtgaaggaacgtcgcgacggtcaagcacggcggagatctgatccgcgactcgctcttgactcagtgagtcggattctgttcggatctgttcaggatctcctagcttcggcaaggaagagagaagacgagtcagtgcaccgtgatctcccaaaacgacggcgtaatgaactggactgtgagagtaatcttccggtctaattgccgttgttgcagacgccgacgaaggccgagccatgattgtttccggagagattgagaatctaactaacttcctcaaaaagagtgattgtgattcttattcttcttcttcttcttcttcttcttcttctagttcgtcttcttcgattgaagctgaaacggaatgtttttggaaatgggatgttacagaattcgaagttgtggtgagcaatttaattccttttttatttcattcatttattatttgttttatttgtttattgtttagattatttaaaatataaaaactctctttatttggggaggcgtgagtgagagaagagattcgtaataaggatatttctgggctttttgtcagtactcttttcttttaatttcttctttgttttcttatttgagctttttgtcttttacattatagttttttttttttttttttttttgttggattttaggtgtttttttgtaatgtagcataaattagaacatcatgggcttttttttaaaacaaaaatacacattattgtatttgatgataggttgaaatatatttgattgatgtgaagaattttgttataattagtagtactttcttaaacaaaattatttgagatgtcacagtttatagtgatgactcatggttgactagtaatgatagaaataaaataaataattattagtgactatcatggttgtcgaaactatagcattatttatttgattgatactatttttgtacatatatatgtttaatacggctattttgatagttacacatatttgatagttatacatattcgttatgagattagagtactttatgcaacaaattgttacaaccaattttgtgtatacattactattcacggacttgatttaacttcaaattcattgcctaactgttttttatttaataaaagctagtattaagtataagtatttgaagtttatagatacccttacaaaatctacacatttttgcttctatggaccaaccataatttaattgtatttaataggacacaaggtacgatacgaagtaaaacaaagataaagaaaagtgagaaaagaatcgcttttgtcgtgaccaaatgcaaattatgcaacagaataaaatttatctgctagctaaaaaatatactttgctctctctaaccgaccaatccgcttctttattagtcttcattattatattattatcatcatcgttaaactaattcactatcaaaaatgaagtcgtaagccttaaaactgagtcttcttgaactgatatataataagtatggttctctaatcttggtggagaagaaatttgcaacagcacaaaacgacatcgttccctttcttatatgtgcaacgaaatgtactcatacttgaatcaacacatgtaagtatgagtacatgactcaagtagatatgcaataatggtgactgctatctataaattagctctctctactctaatgcttctctgtattcatcacttacgagaatcagaaaccaaataaaagttctctgaaactttgtaatactgccaagattttaggaacggtagaaacagtctcagtgagctcagagcttgaagctcctctagactgcaaaacctgaagcttgggagcaagtgatttcttagcatctactataagcaaccgaggataatttgtaatgatacttgagatctgagaatctgtgaaaccataacttctaagaagattcagaacagaatcaggatttctcctctcatcgacgcttactttcctcgagatggattcagcgagtttttcggttaatcccaatgaatcaatgaggtaagagatagtgaaaatctgaccttttcgaccatctttagcactagtagaagagaaggaattggaaaaagcaaatggattttgcactgagacgactctcaaaatgagggtttaagggtttatgattattcattaaaataaaataatcaagatttggcaaatggaatcacgtcgtattatatttagtaagtaaactttatgctacatttccttaatggactacacaaatcaaaatcaataaataaaaatgaatacagtttctttgtgtcatcaacaagcttcttgtcatcgtgcttcgttgcatgcctttttaaaaacatttgatcggtagtgttcaaaacagaggatattggacacgagagctttgataacgttaactcaaaatattcgtcgtagctaaaacacgagaaagtctccaaattcaagagatttttcgttagcaaaactttcccaaacttttttgaacaaaacacaaactttctcatctgtgtcctctgtttttttcaccataaccatccgatctcatcgaagtaataagcttcattaggtaatggattctctaagatgccaataaaagctggaggaatcaatcacatgcagatctatttcaatatataaaatgtgaaatttatttttgatgcgaggagaagaaacagagatagagaaccaccattttgcgtgagtactactagtagatattcaagtctcgtccaatagatgttaatgttcaaccgaatgctaaacattttcagaacaactaaaatcaagaaatcttcaacctcttgatgaaaattcttctttcttacttgcttaattacttgggaagaatcttattaccaataccagacaacaaaacctctgttgttacttgttactgagagtcatcatgttcttgacaagaatattaagtgttctatatatatatttaacattactgaggaagattagtataagatttattgcatttattttatttttaaaaaagccattacatgagaatgagtagcatttcacaataatatatagaggtgacaatctctggttttatttatgaacaagatagagattttgagtttgtagtttttaggatattatttatatataggtttgaggaattcgcatgcatgagaatatgagatgacctcacgctcaatccttttttcctttgtggtccttcttcttcttctcagaggaacccttcacccttgatgcggaagctaccttaccctttgcacgtgcagcagcagctttgcgagtcactgcagctgcagcctcacctgtagcggcagaagcacttgcagaagaaactcttgccttgcgacccttggcaatgacttgtccgatggtacttgtgtagccactttcggatgcactggcccctggacctttgggattgttaaaagcactagcagagctagagacactgctgccgctgtaagtaagaccagcagcagaaagctgagctccaatgcctttgttagtagattttggaagagaggtgcctaatttggtctctttggacacttcttcgacctgccttgcggtgacaatggcacacaaaatgccaatcacgagaagcacaacaaactttgtggcattcatcttttgattgtttttatcttttggaattaaattgtctgtttgaggtgagttgtgttgtgttcttcttccctgatcataaccatctatatatacacacaaactctatgcacacgtatttattaaggtacgtgagcattctttatcaaataagatacgtgagcatttcttacaataaatatacattcttgaatgcattagtcaaatttcaactaatagtcataccaagatactattttaacacctctcttgcccaagatcaatcgcatgtttatatggatttattttggtaaacgtaaaaaattatttgaattaatatgaatgtagattttgataccaatatagttactggaatgctttaaacttataccatacgagttaactcaccaaaacgctgtgtttaacagacatctaaggattttttaactattgtatataatccatattgtttatataaaacgttgtatcttatttattgtctttcatatataatgtcaatttagatctccatttttcaacaatggtgtgttatgaaatcctaataaagaaatcccaaattgtaaactggtttatttataattaaaattacataataaaaaatgtatactaaacgcagttaagcaccctctgtaattttgatattggtaaacaactattgttatttaaatacagatatagtgatagtagataatagtattagatgttttcttacgtagtgttctcaaatcagataaatcagtcagtcaaggcaaagccattaaaacaagatacagtactatgaaaattataaaagaagaaaaagaactattaaatcggaaaatctgtttgtgaatatgatgagtctccgaaacaacatggttttattgtctactacacacgggatcaagtgagaagtaaatactgtgaattctaaagcaaacacacattcttggtaaaacagaatgctttaggtgaatcaccgatgttagtaaagtgaaaattgaatattataaattctaaacttagtaaaaagttctttttcttcttttataacttcgtataatattttattataatggcttgactgactgatttatccgatttgagaacattacgtaagaaaatatctaatcaatattaatatctaatgtcactataagacgttgaactgaattaaccaatatgtacgtcagattaaacactctcaagtaaaatagttatctaatttaaaccaaatctctttcacatttatttatttcactgtaacaattaagaaaatacacacagacacggacattattaaaaatgatgtaaaaatgtgtttaggtgtgtgtgactatatatagggtatgatgtagggaacacaaaacacaccaaaatcttaaaaataaattataaaccaaaaacaatgaatctcgccataaagtttcatgtgatggtacttttgctcattgtaattggagatgtttgtgccaatgtaggcgcaaggccgctagaagaagtttccaaagaacttatggataagaaggccgtttcgattcctaagacaccgttaccgttaccaccaccattaccaacattaccgccagcgcagttaccaggtttacccactccgccaaagatgtctaatggtgacactggaggagttgatgcgaacgcagatggtagactacccaaagatgctccagcgggttcccatggtgccacagccagaggatatcgttccggaggtggcaggagtgatgcgtcgggcagcactgacccttggccttgagcgtgaggtgatgatgttcaattgttcattgctcaaacctatataataagataataatactctacaaacgcacggtctcttttctgttcataaataaaactagagattgtcccctttaataataagaaatccctaataataatcatgaaatgctactttctatgtgtaatatataaaataaatgtaataatttactacggctttatcttattgaataatatatgtatgagtgattatggtgtccgtctgactgatcgataaccaaataatatacaaccatgtttcaatgatccaatgttctaagattagttttcgttataaggaagtgaagtgatgaagtgtcaagtgtgtgcttgtaaagtggtacacatctgtaaactaagattacatttttctttaatatattaggatttcataacataccatcatttatattaaaatggcgatgtagattgactctatatctgaaagacattaatagattagcaataacgttttacataaacatagattacaatagttaattccttacacgcagcgttatggtgagattgagagaaaaggttgagtgattaaccgcaatacaacgtatttatacaaatgagagaagctatcccaaaaccctacactaactggccgagcaagtacaatatatttcatatggcctaacccaatatatacggcctaatgctctctctcaagatgttgcgtgtatgtcccaataagtaaaaataagtaacaaaagtgattacgtcccaaagctttagtcaaaagatttgtgctagttgttccgttgttttaacgtgatgtgttgaaatgatcccagcttttatcgcatctcgtacatagtgacagtcaacttcaatgtgtttagtacgcgcggtcgtgaaacagcggattgtttgatagatgaattaccgcttgactgccacagtataaaggtatcgtcttatgttgcacaactccgagacttcgtaataaagcgataacccatgtgagttcgcattgactataatccatggccctatactcagcttatgcatgcggacgaacaagatataccgttttttggttccttgtcttcaaagacactagagacccaccaaaagtataatcaccaaaccggtcaatgatttctgagtcaccgcgcatgaagcataatcggaaacacaataagccgataaggaaagatcactcgtagaaataaacaaaacccattgtctaggtgaacctttgatatatcgcctaaacaacctgtgatgaaaaatcttctttcttatttgctcaattacttgggaagaatcctattaccagacaacaaaaccctgttgtttctgagcgagagtcatcatgttgttcacaagaatattaattgttcaaaattcaagagattgatcgttagcaatactttcgaaacctttttaacaaaaatcaactctttcttctgtgtcctctgtttttgtctcctctcatcgagtaataaggcagcttcattggtaatgacttctctaagacaggggcggatctagaatgtaatttaatgtggggcaccatatatataaatagtactaagtataatttaattacctaaattgtatggtgattataattttttttaacaaaaatgacaatttggagacttgaagtcgggttagtatggggcacttgttgctggaaaaccatttgagctaactgaattactatgtttagtagtagcttatataatatttacaagagttagtatggggcacttgccccacctgcctccaacgtgggtccgccactgctctaagatgtcaataaaatctggaggaatcacatgtgaaatgtataaaatgtgaaatgtatttttgatgtgaagaggagaaacagagatagagaaacattaccatttcatgacaactatattcaggaagaaatactttaaaaaaatcccaagtctttacgtgcatgcgaagatgaagaagaaaccttgttaccagtctcaaccagttttctctttcgtagtgagtgattaaatttaaaccaaagtttaaagacaaaagaatcaagtagattttagaaacagtggatcttatgagaaatgactagaggatttatcttatgtgatgttaaggaaaacatattcacattcacatcaccctgttgtttatgagagtcaccatattcacatgttcgtgaagtttctcttccacaagaatattaagtgttataaacatttttttaccattactgaagaagattatactataagatcatatttattgcatttattttattttaaaaaagccattacatgagaaagagtagcatttcataataatatttagaggtgacaatctctggttttatttatgaacaagaaagagattgtgagtttgtagtttttaggatataattaatatgtaggtttgaggaatacgcatgtgtgagaatatgagatgacctcacgctcaatccttttttcctttgcggtccttcttcttcttctcagaggaacccttcacccttgatgcggaagctaccttaccctttgcacgtgcagcagcagctttgcgagtcactgcagctgcagcctcacctgtagcggtagaagcacttgcagaagaaactcttgccttgcgacccttggcagtgacttgtccgctggtaaatgtggagccactttcgaatgcattggcccctgggcctttgggattgttaaaaccattagcatagctaacgacactgctgctgctgaaagttgagccagttgcagaaagctgagctccaatgcctttggtagtcgtttttggaagagaggcccctaatttggtctctgtggacaaatctttgacctgccttgcggtgacaatggcacacaaaacgccaatcacgagaagcacaagaaactttgtggcattcatcttttgattttttggattagattgtgtttgtggtgagttatgttgtgttcttcttcccaaatcatagacctctatatatacaaaaactcgatacacttgtatttattatgatacatgaacatttcttacaagaaatatacataagcttaaattacgactaatagtcataccaacatgtcaacatgatactattttaacacctcttgccaagatcaaacacaattttatctaactagctaatattatgaatagattgtgatatccaattaatactatactataactgtgatctcttattcgaaaacctcttaattcatttttccaacttctgactctcaatcaagagttaaatacatataatttttttacaatccaccaactaactacaagaaaggttctcacaacgatcattaaaatcctcaatcagggtcatccactttgattccaactaaagcttcctaattgaaaatatgaatctgaaaatataaatcataacttccgcacaatagaatccaaacagacaagcaattatgttaaatgacaaggaaaagtattgaacttgacacgactctcttagcagctcgtaacaagtactaaagaatcaatgtatccatgcaacatttttgacatatcatgatatcactcatagatactttaacaaaagcttttctttcgtttttccattatcacatcataagattcatctagaaatctaaaactgacaacaacaaaataagaacaaaccttggcactgctcattgttgtaggtgtgccttctgatctatgaaacacgacctttggtgaatatagccatcaacgtaggcaccagctcgttgtgcttcataacaaacacgacttttggtgaagatagccatcaacgcaggcatcagctcgttgtacttcatcacataccaatctaaaaatccttcatcgacaaaacagaggacactgcaggtagctcacttctctttctgagcagtcctttccacaagagagctttgagtacgttacaccttggtataaaaggttttcagagtaaagtattgaacttgaaacgactctcttagcagctcaacaagattaaaaaaggtctcaagcttcttcggtttccactatgatagctatattccagagtcctaatgatatcagatagcatttaagtgtctcagtgatatccaatcaagtaaagaccaatattaccaatatgacaaaaacgagcaatgtggaatcatatgatccaaaaacttatgacagagacgaagcaaatcacttgcaaaagaatctcaccgtagcaagattttaaagtatcataagagaagttggctctattcccaaaactatgaattgtagtgaaattaaagcctcccagtaagaccaaataccaaacactaataaagaaacaaaaaaggcttacatgaccaatccaagagctcaggagctgcattgcatcattccaaatttcaatccatatctgcagttcaaaaaaccatgatacagaaataagacaatacatgatccaaactcaagacgtatagagacagtcaagaaaccttgtgtgcaatgcagctcctgaacaaggtcagtaaaaattcaagagtcaagacgaacaaggtcagcaaaaagtgagaagaaaaattatttagaaaactaaagtcagcaaacacatagtttggattcacatgtctactaattggctgcattgccgtttctaagctaccaatcttggtaatatatcataaaagattcaacattacattaaaagttacatttccaagttggatagcttttgaagtctaaaatcaaggtttcagaaattcaaaaataaaagcaaaatccttgacaagacttctgatctatgaaacgcgatctccggtgaaaatagccatcaactcaggtactatcttcttgtcatcatggttcttcacatacctgcataagaattcttcattggtacataccaaaacagacgacattccagggagttcacttccaagcgatcctttggacatgagagctttaattacattacaccttgggatagtcctcttctctaagctgtatccaagtaccgcaggggttgaaaccacagcctttagtggccaattcatcttcttcaccagaaactcagtctttttcttcactgtctctgcagataaaataaggcattgaggaaagcgcttggctatcattgcaacctcatctctgctaaatcctaagcctagaaatgtttcaatggagttcattatcttctgctctgaagcattaatgcattgtggaaacttcttcaacactgagaggacatcgtcttcgagtagtccacacttcttcagggtttcccaagtttgaactatcttgttctcagagaaattcagaaaggaaggacacttcttaaacattgcccatacatctccaacagaaaagcctaaacttttacagacattaacttttgcttctatagttttgtcgcggaatctgtaaacaaccctaagagctttgacaaactttgaggtggttggatcaaaacccatctcaacaactttcttgagtgattcttcaaaattttcttttccacagacaggttggtgatcagatataagcaatgggaacaacaacctttgaggaacacccaattctctcaaaaccaaaacatttctgattttgttctcctgcttactaccctctggcaaagaatgacataacttttcgaacttggaactcttatccgcttctataatctctttaacaaaatcatagtatatgctgatagttttgtcccctctcttccccaagatttcaggaactgtagatacaatatgagtgagctcagaccttgaagctcctctggactgcagaaactgaagcttgggaccaattgatttctcagcatcagctactagcaattgtggataatccgtaatgatgcttgagatctgagaatcagtgaacccatgacttctcaatagactcagaacagaatcaggattgcctttgtcctcgaagctgactttctttgagatcgattctgcgacctttttaggtaaacccaatgaatcaacgaggtaagagacagaaaaactcaacccttttcgaccagctctaaggctcgcatctgtagcattagcataggagaaggaattggaaaaaggagatgccttttcgaggaggttcactggaacgcttaaatgacgacatttcttcaactggaccaacctttttccatggagtatcagagaatacatgacgggaggctcagaagcaatctatctgattcttcagttcgtgaaaatggatcgaccaggctacgaagattagtctcaaaattcaaaagttacagtgaaccatagatcgagtgccgccaaagatcgacgggtggtcgactatcaaaatctcatgaaatccaaaatcacacagaccgaccctaaattggggaatgaggagtaaaaaaaaaggtatgatttttagggtttatgattcttcgttaatgatttgaaaatatttttgaatataaaatacaaataacatcaaaagtaacatatcggactcactgacagagttcaaggtttcggaaaagagattgaaattgaaaatatagttattttccaagtcggaactgcacacaaaaagaaacatgtcgtcaaattacaaaagtaaaaatcgggctttccgagattcatacataaaaggtaagatccttgacaagacttctgatttatgacacaacctcaggtgaaggtagtcgttttgccattctacaaaacacttgacaagactcctgatctaacgtgccataggagccatttcggtgtttgtgctcacttcactggaattttttgacctcacatcttgactgatttctcttcttgagttctcgtacaatagatactcatttagttcatgaacaatttgagccatgtttggtctttctgctaaagaaagtttcgaacacaacatcgctagttcaagaactttccaggcagagctagagtcatatttccccttaaggtttggatccattacactttcgatatcacctattgaaagcatatacctcacccattctgctatatgaggcctttcacgagtttgatcaatcacaagtttgtttgtgatgatttctagtaagacaataccgaaactgtagacatcactcttctcggacaaccgctgtgtttggtaatatctgcaaaaggatggtttgtaggagttttgtgataactaaagaaggaagataacaagaattagaagctggtgacataaagctataacaatgcttactcaggatcgagaaatccatgagttccgacaacaactgtcgacacatgagtttcacccccgatagggaaagatctcgaaagtccaaaatcaccgagttttgcctgaaagtcttcattcaacaatatatttgtgcttttaacatctctatgaatcatcggtggtttgcatcctgtgtgcaagtattccaatcctacaaagtgatatgattaacaagttaaaaagttgatggaaattcgaagggaatatgaacacaactgtatatagagtgatctttgaagatggattatgacaaaacacaaaccaagtgcagcttctgcagctatttttagtctacatggccagtccaagaatgaggagccttcttttcctgtattaaccaagatatgttattgacatcgaaacaacataatactcaaatcattaagttaggtggtgtggatttatgtttacctgagagatgctcttttaagtctctattctccatgaactcatagatcagtgctaagtggttgctgtcatcacaatatccagcaaggtttaccaggtttacatgatgaactctcattaaaagttcaacctaggaagcgattttgaccatatgcaaaaacatcttagcccgttgaagcatgattttaaaagatatatttgtgaggatgatatattaaacatacagtacctcagccttgaactgcttgtatccttgggatgatgattcagatagtactttaacagctacttgctggccatcgttcagatgaccgtgatagatgattccaaaccctccttcaccaataattttcttgaaattatttgtcattgccataacctctgaataagtaaatcttctctttactgtttcgattgatgagtgtggagctgcaagcaagaattcaacaaaatctatgtaataactcgatagttttttatggtacttaatcaaatatctagattgatgagtttgctgcaaatacaataccctctctacttggtggctttcttcgaaggcagatgaaaaggacaccaagaacaaccaggacaatggcgatggcagaagctgaggcaacaactgctactaatggaaaattctttttcctgtgtgaaataaactcataaagttttgtgtttccatgaaacctacaaaacaacagacatttctacaattacttataacacaaagagtagttggataagagccagcaggaaattacaagaggaaagtttactttaaatccaatccttcctttcgtctatcaagaagagcttgtggaatcggaccacttaaactattattgcttaagtctctgttatcaaagagacgaattatgtcaagattagcaggatatggaagaaaaaaactattattcgtatacatgttttggtttctttctcgagttacttacattgacaacaaggacaccatgttggatagaaatccgggtactcctccggtcaaattgttattcgacaagtccctagccattgcagaaaaaaacaaaatggtcataatttcataactctagtcaacataagatcgagaggctatacttacagcacttgaagcttggtcagagtttgaatgctaggtgatatgacaccggataatctcattgaggataaatttctggttgcatgatgagaaaattatttcaagctcatgaactgtttattaggacatatattatatgatgaatcatagtgtgaaagaatacacttacagggaaatgattctcaattgtactacggacgtatccgtgaagttgctgcatttgagatagtgggatggtttagggacgcatggatctccactcccgttgcttaatgcatacgcagctcggatgttctcaattgcactgactggaacaaattccaggaattagaatataaataaataagaaagtgtatgttatgagcaaggtatatagaggctaggtggcctacaatcatcttcatatgttgctgtttctggaaactcaagtactgtgaaaatctcgatggcgttaattagaggtggaagagttgaaccgagtgtttttcttagttccaagctgcatactgaagcattgcaccttagaggttctttgttgtatactgtgtcgacaaccgagtccgtaggactataagctggagaagtaatgattccattcatcaaaatgtcgaatatcctagtttcattgccccgtaacacttgtagttcaagaaagtgaatgtagatgtagatctgatcttctggattggaagttagccaagtaaggatcagacttgaactggcattggttggtatggcagccgtgctaattacagcttttggcgggtcataaggattatcaaagtctgtatctacagtgttgtttactgtcatcaattcatcttctgagaatggaacccacttacgatcatggacgtcatcaggatacctgacaagaatccataacaagttcagagcaaaagacacaacaatccataaataagtcattggccctaaagttacttccatgcttgttgtttagtgatatgatccaacatttggaacttggaataaagagactaaatattactaagtggaaaactatcactaaatacccaacatcagaaagtggaaacaattataaatgacttaaaagttcaaatttaaaggccatcctctccacttaagatagtagctttcgacagtgagttctaccattggtttttataaggtgtttctaggccaaaacctaacaatttgcttgtttgccagttacatatgaggggaccatataaaatgattcggtcactgacttgagggatgtacgggcatagctaggcctagaacctcttagttattgaagaaaagaaaaaaaaaattagttgcatgaagaattcgtaaaataataataataataataatgaatggtcttgttaatgacgtgcatgaagatttcgtgcaaatctacttattagttgaaggtattacgactacattcgctttagctgctaatccaaagttccgacctataggttaatgggataaaacgtctatatgatatacaaatctatcactgagttttcggaaaataaagctcgatcataaactcagtaaacttaccgtacatagttactggactcagtaaaatacactcggacaaatctattcaaggagccgcttcgagtagcataaatattattactcaatggccgaagttctaggactgaaatgaatgggattccgtcgtttgtccttacaagacaaatctgcaaagtatttgactttggggtgtgaatgatttcgctggacgtaccatatcctctctgctctgatcgcagtcatgcccaattggtatcagggtctcccattgtagatattgtttcccaccaagtcctacctatatacagatcaaactctgggggactgtccagaccattgtagtttccatacatgaacccagctctgaccaaataacgagtgtcttgcgtgacatttaggttatagcagtttcgtatcccgtttggaaagtatcttagagttgcatacgtctttaatacgcctggctctaaatctttctgaatttgaccaattttcccaccctcaacaaatttagcgtcagacgagtatgttaatcccaaatctccatcgacataaggaggctcattagcggatagcccacaatccaagctgataaatcctggtaatagaaaaacaagatttcatgatgttgatcctgataaaaagataaacaaaaccaatgtaaagaatttgtaaattaccttctggttcctgagcaaatatgagttgtataatggcgaaaaccacaagcagcgtgaataagagttgacgattcatcatcctctgtttgcttccagggaaattcaccaaaggtgttgaagtaccaaatgatgcaaggaactcttcttctggaaaatgaaggtaacttataaattcttcaggcccagccacaagcattataaaaattcgaataataacaaacaaataaatatatttgtcaagtagtaaagaacatagaacatttcagtcataacaacatgctggccttaatagtcaacgtgatgatgaaggcaacgtggatacatcactgcaccaaaagcacatatagtgtctatatatttatttactgttttgtcaccgcactatttttggtgattttgttagaaattttggttctttagcaaataagtcaaatggtgcaaataagaaaactccagcttgtaaagaagacaatttcaaggtaggagtgggcttcctcttactgggagactccatgaggcttcccaacgttctccatcggatagagaacagagatctcatgcataatttatcaatctttgttctgctatccgatggatgaagaaggcacagttgataaggcccatcactaataataaagcatgtttcagatacaaaattttccgttaacttcctggtaaaatgcaggtttcatgacctacaatagacaaaaccatcgtggtttatactaatttcagaacggtgctcgaaattttttatcagcttggtcattgcaaagaagcgatagaaggagtctttacacttgcgctttgtagaagtgaatcattgccccacctttaaagtcacatgaaccaaaagatttttccttctttctgttagtaactatataaagaaaacaaggcatatccccaaatcggcaaatcatgaagcaaataaaccggcctaaaatttagtaaaacaatccccagttagcttcactcaccggaagtgctcgtaactgaaattgtttgatgtcatagcgtcaaccacgtctggtgtaatgcaacagtgtttggatcgaccatttctttaaacagagttaaaggcttgcacaaatagtttttctgcggataaagattcatcatcagacaactggaactggttatcgacaaagcctgaaggaaatgaaccataacagaatttcaattatggttacagtaagcttgagatggcggaaacgtatcgagaaagattgaatcaccgtgaggcgtagacactttgatatgtgtgtggaggtttgaagcaacaagaacactgtaaatagactcaattgcaggtaacaacattgagactgaagaaggcactgttgatgagaccgatccatgacgcagcaattctgtttgtagatcagattgcaagaatccgattatgacacggatcttggttttggacaatactgtgagcaaatgaggagcagcatcatataaacggatatgagagatatgtgccaatgttgaatccaacaaaggattctctattttgttcttgtagcttaatattttgccatgaagcggacgagctcgctgcaaaagttttatataaggaaggttagtttcaaaagtcaaaacagaggtttcagtatttagtgtagtgcttgcttgcatactcaataatgatttgaagtaacaaaacacataatgtctttatcgtttagttaatagcatttgtgaaatctagtgtttatgtatcttgggtagctttcactggccaacctctggacaaaaagtgcaacagtacacaaaacaacatcgtttccttacttctgctaagctttagcctcattgctactcatcttttattatagtttggtttacttggatctcaatttcgacatcacaacatcatcaacacaaaagattcagtactaaccaagcagaaccagattaattttattgatcacgaaaccaaagtatgcctaccatatagtacatctagtttggttactgtcagaaaaagagaaaggaacatacatgataaggcaagttacaacctaaagctcacgaaatatccgcaaacactataaaatcggcaatgcaccgtgaggattgcatttaaaataccccaagaaaataccaagataaagcggtttatgcatctgtctttcctaccaaagcaagttctttcataaagtctccaagccaaatgagtatgcaaagaaactgaaagtcgaatagaagaaagatccataaattcatacttcaaataatatacacctggcacggttttctaggatcaaatattacatgtattggatttctcaactgtcgtagagaaataatcttcagtgtatatactaacttagtgaagctcaacaacctttaaaaggtttcaagcatctcagtttccattacaatagctagactctgaacattacaaccatcaatttggatgacaatgatttatgagtcctaatgacatgagatagctttcaagtgtctcagtgatatccaatcaagtaaagaaaaagattactaatctgataagaaaacatacattccacatatcagatgaatcatatgatccaagaacttgtgacagagacgaagcaaatcacttggaaaagaatctctacgtagcaaggttttgaagtatcatcaaatgattttggctcgactccaaaaacgttagctgtcagggaagaccaaagatcaaacacaaataaagaaacgaaaagggcttacatgaccaatccaagagctaaggggctgcattgcatcattctagtccatatctgcagttccaaaaaccatgatccgatacgtgacactgaaataagaccatacctgatccaaattacagtacaattcacagtttttttaaaaaaaatgaagatttttggtaaaaagagcagagaacagaaccttgactctcttatacgtcttgaatttaaacttcaagagttcagacaaacaaggtcaccaaaaattcagaagatttaaatcagcaaatacatagtttgaattcacaagtctgtgattttgcaacaattctgtttctatgatgcaaaccttagtaatatatcagaaaaaaagattcaaaattacaatttaaagttacttttccaaaccggattgcttttaaagtctaatatcaaggtttcaaatctccaaaaataaaaggaaaatccttctgatctatgatgatacacgacctctggtgtaaatagtcatcaactcaagcaccagctccttgtcaccatggttcctcacatacctttttaagaacaactcatcagtacataccaaaacagacgacattggagggagttcacttcctgtgtctccgagaagtctttttgacatgagagcttcaataacattacaccttgggacagtcctcttctccaggttgtatccaagtaccgtaggatttgaaaccacatccttcagtggccaattcatcttcttcaccacaaactcaatcttcttcttcaccgtctctgcagataaaataagacactgaggaaagcgcttaaccattgttatgaactcatctctgctgaagcctaggcctagaaatatttcaatggagttcaatatcttctgctctgaagtaccaatgcactgcggatactttttcaacactgagatgacctcgtcttcgagtagtccacacttcttcagggtttcaattgtctgaccaatcttcttctccgaactattcaaaaagtaaggacatttcttgaacattgcccatacatcttccacagcaaagccgaaccctttatacacattaactctttcttctattgttttgtcggtgaatctgtaaacagccctaagagcttggacaaactttgaggtggttggatcaaaacccatctcaacaaccttcttgagtgattcttcaaaattttcttttccacaaacaggttgggcatcagagatgagcaaggagaataacaacttctgaggcacacccaagtctctaagaaccgaaacatttctgattttattaccctgcctattagcctctggcaaaggttgacacaaagtttcgtacttggaactcttatctgcttctataatctctttgacgaaatcatagtatctgcctagagactttccctctttcattcccaatattttaggaactgtagaaacaatctgagtgagctcagggcttgaagctcctctagactccaaaaactgaagcttgatatcaagtgatttctcagcatctattagaagcaatctaggataatccgtaatgatgctggagatctgagaatttgtgaacccataacttctaaaaagactcagaactaaatcaggattgcccttgttcacgaaactgactttctttgagattgattcagcgagttttgtagctaaacccaatgaatcaacgaggtaagagacagtaaagttcttcacttttcgaccatctcttgagctcaaatcagtagcactagcagaagaataggaattagaaaaagctgatccattttgcacaacaaatctcaaatgacgccatttctgcaactgtaccaaccttcttccatggagtatcacagaatacatgacaaagaaaatgcgaatacaagaagagcagaaccaacaaatcccagaagtgtaaaagcgattctaccccaactatccgtttctattcgagaagaagactctgaaaatttctactaaacttacgattgagcgaggaagaagagcaaattcattcatcaatcagtgacccaccttctcatagattgttaaaagtgtgacctttttctccatagagaattagagaagactcaaagatccaattatccaaattgagggaggcaaaattaaaaaatgagctctttagggtttaggcaaagccctcgttttgttttaatttagaactaaaaataaacatactgttgttatttggctatacttgtttttgtctcacaacaacaacagaagtattattacaagatgtaacaacgacatagactttacatgagcacacaagagtgtcttcctctaaaggtcacatactatatgtccatttcttggaccagaagagtgagtaatatccttcaagattgtttcgtacaagactaattcatcatccttcagggttaaaagtattcgtgttcagacaatccaaaacctctagatctctattctagttctaccaataacctacatatgtcatgtagtaaatagttgtgttgctgtttcttggttattgtcccaaacggatttcacattagaagaaaacgggttggatccgggtcaacttaagattacaaaagtctaaatgggtttcagacactcatacacaaaatctattctctacttccaaaagtcaagcatcaagattcactaatgaatctaaacctaacagaaaacaaaaaaaaaatccatccttgactttgctcattgttctaggcgtgtcttctgatcggtgagtgaaacacgatctccggtgaagatagccatcaactcagccacaagctgcttgtcatcatgtttcctaacatacatatataaaaacacctcactggtacttgtcaaaacagaggatattggagggagttcactttcgagcaatccttttgagatgagaactttgataacattacaccttgggacagtcctcttctctaggctgtatccgagtacctgagggattgaagccacagcctttagtggccaattcatctccgtcaccagaaactcagtcttcgtcttcatcaactctgtagaatatccaatgcactgagggaatcgcttgaccatcatcaaaaactcatctctgctgaatcctaggcctagaaatgtttcaacggagttctctatcttcttctcagactttgtcagaatgtttggccacttcttgaacattgcccatacatcgtccacagccaagcctaaccttttacaggcattgaatttattttcaattcctttgtcgcttaatccgtaaagaacgttaagagctttgacaaaagttgcggtggttggatcaaaaccaatctcaacagccttcttgagtgattctttaaatttttctttaccacaaacatctccggcatcggatataagcaatgagaataacaacctctgaggcacacccatttctctcaacaccaataaatttctgattttgttctcctgcttactaccctctggcaaagaatgacataacttttctaacttggaactcttatccgcttctataatgactttgacgaaatcatagtatctgctgagagatttgccctttctcttccccaatattttcggaactgcagaaacagtctcggtgagctcagagcttgaagcacctatggactgcagaaactgaagcttgggagcaagggatttctcagcatctaggataagcaatcttgggaaagtcctaatgatgttggagatctgagaatcagtgaacccatgacttctcaaaagactcagaacagaatcagggttgcccttgttatcgaaactgactttcatggagatcgattcagcgacttttgtagctaaacctaatgaatcaacgaggtaagaaactgtaaagttgtgaccttttcgaccatctcttgagctcacatcagcagcaatagcagaggaggagaaggtattggaaaaagctgatccattttgaaaaagattcactgaaaccctcaaatggcgccatttctgcaactggaccaactttcttccatggagaatcagagaatacattacaaagacaatgcaaataactcacagtgtgctaaatctgattcaattcgagaaattgaataaagctctaacctttagagccacgaagctttttcgcttcgcagtttcctatatcctctgtgtctgtgtgggaagaagcctcgcctccgttatacatcggtgttactgcttgccgaattcaagttctggagctgaactgcgtgtcgctcaaattcaatcaaaacaaaccggatgatcaatataattcggtttagtcgactcgttcgatttactggaagcgattataaacaacatccattgacatggtcacatgaacgcaacttccacttgggaaagtcgtcatcagatacatgaagcttcatttggatacggttcttgatttcttcaagtgtttctatgctttcaaagcaaagatcgtccgattgatcgaaaagggaaaaaacatttggaactagagaccgaacctgactggtttagttgaaatgtgaaccgttattaactatttaagctaaaacaaattgttgaaatgtgactacgacaagaatataagtcatttgaaactaccagtgaccgaacctgacaggtttgtatcaaaactccgactaaaacctgttattctgtcagaactcactatacctttatagtttatactgttttatgactatctatctattcacgtgaacatattatatacaacacattctgcttctgaagtagactcaatcctacacgtactggctgaatgattcattccttctggatccaccttccccgtagtcttcgttccattgtcgaagcgctgtcatgttgacagactttgatgagatgctcatactcacctgattcaacaacatcgacaacagttatacagttctctgagccagagacagatttgagaaaagaaagctcacaagcaaaaatcataccagctcgagtgcgtttctgaaatcctccatttttaaaactcggagatcagaacctccacttccagctggaggaactctgccttcagccacagcagcatctcgctcctaccataatatatctcatcataagcatatttttattctatagactagttttaggcagcataaagttagttttcttggtttaacacaaagactacttacacttttttccttctccactatctctatgattcgacggcgggcagcagtaacacatagattctgcacgcaccaaaagagcatgtaacatggatatatatgagcattacttatcatttcgtcagaccatagcaaaaggttaaaaggaattactaggaattttaccttaagatcgtttccagaatatccatttgtcatactagcaacctcatcaatatcgaaatcaggggacaagtcttcttttgaaagtatcaccttcaatatctttgatctactacgagcatctggtagtcccaccatcaacctgcagaagccaataccaaaaacttgttacgacatgtcaatttgacagaaagcttagtccaacaaggaagctatatataaattacctatgaggcaaccttctaatgacagcctcgtcaaggtcaaaaggtctatttgtggctgcaagaaccagaacacgttccttttcatttgtcctcagaccgtcccaatttattatgaactcatttttcgtcttcagcctgtaccgatgtagcatgctttccacctacaagacagtaaaatattgtaagacagtcaatgctctgactacaagcaagattcgcccacgaattgaccatgaggaattacctcgtccaaaaagataatgcttggggaaattttactagccaacgaaaagacagctttgacatatttctcaccctcactaaaccactgcaatattgagaagaacacaagtttgaacaagagattccgtgtataaattggtagagtccaacttttcaaggatattctgttacccttgacattgacatgttgatgaggttagcaccagcttccgttgccactgcctttgcaagcatggtctttccagttccagaaggtccaaataagagaattccgttacaaggctgtgtagagaagtacaggagcagactgattaggaagccaccaatccataacgttaacatctaaattataggagataaattttttgaggaaagccaaattatcagctagtattactaatatcgtcattacttcacaaaacttatgaacatgtatactggtacacacaaataaaaggtccttcacagatctgtcatcaattcgaggcaggacatagtgaaacaatatgggaatttcctaaaaccaaatgcggataagacaaccacctttgttaattgccccttgcagaaaagttcaggccattgaaaaggaagcataaccagttcctttaaagtgtctttgacattctcaagtgccccaatgtcatcgaatgtaacaccaatttcactgggcggaataatatcacttatttcaaacgtattttctgtcacaatgtcctgaaagcaacagagaaaattaacaattgttacatgatagaaggaattgccagagtgaaaataagtaaacaaaaattcaatttccaagacgatttgctaaccttgagagacttcttagattcaatttccaagagttctattccacattttaagctgcaaggatcgaaagttcattctcaatactgaaacagatacattggtgaaaataagtaaacaacgatgcacagggacaagctgccaattacctctcaagagacaaaataaccctaacatctggatcagcaccaggattagactttatatggtgactaagagcccatccaatgatcttttctgcacctgatgcagatatccaaagtcaactttttcgaaaagcattccattgtcaactctggtcatcatgccgaagaaagggaaaacatactgtctcttcgaagtgtgagatccttcatgcacagcgtctcaatgccttcacactctataccacatcgtcccaacacctaaattgagatgcaattatgaattctttattaaagcttctgtattcccctgttttacaacaggaaaaggaattatgccatatgaaaaacagatagtcttgtacacctgagaaaaagtaacatattctaaaaggtatactatcaccaatttattttcgtgtgacttgagatggaagcaatcaagtcttgaaatagagaaaagataaagttatagactttaatgatgtgctatctctgcggttgtgcctccacaattacgtctaacagccaaaatgccacagatataatttagctttaatttttgaagctaaatatgcaaataaggactgtatctaaggaaatcgaaagatttcacactgaggttgaaatccttaattttcaatctgacccatcatatgtaaaacttattctgtatccagatataaaatgctgccatgacctttttctaactacatattaactccaagaatacaaccaaaagtatatcgattccatatattcagatttcagatgaaagatataccatgcgcaagtgattgtaattagccttcattttcaaagtctcagcatcacgatccaaatgatacttccaagatttaagaagttcctcaccctggtaataattagatccatctagtctttaagttttttttgacagacaacagacgggagtgcttacgtcaactagaacagcgtaacagacctgtggcatgtatatagtaactttattcacaaagagatccgttagacgtccaataccctgggaatattaagcaaaaattaatataagtcccactctacatgcagaactaaacgccggctagaagacagaactgataacagttaatgtaaactaccttctccttgggattatcagaatgtgtctgggaacagatcacaattaggttatctgagataacttcaagtttgcttttgaatgcagagcaaaaatgggaatttccaacaaaatatttctcagcatctttcaaaaatataataaccggacaagttctgctctgatcatgggcaacctggaaacggacaaagtattaggcaaagtattagacgaagaaagaattcactgcttgcaactgataagtacctcaaacaatttggtaacaagtaattcatttagatcgtcagatgccgagctttcgaactgaagatcagtagctattaaaagaacagacgaaacagtgtgtgagacaagagcagctgaggacgagtaaccaatgcactactgaacatgacgtaccactgcagaagaacccatgtcccatttcacacagttgaccaagatcaactccatcaggtactggattctcaaatctaacacccactttagctgaaggattctcatcaaatactaacagtactttccctataaacccataaggtggtcccctgaataagattaagtaaaaagtggatcattaagtcaaagagtgactataaaaaggcaagagaaaagttcagaagatatatttgtaagcctaactcaaacaaatccagaaatttagacaaaattagaagataggtaatagattttttgaaagagatatagttcttggatgtaaataaaagtaattcatcaataaattatttgcatttttcttcactttcttcaccagaaccaacaaatattcatattcatacaatatagaagtcaatatcagtctcagcagctgcctccatcagaaatatcataagaatcaaaccttgaggtaggtagccccggacacaactcatcaccgaagaatcttaccctgtcccctgcaagtgtttttccccaatgaagtatcagtaaaccagaaatctaagaagattgaagaacattcttttgttgcaaacaatataaaggggcatgcctttcttcaaattatgattcactggagttccaaatgaacggggagaagtagcaggagaagggatagatgaatctccttgacctgatgacaaatctaagctttttcctcgatcaatgagcgcaggtccattcatcagtgactcaaattctttagcagtcataacctgcaggaaattgcagagcggatgcatatcatacccgtagtcaggaaagcagataaataagtgtagatgcaaaatctttcctcttgtaaactaacaagcatatcatcatacttgtaagtaaccaacattgatttttttacaaacagcttcctcggatgtcatatttaagaaacacatacaatatcttacccccaaaattggattgctgtcaaatattagcaatttcgcattgaatgaattggcaagtgctttagctaatatctcttggtatatttcagaccctgagacaattccaaacaaaaagagaaaatgatattgccgcctaaaagaagtacaggaaccacacaaacaagatacttgtacctgcaggaccagaaagcaatatccttggattcaaaatggtcaagtcggatgcatatggggcatatcctatattcatcttattcagatgcatatctgaaacagctagtaagacatactttgtatgctcactgcaaaaataaatcagaaagaccttagtcagcatacaccaaacatagaacagtacacatgcaaagcccaaaataccaaagaaaagaataaaatatgattcgtgtgaaagactgaaacaggaaggataactctcatattctccaactgtaatacttaaggaagggaattagaatttatgataattcaaagttcagagcaaaaaaacattagaccaaaatattcttaatggaaaattcacatgcacgtatcttaactctgcataaatacctcaaataataaggaaaattttcgaatgaaaattccaatcttttgccgtcaacaataccagctcgaatatattccctgaactttgcagcttgttgtgccctccggtttcttgtcacctcgttttcctcatctaatatctgatactagctttgttaatatagtggtcaatattgttgatgccgccagggtccaagggaaacatagagtaaatacctccattttggaatcttggttgtggctgatgactactccactgtctgcagctttattactttgattgttaacaggaaaatatccttccacgccttcttggaccccagaagtagcaggattctcacgcgagatttcaagcgatgccaacatcgaaactcttgatggatctcttgcctctctctctaactgtagaaattttcctgcaggaacctgttccccaccagatatgactgtaactttagacatctgctgatatatctggatagaccttaatgggaaaacttatgtgtagttcatacaagtatagacatctgataacatatctggatacttgttgcatatttcatacagaaaagaaaaggatacgaaagcatagctcctgtttaaaccgaaaaccaattcgtcaccagagtgtagctcatggctgacattcttgatgacaaatgctttatttatccgcagaggtcccccggttcctgtgatatctagaaccgctacaacattgccattgcgctgaacatgtgcacaaacaataagaatatatctccacactccacaaaaaaaaaggaataaaaatctgatgattatcaaaaatctacctgaattcttgtgatcttgcacaaaaatgcaccgagattccggtcatgtaatgtgaagtcggaggttaaacaagaaccaaaagtgcatgaagattcataaaggcaaaggttttgttgctgaaaattcataagtagctcatcaatttgtcaggataataaaaccattaaaccttaaaaaagtttctctctttttgaatcaaacctttgcagactgtgatagcaatttacaccatggggtcttaaatgtacagtgtcgatatgtccatcccgaaaaagaactatctggcaaagtcggtgttaagcctagaaatcaaaaatcaaagatgaaattgagaatccaatttcaaaactgagataaaaaaaattgcagaaagatcgaacaataatgaagagtgacgacggaccttcggcaatcttggcgtcttcggaggttggagcttcactgctatcggtagaagcgccgctgccatctcccaactgaaacgaaaacggaaatccccaaaatcgccctaaatatttcaaacgagaagctccagatggtgaagaggaagtaaagtctccgatcagaaacctttgagcgtttagatgaaggagatttgtctccggaaggagacgatggaggaattctcttgccgctgcttccgtcgggaagggttgtattgttctcgccggagatagattcactccgtcccggtgacaccatgacgatttcttgaagtcttgcgttgattctttgagagttagaagaaagaatcaatgcgagagagatgatgaatttcgaaacaaggaaacagaaatgtgctgagagtgtaatttgtgtatatatacgtataagcctttctcaaataacaccggtttaactcgagcaagcccggtttaataaaaccaaaattcaaaaggaaactaaggtaattttctttaccacatttgcttatctgtgattgttgaacatttgatagccaagggcctaagagcaaatgactagttaggtgatgtaactttctatcttgttcacaactattgccttgtgaatatgttcttaaactgcagtgaacataagttttggaagcaattctgttttccaaattttgataattgtcgcgaggatcctgattaacggtgagtattcgtgttatatatttcttatgtattacaatttacaatggtgttatgtaactgatgttcaagcttacctgttttacaatatcaggtaccagttatagacatagtcttccactgtattgaatttaaaccgacctttctttggccgtgtttctccatactcttctttggagtcttcattatcttttcactcgacaagttaaaaatcttctttgtggaatattattccataacttaggataacaatttagtcttttaaattattgcatatgcgattggagtcaactgaaaatgtaagtaaaattgtggaagagccaaatgcagattccttatgcaatataatagatggggaaatgggagcagaagggaagtatggaattgtttttctcgaaaggcaaatgcgtagtccagactaaatgaagagtcaggtaagatctctctgtctctcttaacacaaaaaacaacaataacatcaaaaacttcacaaacactcaacacaatcacaaatacagaacaagaagcaattaaacaaaacaaacactccactctcaaactaaaaaatttcacacgccacgagacacaagaatcgacaaaaactccacaaaatacaaaattgctcatgtcacgaaacacaacataaaagtctaaaattaacccaacaaattcacaatcacctgaaaacaagagttctcaaaaactttctttctaatttagtaatgatttactagagtctatttataatgacaataacaacaattcatagaaatttatgagcacatttcatataatgtcaaattgagattacaaaagtctaaaattaattaataaaagcaaaatccttgacacaagctctctatgctatgagacacggtcttggttgaagatagacatcaactcaagcaccagcttttcatcatgctcaaccacatacctttttaagaaggtctgatcggtacatgccaaaacagacgccattggagggagttcgcttccaagcaatcctttggacatgagagctttgattacattacaccttgggacagtcctcttctccatgctatatccaagtacctgagggaacaaagtaatgaccttaagtggccaattcatcttcttcaccacaaactcagtcttcttcttcaccatctctgcagaatatccaatgcactgaggaaggcacttgaccatcatgacaaactcatctctgctgaatcctaagcctataaatgtttccatggagttcaatatctgctgctctgaagcacgtaagcatagtggattcttcttgaacactgacaatacctcatcttcgcacagaccacacctctttaaggcttcaaatgtctgaattatcctattctcagagtatccaagaaaggcagggcacttcttgaaaagttcccatacatcgtttacagttaagccaaatctcttgtagacattgaagttttcttctagtcttttgtcgctcaatccgtaaacaatgcataaagcttccacaaactttggagtggtgggatcaaaacccatcccaacaaccttgttgagtgattcttcaaacttttcttttccacagcagacatggtgattagagaagagcaatgagaataacaacctttgaggcacacccaaatctctcaaaaccaatacattcctgattttattctcctgcttactaccctcaggcaaagaatgacacagcttttcgaacttggagctcttatccgcttctataatctctttgacgatatcatagtatctgccgatacttttgtcccctttcattcctaagattttaggaactttagaaacaatctcagtgagctcagagcttgaagctcctctagactgcatcaacagaagcttgggaccaagtgaattttcagcatctgctacaagcaatgttggataatccgaaatgatgctggagatctgagaatctgtgaactcatgacttctaagaagattcagaactgtatcaggattgcccttgttctcgaaactgactttcatcgagatcgattctgcgagctttgaagctaaacccaatgaatcaacgaggtaagagacagtaaagttgttaccttttcgactatctctaaagctcacatcagcagcagtagcaacagaagagaatgaattggaaaaaacagagaatacattttgcaaaagcttcactgaaacactaaagtcacgccctttctgaaactggaccaaccttttaccatgaggaactagagaagaacacatgactataccaatgcgattgacagacaaatgcttgaaacaggttcgaccaagctatttaaattcgagaaaactacaggatccaagcttacaaatatacatcgagtggcgagagtgatcgatgagtgttcgagaaacccaaaatggcaaaaatcaaaatttgagggggagaaggaagaaagaaaaaactagggtttaatggtttatgagcaaatccctaattacaaagtaccaaaccggtttattttagattcaattttattttggtatacgattgttaatttatgtgagttgtgggctttcagtcatttctattattggtccaattataattcataagggaagctgggccaatcttacgcaaaagcccacttaagatttgttgcttgacgaagggtttccagttttatgttgcaaaggaaacaaagaagtaaaaagttaacctaattttttttttgccgtcttagatttgaaaatctacagaagccctacacaaaatctcaattccatctctctatttatacacggacatgtgctcagaagaaataaaaagaaaacttaaaagatggatccaaaacagaagaaacaaaatcttagaagatcaaaaaagaaaatcacaagtcgttctttatcaaatattgatgtaggagacgcgatgaagaagcaaaacgatgtcgctgtattccttacgggatattaatctcttccgtagccaaaaactctaatttcgtcttctctcctgcatcaatcaacgccgtactcaccatggttgctgctagttccggtgatgaacaagatgatgaactaagattcttcatcctctccttcctcaaggcttcctcaaccgatgaactcaacgctgttctccgcaaaatcgcttccagtgtcttcgttgacggaagcaaaaaaggcggccctaaaatgcgtgggcataagaagtgcgtaaggaggtgaatgcgtgggcatcaagtcacacaaatgggctcatcaaagatcttcttcctcttggatcagttacaagcctaaccaaacggatttatggaaacgcattgtacttcaaaggaacctgggagaaaaaattctccaagtcaatgacgaaacgcaaacctttttaccttgtcaatggaatatcagtgtctgtgccattcatgagtagctctaaagaccaatacattgaggcttatgatggtttcaaggtacatcagtgtctgtgccattcatgagtagctttgagaaacaatacattgcggcttatgatggttttaaggtactcagacttccttatcgacaaggccgtgacaataccaaccgcaacttctcaatgtatttctatctaccggacaagaaaggtgaattggatgatcttttaaagagaatgacatctactcctggattcttggatagtcacactccgagagaaagagttgaagtcgatgaattcagaattccaaagtttaagatcgaatttgggtttgaagcttcaagtgttttcagtgactttgagattgatgtgtcattttaccaaaaagctttgattgagatcgatgaagaaggtactgaagctgctgctgcaactgcttttgttgacaacgaagatggctgcggttttgtggagacgttagatttcgtggcagatcatccatttcttttcttgattagagaagaacaaaccggaactgttttgtttgctggtcaaatctttgatccttctgcttaggaccggccttaaccggatcagagtttggtatttgaaaatccttgatttgttgcttcacgacgaattctaattactgtaggttaatttttattattagtctttgtcttaaaacactttttttttttttaatgattggaacattttgttctgatttttgttttcccaaattctacaaaaattattctataaattttccttgtcaatttgctatggtcactttagttcggtttaattctacaaaccgtttgggtaatgttctattatgaatttacatttttctaaatgcttcgtaaaagttatatttacattttattgtatttttgaaaaacataaaattgtgaattctgaatctcaactccaacttttaactatataactttgcgggtaaagaaagcaagcaaacttgcgtaacaagcaacaactttaataaaaggaaaatttcttccttttatattccaatggggagatagacctaaccctagctctgcctcatcatcttatatatatcttctttagtttctctctatgaatatattcatatgctcaaaagaaataaacagaaaacttaaaagatggagccaaaagagaagaaacaaaagcttgacacatcagaagtcgcaagtccctctctctcaaagacgcatctaaagaagaagaaaacgaagaagcaaaaaatcagaaaatcacaagaaatcacaagtccctctctgtcaaagaatacagatttggtaatcgcaagtccttctctatcaaatattgatgtgggagaagcaatgaagaagcaaaacgatgtcgctatattccttacggggatagtaatctcttccgtagccaaaaactctaattttgtcttctctcctgcatcaatcaacgccgcactcaccatggttgctgctagttccggtggtgaacaaggtgaagaactaagatccttcatcctctccttcctcaagtcatcctcaactgatgaacttaacgcaattttccgcgaaatcgcttccgtcgttcttgttgacggaagcaaaaaaggcggccccaaaatcgcggtggttaatggaatgtggatggatcagtcgctatctgtcaatcccttgtcgaaagatctctttaagaatttcttcagtgctgctttcgctcaagttgatttcagatccaaggttagtttcaatatctctagttttcttgagaaacatatctttctatagagccatatcttatattaactggcttgtatagtgtaacgtgctaaacaagttaggtttagccgtctctcttttagagagcatattccatattagtacacttttcgattttaaatttgctttaattaggagtgtaaaacataacacattcaatgttttcgatttttctgataatctatatcattgcctctttggttcggttcattgtggttttgtgattatggtttttgttgttttgaaggccgaagaagtgcgtacggaggtgaatgcgtgggcatcaagtcacacaaatggtctcatcaaagatcttcttcctcgtggatcagttacaagcctaaccgacagggtttatggaagcgcattgtacttcaaaggaacctgggaggaaaaatactcaaagtcaatgacgaaatgcaaacctttttaccttctcaatggaacatcagtgtctgtgccattcatgagtagctttgagaaacaatacattgcggcttatgatggttttaaggtactcagacttccttatcgacaaggccgtgacaataccaaccgcaactttgcaatgtatatctatctcccggacaagaaaggtgaattggatgatcttttggaaagaatgacatctactcctggattcttggatagtcacaatccagaaagaagagttaaagttggtaaattcagaattccaaagtttaagatcgaattcgggtttgaagcttcaagtgctttcagtgactttgagcttgatgtgtcattttaccaaaaaactttgattgaaatcgatgaaaaaggtaccgaagctgttacttttactgcatttcgttctgcataccttggttgcgctttggtgaagcctattgattttgtagcagatcatccatttcttttcttgattagagaagaacaaaccggaactgttttgttcgctggtcaaatcttcgatccttctgcttaggatcggccttaaccggatcagagtatggtatttaaattttgattctttgtagttttagattgttttgatttgctgaattatatttgataaacaaggagaaaaacgttataaacaaaagtagaactcaaaagtagaccaaaaaagatacatagaggtaacaaaaagagtctataaaaacccctacaatacaaatatacaaagtcatgtagaagagtaataactcttgtttattctctgacgtccacaatattataaccaagatgaaatcactccttcatctcaattctctttcattcttcatcaccctctttttattttctatctcataactcaccgaagaagattcacaaacgacatgagtgaatcaacatctctatgctctgaagggtacttaatagcccgtggagctcttttcggaaagagaagtatcgtcgggaagctccctaactgaagctcttgcttagcaaactccttctgctcaccgtcagctcggaatttcgccactttaactccttttcccgcaagtttctcagccaattcgatgtacgatgcttccatcgcctggcagaaagggcaccaaggagcgtaaagtacgaccaaccacgcctctttacggttctctagcttcaaaagattctcaacccctcctttgctcaatgcaaccacattgttgctttcaaatatctcttgcacagcagcaggctttgagtctgcagcaccatcttcctccttgatgttccctttgtgtagaccacattctttagctttagcatcttcccaccaccaccttccttctctctcatgttggcctggaagcaccggcctagtacacggctcacacccgattgacacatacccttgtgcgtgcaatgcattcaccggaacatccatagttctcagaaagttccacacatcagctccttcaacattagccaaaggattccacttcacaagacttccaacaccgccatctaacccttcaaacactggatcaacctgaacaatagggatctcagatctcgtacccggagattggtctttcctctgtcctgtaatccaagctttaagacccttaagagcacgacgcaaaggtctaactttcctcacacggcaacactcttgatgaccatcttcatagaatgagaacaaacccttgttcctcactaaagcttgaacctcaactgcatcaggaaacatgtactcaattcgaatcccgtactgcttctcgactgcgtcaaagagcctgtacgtttcagggtttaatctccctgtatctaaactaaaaaccctaaatggctttccagttaaacgtgcatattcaatcaatgcaacatcttcagctccactgcaaatcaaaaccagattcataagtcaactaaagttttattttttatcctaactgaatcaattgctcaatgatgtataatcaatgatacctaaaagcaattgcgatttggtctccgaatctctcaagagctttatccatgatttcaagtggagaagcatcttcaagctttttagcaagttgctcaaagtcttcaacttctcctcctttctcttcaacttctgttacaatccatcaaaatcgaaaatcagcaaaatcaatcagaaaatgaaattcgaaatctgagaatagtgacaagcacgaaccaggagcaattagagttgaagcacgagtaacccaagattcgcttcgtgaatgtgactcagcgtttaaaggtttcatagagtaacgtctctgagacaaatgggttcgatcagataacctaatcgaacatatttgaagagctgcaaaaaaagacaccagatttcaaaatttctggttagattcaacacaatccagcaaatgggtataacaatgaacaatcaaagattcgattttgggtattttccagagaaaatgaaagagaaagttagtacctttagattcagaagaagctccagaacgagagaaactcgatccagagattgcagttgaagaagaagtaacagctaaagccatttctaatcaaaaaaaaaaaagtgtctctatgatactgaaaaagcttaaagaagctacgaaaatggagaactttggtttggatttgcttcgtcttcttcgttggctgggctagatttaggttcaaagcgttaaataatggccgaccaaagaagagaacattgtaggctgtaaagaatctagacgtttatacggaatgattcgtattgatgacgtggcgagttttgtttggtggaagtgaaatctgaaatgcaaaaactcagcgcttacggttacatcgcgtggttagcattagtgtgtgagatgtggcggctaggagaggaggacacacggctgagaagaaaactttgacaattgttttgaattcttgagtggtttgtacaaaattcattttctcattctatcggatgtacaaaatttattctttcattcattgcatattttttttattcattcattgtaattttaaacagacaatcataattttttattttctaaacgttaagacaacccttagctaattaaatagttttgtataaattaaaattatggtttcatttgtatttttaagattggaatagttttctatttaatatctataactttttttttttttttgtatttgatcactgaaccaaaaaattagttttgaagttgaaatgaagtggttccataattctccggataaaaaaaggagagaaaaaaagaaatatgagtggttcggaaacgatttgcaataatatggtccaatcccacctgcgtatactttgagtcacttgtgtggacaacacacactttgcatatttgatgttgatttagtttttgtttagtaaaaaattagaatctttaacaattactagaacttaatgcgaagtgatagcgacgagaactagttatctaatcctgatatctatgatatggtccgattcctagtggtaatacatgtatttctctgtagttggcacattagaagaaagattccaaaagcatagtaaaactctatgttaaaacttttaactaacaaaaacactagatgttgaaactgtcattgtaccctttaaaaacaaaacaaaactgtcattgatcaagactcaagtatttcatatatacgtattttaatatgtgattttgttgtcgtaaaaataaaataaaatagatgtgtatattatacattcatgtatttaattttttaaatattcgggtagctaaaattaaaagcatacgtaactcagacgaccaagaatttgagataacaatatattacaaatcgaatatatattgaggtagctagatagcttatcattttgcaaaataaagcttcacatatgttaatcgaataatatgcgagtaataatataatctaagaaaactatcataagaattgctgggattttgattttaaaatgaatataaagcgacttgttagtatagtgtatactatacgtaacacttcacttgagtttgctcgatttttttaatattattattgtaagatgtaaccttctgagattataacaaagcttgtatataatgatgcatgaggataaaggcacacttgcaaaatgtaaaaggaaacaagatttggatcttttatgagaaccacttaaaccctttaaacatgcacaactagtggtgaaactacttttaaatttattttatatggtccgtatgcatgctctatatgttaataattccatgaaatagtaattcataagtctcccaaaagtttgattatgatattttggtgttggtggctacttttgcataagattatatttagattcgtgtgaggggaatgcttttctttggaatataatacttgtggtgaagctcacttgctgacctttggggtccaacaaaggatacttattattttagtttcattaaaaatcactctatctaactcttttcttgtcatatgtatgatctttataatttgttttcttcaacttacacacatatatactattaaatttaaactcaaattttaacaaagaaatcataaatgtgttctagttatttggtattgttttgtttctctttgtggtttatcggtttattgaattatgaaagaaaactgtatatatccgctttgaattttttgttgtgtttttttgatattcaagagaacttaaatttatgttgtgggttcattttatcatctcggttcatttttgtttaggaaaaataatttactcagaaacataattggtttaacttcgatttagaacggtttaatcaattaatctgaccctcttgggtttcaattttttagagtgcctgtgactataaattgatctcaagagaattatataccaaataaactaattgggttattttacacaaattttgatattggatatgaagttgggttctttgtacatagcatattctttttattttcataagtgttatgttaaaatgttaggaccatggtccacattgtatacaagaataatatatgtggtgtgagctggatccttgagtaatgaaaggatcatattctcaagttgcaaatttatgaacatcacatcattttgatagaagatttatgcattacccactaagaatagttgagaatatattaagtgatttcaatactattatgtaaaatagcatatcaccgaattttcaatttattaggcaatatatatatgaacatcttttatttacgattttttcatatgtcgatttaggaattaatatggtaaaatttgcctatctagtagaccttgttctaaattgacaccatttaaattttaaaacctttagtaaatttctagggcaacaaataaagtcatcaagtttatggcccattttcattaaacgagatccatacattttcaaatggcctccgtagaagaaagagtctggagactctggatcatgaactaataatctcccctaattttcgtttctctacactatggcccaaatattattggtatttaaattagccacccccataaaatagttccttaactttcgttgctctacactacagcccaaacattctacccccaaaactactctaaatcactaggcccgttaggcatgtaatttgttaattaaagaaaacatttatccaaaaaagaagaaaaaaggtttgtctggtcaaccaattccagtttcgcgagctacaagtaacctactaacctccattgttgtttgctctttaatgatttagtataactgattttctgttattcgtctttcttacaaagtacaacatcagttattgcgattcgatacacaattaatacgattcgatacgttgattcttgaaattgatatattagatcacaatatcacgcccacaaacattttgatagataaattattgttatatgatgtatttgatcataatttcccccccataaatctctgacgtacccacatggccacatgctacaatataactctggtttatctctgccactatatatcgtgatcgcttcatctatctttgccaaaaacaataattttgatatctttgacctctaatctctctcaatggctgtatcatttcaaaccaagaaccctctaagacccatcaccaacatcccaagaagctatggtccaacgcgtgtacgtgtcacatgctctgttactaccaccaatcctcagcttaatcatgagaaccttgtagttgagaaacgccttgtgaatcctcctctttccaagaacaacgacccgactctgcaatcgacatggactcatcggttatgggttgcagcgggaagtacaaccatatttgcctctttcgctaaatctatcattggagggtttggttctcatctttggctccaaccagctttagcgtgttatgcagggtacgtgtttgctgatctaggctccggtgtttaccactgggccattgataactatggtggtgcatcaacacctatagttggagcccaacttgaagcgtctcagggtcatcacaagtatccctggacaatcacaaaacgtcaattcgccaacaattcatacactatcgctcgagccataacttttatagttctaccactaaaccttgcaattaacaatcctctgtttcatagctttgtgagcacatttgcattttgcattttgttaagccaacaattccatgcttgggctcatggaaccaagagcaagcttccacctctcgtgatggcgttgcaggacatgggactgcttgtctcacggaaagatcacccgggacatcaccaagcaccgtataacagcaactactgtgtagtgagtggggcatggaacaaagttttggacgaaagtaacttatttaaggcattggagatggcgttgtttttccagttcggtgtgagaccaaactcgtggaacgagccaaactctgactggacagaagaaaccgagactaatttctttacaaagatttaaagaatatctgaatatgtatgagtgtgtcgaataaagagcatgtattaggtttaagtatcagatcttgtaagctgattaaacctccattgttgatgatctttcgtaagcatgcaaacttcaataacctgaactactactttttacaaataacctttctagtctctttttacatggcggaaacattattcatatttttaagaaaatctactagtacagattacaatatacagagtataccatgaatatgatgaaccaaaacaacatagcttgttacaaaaatagcttacaaagccttcttctttgtgtgcttaacacaaatcaaggcataaacaggaatgttgacaagtccaagagagaccaaaagccagaagaagtagtcaagatgtcctttattaaggtcgtctggaacccaaccatctttacctccaagagctgtgaaatacgccacaagagtgaggatcaacgagctcaggtagcttccgactgcggtattgagtagtgccaaagcgctgcatacacttctcattgcatcaggagattcatcatagaaaaactcaactcgaccaatgaagaaaaagacctctgctattcccattagtatgtactgagggatctgccaaaatatgctcattgcaacaaagtcttgagcaagctgcaaccgcactgtctcaacaatagctgcagctgcaatgcttaggacagagagaaaaagaccaatgcccattcgctgcagatcagttaacccttttggtatccctgtgaaccgtcttacaaagggtacgaggaaacggtcatatattgggatggatatgagcacgataagtgtgtcgaaaaccccgaatgaagcaggagggatctcgaaagaacggattattcggttcatggaccgtccttgttgcacgaatagagtggaaatctgtgaatataggaccgagtagacgatccccgaggcccagattggaaacatacggattagagtcttaacttcttcgacttgagttacagtacatagcttccatgggttggaaaaagcaccggatttagattcatattctgagataacagcagctttgtcaagaaacctgcacagatataaaaacaaaggtttatgttccgatgaacatttccaaaagctcaaaatgagaaactgaaaggggacaggtattttcttgtaaccgtcagtgtgttgaatcttcctgcttccagcaatcatggagtttttctctcgtgtttcatacagaaatgagatatcttcagggagattaagcttcaatttacggtatgcagctacaagaacttggcaaactctagtaatcggactacctcccggtttctgaaaccgataaagcggagttccaatgaagaaactcgcaatagagactcccataaacacggtgggaatcaagaaaccgagtccccacccgacattttcttgaacccaaactaacaaagtggatgagataaatgaaccaatgttgatggagaagtaaaaccagttaaagaaagaagcttttctaactcgttccctcgggtcagtatcatcaaactgatcagcaccaaaagatgatacacatggtttgatacctccagtaccaagagcaataaggtaaagccctgtaaagaaaaccgcatactgaaccgttgttgctggtgagcatagagccgcagcaacgccagcacatgccgctggctttaaaaccggaagtgaagccgagagtgtcaacaaagccattccctaaattcaaaaaccaagattaactaactatgcaaatcacctaaacaaacaaatgcaagtatccaaagagattgattagtcttacaatgaaataaatagcagagaaagaagcaatggtccagtatcttccccagtaagaatcagctataacagctccaatgagaggtgtgatatagcaagttccttgccaaatcataacgtcactagctgcagaaacattggactcgtgtaattcacttgtgtagtaagtgattagattcttggcaattccatagtaagctaatctctcacaacattcgtttcctgtacattgagaccaaatttggaggttatatataagtactgataaaacaagaattttttttttatcttttttttttgtttaccaagaataaagggacaagctttccagtttcctgtcttcttcttcgatggtgggtttccataaatgtcaatagaaccatcttcagctgtagaagacaatccggtcaagtgattgttcacttcctcctgagatattcagacaaaaaaaagattggatttttgtggttagaatcttgaacatagtggattctaaaaattgaaagtatagctataattagaaagatgtcaaggggtaaataaatggagagaaattggcaaacgcaaattgatagatttaagtcgaaacctgtgtaagaagagattcttcaacgtcaagaattctcctttcgtcttcttcattcgaattcaccattttaaagctattgagaaaagcaaatagattactggaactcatcaaaaacgctaaataatccgattgcttgcacaactcttggtggtcggtcccattgatggcccagtataccaattaaactaaaggaattgtttttattaaatatttttaaatgatcaaaattgactcttctttgcattttttttaggagacaactccaacaatagcacaccagaaaattagaatagtctaattattagaataccaaaagtaggtaggcatgaggttaatctatttaaaccgtggatatccgtatccggtttttgaaccaaacaaacggatagccggccagatatacgaatagttaaacgacggatacaaataatcctagaatttaggccggttaatagatatctagatataacgggtttgattgattttgaaaaaaaaagatcatttaaaaatatttaataaaacgattcttttactttttatcaaaatgatcaaaattcaaaattgactcttttcgcatttttgtttggtaggagacaactccaataataacacaccaaaaaattagaataatatttatagtctaattattagtagaccaaagtacgcatgaggttaatatattttaccacggatttttatccaaacaaacggatagccggccaacatatgcagatagtaaaacgacggatagtccgaataaagatatagatacgaataatccgagaatttgaaccggataacggatatccggatatatttaagtccatattcgattttataacttaaaagtcttatgatttcattcttcaagtgttaaagctcaaaaaaaaacttaaacccaactttttaagttgtttttattttattttcaatgttaataaataaatcatatgccaaaaaaagtaaaagtaaaccaaaaccataagaagaatttaagaagttgattaatctcttttttcagattttaaggataatttaagtagggaaattacttgaggtttttgaactttttgaagacccaaaaagaaagtgaatgcaatcccatattgatttgaaagttaatgcattaaagaccatccccaaccggaggcttttaggtgaggccctaacaataaaaaaagtaaaaaataatcaaaagttagtaggaacatgagagagaaactcttaaaacccgtaagtaagggacgagctcacaaacaaaataacacatgtatttttattactggtctatctgtattaaaaaaatagattataactattaaaataaaatctatttttttgtctttttagaaatttttagggccttaaccgttggacatgctctaagttgcccatggtattgatttggtacgagttaatgcaatcaccgtctttgttttaaaagaaagttatactttccacgatacgaaacatttatgttggaaaattattttaaattttgactgttaggtgattttgtagctatactttcgcatagtcatccatctgaatcaacacacgttaaacggctcaagtgtgcatgattcttgtggacattgcatctctgaaatttcaatgaagcgaagaagagtcattatttgtcactataagataatgaatgattattaaaacgtataaaactctcttcacatctatgtatttctctctaagtaagtacaaaatacacattatttatatacatgtgggaatgatattaggaacacaatctcaaagctacacaaacaaaatattatcttagattataaaaaaaaattagagccaaaaacgatgaatatcatcaagttacttgtggtggtattcattgcagctttgagtggtaatgttggagcacgtaagatcggaggaatggccaataataccaaactcatgaataaaaaacagccaattggaaactctactaacaatgttactggtggagccacaaatggcaccaaagctcctcttagtggtggcattagaggagttgctccgtctcatgtaacagaaggcggatccactaatggcactaaaactcctgttattggtgtcattgtaggagtttctcccatcaaagaaagtggagccactattggcaccaaagctcctcttaatggcgttttaagaccagctcctctacgtgaaggtgaagcaactcttgccactaacaacactggaaaacctagtgtttccgttatgggagtcggtaccaacgtacaaagcgaagttctttttactactaaaaactttgaaacgagatttgtcatcaatgcaaaggtgagtgaagatggtagcaacggtgggagtggtgcaaagccttgaaacattataaagcgtaagtgatcatgcttaggcttatatgtacgtataaatattctctacaaagtcacattaatctcttttgtatgacaaaacaaataatttagagattgtgactttctatttcttcattttaattttcaacattataaaaagagttggctacccgataccccgcaaaggtttaaagtcttatgtgtaaatcaaatatcaataaatatttccatattttgtcttttgtaggattttttattagaacttgtgtcaatagctttggtacaagaaacttggaccgggcgcccttttgttgttgtagatttctatcaatttataagattttgtcatttgaatttaccatattcaggaaattctcgagtgtaaaaaaacgttatctctaggtttaaagaacttcatgaagttgctaacttaaattgctcgaaaaaattctgtgtggaaagtgagaacaggggattctacaagaaaacattttgtttccgacgaacttaatggtcggagaatttctaaattacgaggaacttgaatacgcttgaataaccattaaccaatataatgcaccaagaaccacatgttcaagtctcgaagataatgtttagcataccaagagatgacgttggagtctaataaaaatattttttaatactgaagaaaattaatataagatcataaataatgcatttattatatgttttaaataaagccattacagacaaaagagtagcatttcatagtaatatttagaggtgattttatttatgaacacaaaagagattgtgagattgtagttttaaggatattattaataggattgatcagcaatatgcatgagagcacctcccgctcaattcttgttccctttgcggcctttcttctcagaggaagtgccgttcacaatggagccggaacctactgtaccttttgcacgtgcagcagcagctttccggttcactgcagctgacgcatttcctttagcgtaagaaccacttttagaagaaacttttgccttgcgacccttggcaatgacttgtccgttagtatatgtggagcaaccttcgttgcattggcccctggacctttgggattgttaaaaccactagtatagctagagacgtaagaggtgctgtcagttgtgccataagcagaaagctgagctccaatgcctttggtagtagtttttggaagagaggttcctaatttggtctccttggacacatcttcgacctgcctcacggtgagttaactcgtacgttataagcataaagcatttaactatattggtatcaaaatctacattcatgttaattcaaaataatatttttcgtctaccaaaatatatccatataaacatgcgattgatcttgagcaagagaggtgttaaaatatcttggtatgactattagttgaaatttgactaatgaaatttaagaatgtatatttattgtaagaaatgctcacgtatctcttttgataaagaatgctcacgtaccttaataaatacatgtgcatcgagtttgtgtgtatatatagatggctatgatctgggaagaagcacacaacacaactcaccacaaacatacaatttaattccaaaagataaaaacaatcaaaagatgaatgccacaaagtttgttgtgcttctcgtgattagcgttttgtgtgccattgtcaccgcaaggcatgtcgaagaagtgtctaaagagaccaaattaggcacctctcttccaaaaagtactaccaaaggcattggagctcagctttctgctgctggtattacttccagcagtagtgatgtctatagctctgctactggtttcaacaatcccaaaggtccagacgctaatgcatacgaaaatggctacacaagtaccagcggacaagtcattgccaagggtcgcaaggcaagagtttcttctgcaagtgcttctaccgctaaaggtgatgctaaagctgcagtgactcgcaaagctgctgctgcacgagcaaatggtaaggtagcttcggcatcaagggtgaagggttcctctgagaagaagaagggcaaaggaaagaagggcaaaggaaaaaaggattgagcgtgaggtgatctcatattctcatgcatgcgaattcctcaaacctatatataaataatatcctaaaaactacaaactcacaatctctttcttgttcataaataaaaccagagattgtcttacgtaattacaaaaggaaaagaaaaaaaaaaaacattttccttttgaaaagctcaattctacagatcctcataaacatatctaaaaaccttatccgtgttatgtttcccgactaaactgattttttgtggcctttgctaaaacacgatagtcactcatgtcgtcatgtcgtctagcctactgtgttacaaattgattaggcacatacccaacattaactcttcggcatattcactgtcccaacatgaatatcaagttgaatggagcctactcatttcgattttacatttacggcatctccaagtaagatatgaccctttccataggtgtttcattcttatctttctatctaacaaagttgatgatggagtctccagcgtttcatctatcaagatttccttgagccccaacacctaaatgagcaaaccttctacaacagtaattaatcgcctttaccatcaaatcgatctattttgatttttctttttcgtcacgcacaccaagaacatgtggctctgatactagctagctgttaagatttaagaacgaaacactcaccaagaaccgtgaaccacgagactgattgggagataagtgagtatcgcgaacggtgatatatcgagaaagagaggaagaagtcacaagaaaaaagaaacaagaataagtgtgcaacggacgattttatgttttcaaatccttttaagaggaggatcatacgtctacgatagaaataccatgtaattcagtttactttgagatgttacatgttacaagagatatgaggagctcaaatagattatcttccttttttctatatttggacgtcatttaaaaagactattaaagtcgtaattattgcatttattttatttaacaatagacatcacacaaagagtagcactttcatcataattaataaaggtggcaatctctagtcttatttatgaatacaaagagattattgttgggtttgtagagtattatgatatataggcggagaaatgagcatgatcacctcacggtttaggcccggtgctgccaaatgcagtagtaatgccacgtccaaaaccatttcctttggcggttgcacctttgcgacccgctacagcattagcttggcctagaccgaaagcaatactcctagaaaaagctgttgcgttgggaccctttgcaatgacatatccactagtaattccggagccgcttccaattgcattgctgctggaacctttgcgaccctttattttagcatcaccaaagccattgccatcacctatagactgagtataaacagtaactgtaaattcagctccaacgcctttggtagctttgggaagagagacgcttaattcggtctctttggatcttttctcgagttgcctaattgcaccaacattgacacatacaactccaatcaagagaagtacaacaaacttaatagcattcatctttatgtctctcctttttgttttctaattaagatgtttttttttcaagtgtgttatgatgtgttcctcccacatcgcagcctctatgtatatacacatgaaattattaggatatgagttcgtttcttacaagaaaagatatatactttaatgctatagttaatattttaacatataactactagtctttcctagatgtcaaattaatgttaccatctaaacacgtctagccaaaatctatctccattataaaaatttaaacatgtttacattttgaaactagatatgcttctaaactgtcttgtgatttaattatgtgactatcaaatatttaattagttgttttgtgtaacgtaagagtataccggtgtcgtgatttttttttttacttaattccattttagattactttcactaaaagtctaaaacaaaaggtcaaaggattgcatttaactcttatgaattgagatatctaaaataacacagtttagactaattacatactgtttactgtatgtatgaatcgcgatctaaaatactgcattgtttccttaattttcatagatattctctataaatttttttctttgtgaaaaaccgggaaataattctccctgatttaattaaaaatagaaacgaaacaattttacatagaaattcgtcttggaaacaggatctaacaacatcttccctcatatatattaatcggagcaacctccaccaaaactaaaataaaaacataaaatcctaaatgtaaagagaacttagagttagctaatatgtctgcaaggtaattagattgtttatatacatgtgaaatatggacaatttaattttaatttacaaaaaaatcatagtacaaccgtgtcaggaaaaacaacggttgttgattttgcaaaagggtaaaaggcctattattattttttaaacaaaattcattaaaagattttgacatttttgttggttttgccaaaagctcaacaagatattgagacggtttttgtaaataaccaactctgaattcacctaaaactccaaacacgtaattctctgttccaaagcaatgtataggccatcgtaaactccacaaagctccgctaacggtgtcaagcatcgccctacatttaacccaagccctccacatcaatccctttcaccagttctcaacacgtacaccaccagcggtagccagcccggatttccatatgatgcaccatatgtataaggtttaaacgagcctgcttgtggaaccacccaacctatcatctattccaccataccgctggccctatatgcttcccacacgccgcatttgctgcatataccttctaagccaagtcccgagtccttgagaaacctcacgctatccttccttaccctattcgccccaaagacattctctaccataaatgaaactcactgaacattatctttggatatttctcaattgctttatttttcgtaatgatagttttcattaataaatacgcaggagtgatttgggttgccgatagcttaaattagttgtatttaaatcttaattagtaattatatccaattctaacattattagtatttaaaagtacattctgaataaatatatcaaatatgtgtaaaattaggagatacctggtttatccaatatatacaactagattttaacccgcggtataccgcgggatgatttattttttaaaagtaatatatattaaaacttgcaaattttatttttataaaatatttatatttttacagtttataattattattaagtatttatatatattaattgttattaaaaaataataaattaaagatttaacccgtattaaaacggtggattaattatattttactttttattaatgttgattcaaaaacccgtccctgcaaatccgtcttgccaaaaacccatttattttattaatattaattttatttatgatatgactctgaattataatctaaacattttagctaataacataggagtgcaccatatttatttaataggggaatgtaccatatgacccgaatgcacttttacccaaatccaccaaaaaagtcttgcaaaactactatagacccgaatgtaccatatttttttgtgctaatttttatgtgattaagatttaattgatttcgtatataaaatattaaattgttttacgaacttatttgtttataatttggtaacagatagatatttgaatattcagtatattttgcttcagtttaggaaatctttgatgatccgtctttaaatccaataagtcctataattaagagatgaatattgtcgttaaatgattttggtaatcttaatgatgtcattaaaagattttgtttttgattaaatttttctaatggcattgtcatgtaattaattacaaaaattaaggttacatttaaaatgtacttcccaaaaaatatagtaggacgatatgcacttttatccaaatccaccaaaaaagtcttgcatatatactatagagataagaaacgatagtcggttttgataggtataagattagcaaatatatttgttcgcttaaattagttaaagaatacaaattgaaaaggtatattacactttattcgaatatagtatcaaaacttatatagagatttgataattttttaattgttgaatactttttttttgtgctaattttatgtgattaagatttagttgatttcatatataaaatattaaattgttttacgaacttatttgtttataatttggtaacagatagatatttgaatattcagtatattttacttcagtttagaaaatctttgatgacttgtctttagatccaataagccctgtaatctagatattaacctgcagtataccgcaagtacccttatattttagttcaactaaaaacttttattgtaaaaatgatttaaaaatatatgatattattttatttgattttaaatgtatagtaaactgtgagttgtatatgttttgttgatattatctatattgtttagtgtttaagattatacacttatagtttgattgttaatttaagagtttcacctgtagtatatcatcttgtattaatatcgatctaaacccgtcaattctaggattttccagcttgtattaaaaattgaatcacatctaatatgttattaattattgtagtatataagattataaattttcaatataagatgtatgaaattgaatataaatatttcaaattatgacatgttactcagtagaaagttttcttaaatctatttttcacccgttataatattttttcatgtattgaacagtttatattcgtttttaaaaattcaaattatggcatatgtgaaaaaactctaattatttttctataatgatgatattatttttcggcaaaaatagaatcatataaagatgagaagtgaactataataattaataaaaaattaatatgataatttagatatcaaatctaatttgttgattttaattggttacttttttgggaattaataatgtatttcgtttttctaattaaattaaattaattaaaatttagatatcaaatcttatatgttgattttgattggttattatttttggaaattaataatgtatttcgttttttaattaaatttaattaaattaaattagtatttgactttttaatcctcaaagagataaattaattgctttttaaaaatttatttctaatggcatacctatgtaattactaacaaaaattaatgttacatttaaaatgtacttcccaaataatatgtaggatatccctctatacgtttgatggccctagcttgagtgtgactattatattatggacgcttacatcctaagatcatgtatataattatacatttttacctaagatatagtaaatctagccaaacatgcttaattctattgacaattgtatgtaataattcagcatatgagaaagaactgatcctagcccaaaaaatgtctggacctaaaactcagtttgctgattataacaaaacaaaccctaaatatctatacactatacattgtcgaaatatatcatttgaatatcatacggtttgctaatatatcttatttgagaacaatacgtaaaaatcatgaatactactactgttgaaagttaggttaaatgaatatacgtaatctaggtaaaaattaaatgaatttaagtcattcaagtaacatataacaaatacaaacacgttgtatattatatatgtaaatgtatgtatgtatgtggtgatatatatatagccaatggcctaatgatgctgtgaacaaaaactcacaagaaaaaaaaaaaaactcacatttttgtgtttcagagatatttaaagaaaaaaagatggaaatcactaagttgcttgtggtgattatcgttggactagtgagtgccaatgttggcgcgaggcaactccaaggacttttcgaaaacacaaaattgttggatccaaaattcgatggtgagccaatttgtgccgctgggggaggtggaggtggtggtggaggagctagtgttgaaggtggtaccgaaaaaggtatcgacgataatgcaaacgggtacggagatgggaatggaaatgggaatgcgcatggacgcgccgactgtcccggaggcatagttgttggaggtggaggtggtggtggaggcggaggtggaggcggtggcggttctggcggcagtaatggtagtttctttaatggcagtggcagcggtactggctatggtagtggtgatggtagagtcagtagcagtggtgagtattcagcaagtgcaggtgggggaggcagtggtgaaggtagtggcggtggtggtggcggtgacggtagcagcggcagcggtagtggaagcggaagtggaagtggaagtggaactggaaccgctagtggccctgatgtgtatatgcatgtagaaggtggtggaggcggtggtggaggtggtggcggcggaggcggtggtggtgttgatggtagcggaagtggcagtggtagtgggagcggtggcggaagcggcaatgtctatcattgaagttgaaatagtatctagtattatgtgtgtccttattctaagcttctatatataacattcttattcgatcttcgtcttatgtgtgatatgttcattgaatatcataatatgttggtcgcatattcacaattttatatgtttgtgtattaaaacagtgacctattgaattacagtagttctacaaccatttacaaaatgggattaacaagacgataaaaacattttgaagattcaaagaacaaaacaaagataccttagaactcgtatatttcaatctgcagaacatcatagttaaacccgtggccattgaggactcactacctacgaatacgataaacaaagaatcaagttttattaaacataacactccaacgagttttttgactcttgacgcaatatttggcgaatttaaagtaacaatccattttgaaacagtggagacacaataacatatcacttttttttataagacagatacaataagactaacctcgagagtgctaaacaccagtctcattcggctggccacaacggacggctcctctgattgtcctgtcaccgccatctgctccaactgaagagtcttcacaggcagcctacactcacaccaaggtccaataatagcattgtcgtaattcgtaaatacacatagatttcacactctttacaaacatttatttttcatcttagaatggatttttaaaaatgatagaatcgaatatatttgatcttaccaagccattcctctaatatagtatgcatttgctataaccgcgcaaaagcctctccatttgcttagaatttcatcagaaaccgaaggagtcgatgaccatcttatgactgttggttgcggcgtacacaagatcgtgatgaatacaatcctaagccacaatatgcattcatctacctgcggaattaaaaccgccagttaaaattgatctgatacgacttagctcatatattaaccgatgatatcacaagttcgttgtaactaactaacctcagacagcgtaattttggatttagtctgtgtgcttccgccgtaattctccattctctcaatctctaaacccgaatctttcatagccattagttcttttctcaaatcttcatctgtgcagccgagcgcatatgcattcacaccagcggatatgaattcctgaagatacacacacaaacaaattaatgaaagatggatatacaatcgagaagaaaacaagaatgactcaaataaaaaaaggaagttacttttaaggtttcgccttcaccgcgtccaatcacggtcctgtaacgtcttaaaagacttatagctatgttgggtgatgaacggtactcatcatccgatgaaatcgagttgttgcgtgagttacaaaacttgatgaaatcaaaagaacaaacacaaaaaaacttaggagcagtatacagatggatgtataacttgccgaagagacgaaaactttaattactaaccatccatctccttcgaggctgaatttgatattttgtagaaaaagatgaatgataacactctacattgctacaaggaactattgatcttggggagacagaacaactaatcagaggaccaaaaggcgaggtcttgaatctgcgcaaagcggcatagcagctaatagggatttggaatttgttgatagttcccgcaggatacgcaactaacatttcttaaccatatcaatgaagcaatgcccttatctgcataagagagaagcttttttctttgaataacacaactatattaggaattaagatgtgtaagagtctaagatacattgatgttctagaaaaaaaaaatcagcttccctgttcaaattgaaagttgaaaccctaatttcatctctcaattcattcttagtccttagagatatccataagtggcaaaaaagaaaacaaattcaaatgatttggatttggagattagctaatattgcgatcagaaaatttgtattagctcaagaagaaaatcaaaacctctgatctttggaaagtgtcaagaatctcttaatcatactggaccaattcacagatacttacgatcatttaaatacatctgagattaaaaagcaagatatgaacaaaaaaaggcttacctttttgagaaattcagagtcagcaattcatatgcaaactttttgtgtgttttaatcgctgcaaagaattggatgaagcacaagctacaagtgtaagaggtgaatttgaagccaccaatattttgaatggctgcaaaaagaaaaacatcaaattttcaatcaatgtagacaaagattctttttattttatttttgggcactggaaaagaaaaacagatagaagcaaacaagaatcatggggattcccaaaacgatgtcgttggaatatgagtccaaatatgatgaagagaattgagaaaagagagaactttcaagagtaccttatcaatttctatctcaattctgatcccaaatcaatttttatgtttaagtaaacataaataaaggctgctttttacgttgaggagtcaacccaactggatcctctttccttcttgattcttttactctccatgttcattctcacttgagaagcttcgtcccatagtcccatatccgcatacatgttatataacagtacataaggtgttgagctctctggttcgagtctcgacattgcttcagctgcaacatgtgcaagccctacattgttatatatcctacaagcatccaataatgcaccccataccgttttgtctggctcaaaaggcatactcgttatgatatacatggcctcttcaaactgcccttgtccactggtaacgttgaccagggaagaataatgttccatctgcggctcgatcttgtacacactcatcatggacacaaactgtgctttagcctcatcaacaagtcccgcgtgagcacaagcgttcagaactgagacgaatgttatgtgagaaggatatatcccgttgcttttcatcgacccgaacagattcaaggcctctgaggcattaccatgaaatgcatatcctcctatcattgcattccatgtgattacttctcttttgagtttcatttcatcgaagattctcctcgactccattatttcaccgcatcttgaatacatagtgataagggcattgtggactggaacatcggggatcacagtcttgacaacgatttggtgcatctgcattcctaaacgcagattcacaagcccggtagatgcactgagaagagaagttaaagtatgtgggtcaggcttctctccttcaatgttcatccggataaacaaatcaacagcttctttgtagtccttgtttttctcataagctgctattatcgagttccacgagactgtatgtttctcaggtgttttttcaaagtagtggcgagcaagctctacattgccaacactagcataacccgagaccatcatgttccacgaatgtgcatcacggttcggcatttccgaaaacagagcaaaagcatcttccatcctggaaacatgtacgtatccatcaatcattgtgttccaagaaattgtatcgcggtctttcatctgatcaaatagcaaccttgcagagaccacatcacccactttcaagtaagctttgatcatagaattccatgacacaacatttttacagaacctctctctaaactctccaccatgatcatcaccacagagatcaggaatctgatcaaacagacatcgagctgcttctacttgtcctctctgtccatatccaacaatcaaagtgttataagcatacaccaaatcttcccttcctgaaactaaactcccatactgacccaaaacccacgcagcttctgaaagtctctcgtttttaataagaccagccacaagtgcacatagaggagacgaatccttcacaggcattttccgaaacaacacaaccgcgctatccacttcaccgttctgacaaaacccagtgatcatagcactccatgacactgcatttctctcaggcattttctcaaataacaacaacgcttcacctatcctccgattcttcgcataaccactaatcatagtgttccatgaaaaagaatcccttgaaggcatttcatcaaacagcttccttgcttcctcaagaaacctaatcccaccacatgaaacataccccgaaatcatcgtgttccaagtcacaacatctctcttaggcattacgtcgaacagtttccgtgcttgattcatttcacgccttttcacatacccgcttatcatcgtattccatgtcactgtgttcctcgcttccagtttctcaaaaatatctctagcttcggcgatataccccgatcttatcatctggtttaactctttgttcgtcgctcgaaaacccaagcttgacgaaactgaagtagagaaagagtttgcacataataaacacttaagacaagacgattgatacaacaccttcctgaaaattaacaagacacttcgtgatcggatcatcgtcgtcgccggcgaaatttgcagcgatcaaaaactaaaaaagcctctagctttgaaaattagagtcaggtaaatttggttcagatgatgatgtaatggacattcttcggtttaccatgtttgaaccggaaatcatttggttcaattcagatagtaaaatgtgtctattgtaaaccaaattagcctctgaggcctgactcctgagatttggaagaatcagtcagtggaatggaattgatcagttgattctcacagtcaggtgaattttgattttactgtgtttaaaccggtaataactcggttcaattcagcatttccggttttatagtatttgaaccgggtttgatatcaggtcagatagtaattagagtagaaatttctacaaattgtattacatagtagtctgtagttggttgatcttccaactgaaattttttatccagctagttttgtaactacttttacatacattattttatgggtaattagctttggtttacaagtttcgccatacacgatgtttatttgtcttttggaccagtagaagaccagaggacatgatcacgtctaagtaatcttttgctatttgctgctgtcagtaacatcacactgatgaatatcaaaactgacatggatgagaagataaacatcaagaccgaagcgacatggtctttcacctcttgcgcgtactgaaccgagtttaaagcgagaaatgtgataggaaacgagtaagcccaccatgcgacattgaatctttttatcgacttcttcaaaagatttggcctacaaacctgaaaatgtataagaaaaagaatgtaaaaatgtcggttttcggtttcttggtgtatcgtaaagatgtaaacttaccagagatatgaagatgaagagtgaaaggaagaataacatcttggctatagtatcaaagtttccacaaatagagttccaagctagacttgctgtggcgggtgcagcgaaaaacaagaagaaaaccggtcttagcgtggttgggaaattgtttccgcctggtaagcgttgataaagtgtaacaaagatgaccaaatagtgaaccattccaagtgagaataagcatagagcacactctttccaacccatctctgctgctccccgcgcagccactaggtttgcgattaccgatacttggcttgccgggtttgccattatcgataaaaaccttttctctgttgtgaaccattgaccataaagctttgtgtctaaagtcaagactggaacagcaaagatccagaatagtgtctgatataaaacgctgtgtggttctatcataggagctgattgaagcaatagaagacatgaaatggatggagcgtaaagatagttcactccaatatagtgcgagaactcttccttcaccatgtcaaagagaaaaatacacttgaaggcatacaaaaaacagagtgatacttgtgttgcaagtgctaggtaccacaggagataatacgccatagacgggagttcgctatgcaaatgcaccataatcttccacaacaatgcttggctacatagagaaaggcttattctgaaatatcccgcatggagactactcaaaacagacatcaggacaatgggttcggcatctgcgaggttagtctttctctctttgcgcctcgatattgtgttatcaatcatgatgtgaatttcttgactaggtatttccatctcggtatatcgatgaaatagagcttattttgctctatgttgtgctaacctataaaaaaaagaattcatgtacataagcataaggcagagaaatcaaaagtacaaaacacaagttagtgttggacattcagaaacttttggtaagttcaataacttgtacagtacatatatacatatcaacatctttttcttttttctttcgacatcaacactttttttttcttttgatgaagcgaaaattcttcttcaagcttcatgaataaacatcaaaccatttcaattgcttatatcatcataaattctttcagctgatttataactttaagtattagttccttataattcatacaaagtactaaatgaaatatagcttatataatttaaataaacctggataatttgcagcgaaacgatttaaaaattgttttaatacttcaactgtctgtgcttcgccagtgtctgcacacagattgtggtatactaatgtcgcctagattcctgaactgtcttcggattctgggttgtcgtcttagatccccatttcatctataagactataaccaacgttgaccatgagcccttctcaataagggagaggagataataatgttgccttacgtaaagattccttatataaagaatttatgtgatcctaatatccctttttactacgtcacgacggctatacaattgtttttttttacatacaattgtatactatatacaattgttatatttagaaaatctttataattaaccttaaaaacaagtttaatgtcgttggttgacaaaaagatgaaaaagaaattataagcaaagacatacgattagatttttttttattttagtaagatgattcccaaaagaaagatattttcctcaaaatatccatttggtaaatgaacgatggtaaacaatctatatttgtcaaacaagttgtaaacaaatatttcaattatatatctattaaatttgtatgtttcaactttcaacagattcgtttctttcttattggtctccaacaaaacaattcaaatttggaaatgtgctaccaatcaaaatcctaagcttcacaggtctcaatcaagtgaaaacaatttttttaatttttttttacccaacaaaaaaaagtcgttctcacttagattggaacctgcaagctacaaaaaagccgcttaaaacatctccaacccatctttattattatttctatactctatttttgtctttatttatctctaaaatagagattttaattttttttcctaacaaatagagacaaccattgaaaatggtctaatggatttgttgtaaggtctaataattatggactattttttattttgaagattattttgccaatattttagaaaaaattgggtgaatttatcacattcttaagaaatattataaattaatactcgtaaaaaactttaaacggcaattttaaaactaattccgtaattcgattactgtagcatttggtttcggtgagacttttgtggaaaaaataacttaataatgtcattttaagtcgggatcagttttatacgcattcatgattagtttaacaatatccaaacaaacgaacaacaaaatatctaaaatatattcttcttttttttccttacatagtcaaaagcaatctttatgtggattttttttgtttggtttacttccaaaggtatctaatataaagctaaaaagaagagagagtaccgagtcttgctagtgaaaaggataaacgatgacaaatgatgcattggaaaaaatggaggccggtggagtggtgatggcaaaagtggattggtgtaacgaacgtagaaaattttggaaaataacattgtttttatccatagcggttatggcaatatctctgttggtattttgcaagagaggaaaacccaacaatatggaagactcaactgaatatgcaataatattcactgctaagtatcttataatacagtatgcagtgttcggtgcatcgatcaaagtagaggagatgtggggttggatgccatcctcctctagtcctcctccagaagagtgtagtcctgctgaaagagcgtggtcggaactggcatttgtggtgtttatctgtgttatgacactcgggttgggaaaagttgtggaggttttcttctttaccatgtcgtccatcattggcctcattgcaatttcccatcttttttatccaacgcctgaccataaatttgaaatggtgatgaaacatttttggttcattgttggcttagggatagtaatgggattaatttgtctaattcctaatctcttcttcttccttggctggttctctatatttgttttgatatacgtttttattgtccattgtaatttccctgacaagactcttgttgaagtgttctccattgtatccgaggatttaaatttatcatgaccagacgacttttgtcaaagtgttgaccatcgtaatgtgaggttttagatctaaggctagtaggatttttctgttaccgttacgattttattaattatctgaggttttagaaattttcacaaaaatctatctatatcttttaggagttgaattatatttatcgcataaatggtagttatattgtgtcgaataattaacatggatcaattcaacattccactaaaggcgtttggaaggctcaacaattatggccgatattttcgttttgaaaattttggggtaatcagatcaccctcaagtgtgagccaaaaaagaatttattaaaaatgacagcaaactacaaggactaatgttataattaaatagaaaaactttgaccttttaattaaatctgaaacaaagaaaaaaaaagaagtaaatatagcaaatataatccacgtaggaaaaggtgataaaacaagaaacttgattcttgtttgcctatatatatatatatatgacgaagcatgtcaaatctgaaagttcgaaccctaatttctaattgcacctcttttatatcgatatcttcttccttgggagatcacaatgacgacgttaaaaacttcgtccttctccagtcttccctgggatttagtagaggatatactcgctagggttccggctacgtctctaaaacgattacgatctacttgcaaacaatggaactttttattcaatgatcagatattcaccaagatgcactttgataaagcagaaaagcagtttctggttctcatattgcggttgtatacggtttgttcaatgagccttgatctgcgtggacttcacgataatattgatccatctatagaggttaaaggtgaacttagcctaattgatccacattgtagttcaaggaaaactttcgtaagtaaagtctttcactgcaacggcttattgttatgcacaaccatgaccggacttgtggtttggaatccgtgtacggatcaaaccaggtggatcaaaaccgaagttcctcacaatagaaacgataagtacgctctcggatacggaaactacaaatcatgctataattacaaaatcatgaagttcttggatcttgaatcttttgatttggaaatctacgaggttaactctaattcatggagggttcttggtaccgtcactccagacttcacaataccactagatgccgaaggtgtgtctttaagggggaattcttactggatcgcttcacataaaagagaagaaatagaggaagaagaagaagaagaaaatgagtacttcatcaacgatttcttaataagttttgactttactacagaaagatttggtccacgtgtgtctcttccgtttaagtgtgaatcttcttgggatactatctccttatcttgtgtacgagaagagcggctttcactgttttttcaggacgacggtacattaaagatggagatatggatgacaaataatatcactgagaccaaaaccacaactatgtcttggagcccttttcttaagattgatttgtacacttacggtcatcggtttgggaatgaagtaagttttttagttgacgaggagaataaagtgattgtgtgttgtgatgaggaggaagatgacatcaacgatactgtatacattattggagagaatgaatattggagaaaagaggatattgtacaaagatcatatcggccacgtatgttcagttatgttcctagtttggttcaaatctagcagatattcctagttagagttttgcacattcttctctcatttcgtcatttgactacttaatgatttttaatttctatgtaatgtttaagaaaggtttataaataaaaattatacaaattaaaatcaatttagttcctatcaaaacaagatatgaacgtttataagttataactatgtaactaaacctacgtaattagaaattaaaaactatatattgaaaaaaaaaagcatttgaccgcttagaagttagaatattgttttataaggttcaagagcgcttaagatcactcaaaatagaaagaaaaaagagagcaaaaggctcccaatagatattatcaagaaaccaattcaaaaatctgttcctcctcgattcttttgtaatggaaaacaactttcagacccaaaaagttgatatatctacactttgatcattgaactttagtcgggctctataatcatccaaactttaacctagccttaaacccttctcgggttctcttgtccgcaaattttatctcttgtcagagtctatatatagtgaaataaatatagtatatccatgatgattatgaaaaagaaaatgatgtgacatactgacatatataatgaagtaagcatattcctcaattcggcagcgaaaacagacaagacggtgtggatcaaacggttatagaagaagtacaaatgcagatcaggtggatgatgttgatcaatctcaatccgatacaatcacatgaatttaaaacatagaacgtgattctttcctctcttttttttctacaaaagaattatatcaatctcaatgatctgatataatcatatttaaaacgtaaaaatatgattctttcctgtctttagaaaagtcatatcaatttcaatatgatacaatcatacgtaaaacgtaaaatatgattctttcctttaagaaataaaataatatcaatcacgatctgatacaatcatatttaaaacagaatgtatttttcttgcctgttttatctttaaaaatatcaatctcaatttgatataatctgcaaactattgtccctgaattcacatagaaaaatggagggagtacttgtagcgcaagtcttttgctataggaatccagtgcagtggctctgtataagcaataatcactcgagcctcttagccccttgagtctactcaagaactacttgatagactagcgacatggaaatttgttcgttgtcttatcttggttcgtgatttgccatcttggtcatcagagcggtttcctaacataatgggctattttgcattacacgctcggggttacgaatctttttacacccaaatcagaacgttgttgggcagtcaaagcagctccaactacgtactaatatgggtgtaaaattgagtgacttgtttgagaatgcaaaccgagctaacaatacaatattttggggaaacaactctggcgaagaagattgtaaatctaggctcaagaagtttagttgcacactttagattgggaattatcaggctcaagcatcatgaagaatacttgaggatgaggttaacaaggtatggttgacaagtaaaatcagagaatacagaacaaatagaagtgagtaagttcttgtttaatatctgcaaatttgtaacagagttcttgcttctatctcaagggtagactagttttggttagtcgcattgagcgacaatgttttttgtttgtcttttggatctgtagcagaaccaagaacaggatcgtgtctgagtagtctattgctgtttgctgctgtcagtaccatcataccgaggaagatcaaaactgagatagatgagaagataagcattaagccagaaccgaccggatctttcacctcttgcgcatactgaaccgagtctaacgcaagaaaagtgagtgggaacgagtaagcccaccacgcgacattgaatcttttcattgatttcttgaaaagatttggcctacagacctgaaaatgttaaacacaaagaaggtcaatatatgtttgaaccttgtttcttaataagtgtgtcgataacttaccagggacatgaagatgaaaagtgaaaggaagaacaacatcttcgctacggcatcaaaagttccacaaatagagttccaggctagacttgccatggctggtgcagcgacgaacaagaagaaaattggccttaacttggctgggaagttgtttcctcccggtaagcgttgatagagggtgacaaagataaccaaatagtgaaccattccgagtgagaacatgcatagagcacactcattccaacccatctctgctgctcctcgtgcagccacgaggtttgcgattaccgatacttggcttgccgggtttgctagcatcgacaaaaatctcttctccgttgtgaaccactggccataaagctttatgtctagtgtcaagactggaacagcaaagatccagaatagtgtctgatacaaaacgctatttggttccatcattggagctgattgaagcatgagaagccatgaaatagatggagcgtagagatagttcactccgatatagtgcaagaactcttccttcaccttgtcaaagaagaaaatgcacttcaaggcatacaaaaaacagagtgacacttgtgttacaagtgctaagtaccacaagagatggaacgccatagatgggagtttgctgtgcatatgagacatgctcggtgactcaggcgcgatcattatcttccacagaagagcttggctgcaaagagagaggcttatcctgaaatagcccgcgtggagactacgcaaagcggacatcaagacaacgggtttagcatcagctaggccagttttaaactctttactactcggtattgagttatcgatttcgatatgaatttcttgcctcggaatttccatcttggtttatcgatgaaaaagaggtattggcttgtttggctctatggtttcctaaccttaggatagagttagtatatataagtagagaaattatagataatggagattaattagtacaaaacacgtgatttagggggagttagttagtgttggacaaaaatgatacctaaaaccaaaagtagtaatggaatctcaaaataaggatataacctttttagtaacttttggtaagttcaataacttatacagtacgtctcaacatgtcttgtttaagcttgaaaaaaatacacacacacaaagtcattccaattgattactttacgaattaatcttttatctattgcctgctttacctaactagtacattataattaaacaggattattaggttttcttatcataagatgttaccactatctctgatggcagcgacccactaaattcttaaatacttataattttctctaagaaaaattcgaaaaattagataaacaatcatattgtcgaaataagataatccagtgggtcacagacgtattcaccacctattcatcgaggtcaaaagccagtgccttagctcgaggaataagctcacatgttttgtgagccaatgtagcataaaaccggtcataaaaagtggtaggtttttggtcacttttgaatttgtaagtgccttcttagctttcacttatttagtttatgtttattagaattgtacgatatcatgatcaagaatgtgtgttcttacctcatataatttgaatgagatttgagtatactttatgggatttatgtgctcatatggtgggtttgtaggtgaaaatgaagaaaatggaaaagtcatgaacaaagtttttgaagtcaattttttttgccaagttgaaatctgagatcatttttaagagattctctttttctttcagcaactcactacgacattataatgtacggtttgtgtagacgcttatattacttgttttggtttagtacaccaatattacaaaaaaaaggaaaagattatgttatgtttttcctaggtcggtgatttgtatacaataatagaagaataaatggtcggaaataactcgataaaatgagtcatggtgcatatttgctgaagtcacacgtaattgttgattatatttatagcaatgaataaatggtcgcagatgtttgaataaaatgcaaaaagcttttaaagccaatacataagtaggaatatggaatatgaagtcttaaccattgaaaccttttgcccaaacaaaatacattgaacctttggttatatagaaaactctggaataattcgaagcacttgtgttgttttcaaataaggtggttttcattcaaatatcgaatcataacaagttatttaaaaagaggtctttattttatttattggtgagagttagaaagaaaacatccccaaagctttaacgtatgtttatggcaaaacattgttaacaacaacaacgaggcttcattcttaaaacctctccatgtaaacacaacacaacaaagctctcacaccaaaaacatatcaacaaaagatcgatgttacatttttcacacggcttctgcgaagccaacctgctcgtttccgaagtcaaagacagtgtggtattttcccataaacacatctccaagtatcctggccaatgttaaaaaaccacatcagacagaatctaacattgtaaaaaagcaatcatcattacgtattacgtgtcgcgatatttaccagagaggtccacgaggtggagggatatcaagtgcggtaaagccgctaatacattgtgccactggtccttccccaatcttcagtacgtactgttagttcccacaaacattatcagtcacaaataatatacatatgttttcaaaatgtcatcaagggcaacatatagaatgtacctcttcgggagcaagatcaaagactttgcctccaatggtgaatgaaacagtaggcattttagaaagttgtgagcagtcaacagcagactctccatttggactaggcatgcgctcgcatatctaagaatttacgattttggtatcagaacaaaaacaatatcattacttacttccacaagatataaacttgttattgtctttctacctcattaatgtagttcactatcctctcttgagtcatgttctgcctcaattggctctgtatccacacaaccgccatttcacatgcaggacaacccgcgtctcgaagaccactagatgatcttgtgttttccttgtccaccaccgattcaatccccatactaaacatgatacaacaccgcacaataagagaacaccaatgtacataatagacagatagttatttggttagaaaatcattggaaatttacctgaccccatgggtgccatcgtaagcgcaaagaccaatttgtgagcaaatcttctttggttgagtctggaagaagcaaaagagttgcatatacagcaaaaaaaaaagcatatatgattcattgcgttctgtatcaagtatcatatatattaacaatattcttacctcagccaaaagtaaatccaaaatggtttgtccatactggtcaacaacagtcttgcactgctggctaacaactccagatgctccaatagccttatttatcatggcaaccacagcctagaaagaaattaccaggaaaatgagaacttcaagagcaaacatatactcaaactaactgaaataaaactataaactcgtggtatttgcttaccgttggacccgcaagtaacgatgttccagaatctgctatcgcagaacaaccacttccacaatatcctgtacaagcataaataaagttttgtgatgtgagttatcaaaaataaaagaaaaatatatgtcatgttaaaaacaacacatgatgaaaaaggatatcacaatgagtgatagacgtaccagtagattcaccggcaatgagaacctcacccatgtcgaactatgaccaaaataatagtttgaattagatttttatgaaacaagcatagcaaaccaagacaaatagataaagaacaaacctgccagtaacccctttgtgtcacaggaacaaatgtatgttctcctctaaaatgctttggatcaacacctccgaatacgatttcaccgccttcttcactctttggatcacggttaagccaaaatgaaaagaccggcctctttataaggccttgcttgagcatattgtacctgtaagaaataaaattagttgtcagctcatcaaacattagtagggtgtgtgtaagtacgtaagtaaccatcaatccaaaatgagagaaaagtgcacgcatataccaaacaggagtagcgtttccaacagcgatctcttggaacccaagaccaagaagaccatcaaacttagccaccaggaatgttaaaccaggctcactggttgtctcaataaactcctgatctttgacaaccaaatcaccaaccgtgacagcatcataactaaagaaaccagagattgatcctgagccgtaatggattgcggcacgttttcctgcatcaaagatatacatacaattgtagagatccaattaacattgatatctcatctttatatcaagatttcgctaaactacttttaatgtacaggactgaaaagagatagcgtgcataccactcttcttatatgtgcttgatcgcgaggacttgtacttagcatgaaagtaacaagacagctagataacaacgggaacaaaacaataagttttatctcttaaactaaaaactaacaaatggtgtaaagcttaccgagaaaaaacattttcctgatggcacccaaaggttagagcttccggtatcaaaaatgacagtgaacttctgcggtggagtaccaatagcaatctcaccatagtactgagcatccaagtaattcttgagcgggacaatatcagcatctccagaatcaccaccaagattgttgttgtacgaacgcaaagaagatctcaaggcctcttcttgcttggaaccaaagcgtgttgcgagtcggttgttaggatccaacttcagttttttcaggccaactctgaatgttccatcatttctcttagaataagcagtgaaaaacagcagaaacgacacaaagaccgaaaacgcaaccgctctcgagtatactcccattttgacctacaaaatcaaagcagtcatcaacaaactgaaacaaatagaagttacaagaacatgcaagtctactaagacaactgttcctcgatgctattttacagactaaatgtgtagcttaaaaaacaaagttacaaacaaaaaaaaaaagaagattttgcaaaatgaaagagacttttgacaacgataactgttagataaacttaacaaaaaacaattttgagaaaaaatgaaacagtcgcaaatcagcaaaaggactacatatttgatgaattatcgaaacaaataatctgatgacaacaagatctagaaccatgaattttcagttaaattatcgattaataattcgaatgtgtgacaaatcgaaaacagagtattaaaacatgttcattcctaacaaaattacactataattacaaaatcaaaccaaccaaaattttataacaaagcagaacaaaagtgtcatcatgaatcaaagttggaaaacatgatagtaaattaacagtagttttgagaagaatcaaaccaacactaaaaaagcttcaatcaaatcatcagatttgaacatttttaagaccaaaaccagacatgcaaaaacacatacatattcaccaatacataatctaacagaatccaaacacagatcatgcataatacaatcgaagaacataggaaactaaattaaccacaaaaaaaaaaaaatggaaagaccagatttatcaaaaagagaaaacctgaagttatcaaaaatcaagaactcggaatatttagggagagaaatttaagaaatggtaatgagatcgatcatagcagaagtactagaactcaccagagtgtttaagcaccagattctgagaaagaccacaacggcttcagttatcgaggaaatgttatgcagccacgatattaaaagtgggacccacctagtttcgttttgatctaagccgttgaatttaataggctaaaggttttgatcgttgacgtgttgataagatatgacccactaagttttgttggtaagttgctacactcgagcttaatttacttgctctttcggattttttataactgtttaattagacaattttagaatttccaaaatttgaaatagtttttagattccaaaatagattttcaaattttgtgagaaaaaataacatggttgaagaaaagggacaaaaaaaatcatgtttggatagtttttcatgggccttaaaagctcattctatttggataagggtttcataaacgtttgccacaaacctgaaattaaccatgcatgcaataatcaatataacaatctcatcaggaacacatgatcctaacaaaaataataatcatatgaactacatatatcatacaatttataaacaatacccatatttaactcgataatatcatatgtccacatgagtctcaggtatatgattgacatagtgtcgcaataatgctccaaaaataaggatttgagcaattacacatacgtaaatgagaatctgaacaattacaaacaaaaacaaccatcaaatgagaattttgacatgctataagttaagctcaaaaatggaaaaaaaaaacgaaagcacctaacctaagcttagtgttaagatggtggtgcttcatttaaaatatttttctagttgtttgtctttcttgctgtgcagatagatgttttaatatactcaatttcatcaccacgtacttattaaatcatttcggaacagttcccaaagttcttgagccatcaaaattttcaaaataaccagtttatgttcttttgtgattgtttaaacatgattattttgtttaagaagatgagaagtctcgaaggctaaagaagaggggcaaaaagaaccatgaagtaatttcttggtctcttcctttcttatgtccattttatgattttgatattttgctctgactgcctagctagctatgaaaactttaattagtcacgtctttgcatcagattttaatttgttatttggtatgaaattttatccccaaaagttgttcaatgacattcaaaattaccgtattcttgttggcatttcaaaatctacttttctttttcttgttgcaagctgtttgatcataattagatttcaaggtttgaataatggctcttgatgttttaaaataaagagacaaacaagaataacatgcacatttgggttctcaccaattccaacgattatgttgtctatagcagtcaatccagttagatccttgccaatcaattgtgccccaatgatatcgttaacatgtgtcttttagtattcagtccaacctaaatcacacaagcaagttacgatgatgcaaatgatcgttcatcacaaagccatactaggaaccaataaccattatcataaaatgaaagtcgtaatattatacaatatttttctataaattatattcgataacagatttatcattcatgtagttcagctaaacctaatcgtttcgtagtaaggtttagaccaacatttattagtctggcatattatagatccaattttcgtctatctcaaacttcttataaaattcagcatttgataatccaaattttgccaaaattttgattactttcaagagtgattagatctttaattaaatagtggccacgcgcaaccatactgaataaaaacgactgctattaatcaacgtgacaactatatattagtattaccaatagacttatattcttttaccaaccatattgtaacaaccatttaaaatgtattgatttaggaagagtcctaaagaagacggataggttaaaacaagtatgaccacatgcagacatgtgactcaacgactctcttttcaaaagtcgtagagaagtctctcttctcgtctctcgacctcacgcaaaccatatgaataacttataacttccaaaatagaaatggtagataataaacggcggctttataagtccatgactttgcattttcttcatttaattcaattaatattctatatactatactaaacatttcacaagcagttcacacactaatttttttttttaaagagaatactcctatcgtttaacaactactataccttctaccgttttcacgtaggattttgctcctttttctaattagtaaagttcattcaaaagaatagatttggattttcttcaaactgtgcacacaaaaaaaatacaaacagctactctcttttttttatggcctttttttttttaaaataccagctttatgattccgttttcacatattttactaaagaaaagattattcaaaaaataccactttataatccaaaataaaataatgagagtaggagaggcatctcggatcggaagcagatcaaaacttggtttttagtgcaatttaaaattaagcataataaagacttacctgtattaaaaaaatgcattattggcaaatcatgacccccacgtcaactagagttgcacggaaagtcaacaacgtacttttgcgtatcgcttccttccaaagcttgagatattattccatctatttacaatattattactccacagtacacagataattacgtatcgaaattttaataattttctagaaaatcctatttttacttcataaaaatgaagaaattgacaaagctaaacttttcgttatattgttgcctaaatttttggtcacatatttcagtttatttatcttcaaatttttcatgccattaaactcgtagtttctaggaagttgtctctatttgttagcaaatattaatgtgtacagatttttaggtgacttaattagacagcaattacgtgtcaaattgttatggtagcatttattgaccgttgcaattgttaaatatatataaaaaggttattaaaagttcaataattaagtgtcattatgtaggacacttatttgatgatatctcattatcttattgaaggtacggccaaactattaggtttgtatcggcgctcacatgtgaagtatttaatataccactcaaaagaaatatcaaatattaaagctttaaaggcaatgctaattaagttacgtaactatttatagtgtttacgaatatgaacttgagtatagtttgcttttgtatatttactgggattttggtacgaaacagaacaaatgtgaatcaatgaaataaactctctgtttcctataacccagttggaaaaaaaatgtagatacccaaaaaaaaaatgtaatatttttctattgatttttgttgtttccttcgccgtcgtggtggttcgtaccattgatcatagaagaaataacggctgcaagagccgccgtgaaattcgggtcagctgtgagtgccgttattgtatcagccaccgcgtgtgactgagaaaacgctgccgtcgagggagagccaccagagaactgcagccccgagaacttggattggttatacaatgcctggcctattacatgaggtagcattcccggaggtaagttcgtcatttgctgttgttgttgttgcggccgctgcatcagtgagttgtggttgttgttggtagccgcggaagaggaaggattggaaccattaggaggcggaggtgagtgggtgaggtctaatgtgacggttggaaacggcgcggaggctgagattgttgccatgcttgtggagcaaggaagaacagccctagctagtaaatttgtagggttcatcatcccgtcgtgactagacattgacccggatagcaacatgttagccgccgccgtggtggtagaagccatggctaccgcggctggcggcaacggatggttatggtttccctcgtaggttgtaatcagaattgatctgtcttccgcgcaacgttgaacctataaatatcatttcggaccgaacgtattagccaatcacgcaaacatatatacattgaaatctctaatgtttttacaacaagaatcttttagtccaatggttaaatcttttaaatcttacttgtttgcgaacgggacagcccgtggccatcgtgcagcggtaatatgcccgcggacaaggattccctttggccatcttctggccatattttctccattgacatccatcgcttatctatagaaacataaagtacaaagataattaatctctaaagcacatagtttattttttatatagtcttataagtattagtatctaataaatcaacttaccatcggagcttccgatcgggcacgaacggagacacgggctttcctcatcgtagcttcagcggtttgatcaaatgtcgtcggggtagtagaattcaccttctgaattttgttggactcagtttcggggctttcttcacgcccaagtctcttcccgttactacgcctctcggctgcagaagaaccccccgaacgagttctatcttcggatgaagaatttgacacatcctcggcctcacctactgctctcgtagggcctaaatcaataaattgccttggtactatcgtctcctcaggcttctcagcagcttctattacctaatcatataggttcaccaaaattaattgcctattcatgtagggtaaattccatttacttgtggttgatcaatctaataattatttaccttattgttctgttgttgctgttgctgcattagtgaaacaagatgcatctgaagtgaagtgtaactgttgctaacttgtgtaagcaattctctaagcttttgattatccattgtcattttcttcaactcatcttgtaatttcaccaactgtgataaacaaaaaaaaatcgaaatattaatcaaaccggttcaaattattcatctattaaatattactaatgtaaaatcaaactaaacttacctcatttttcgcacgcttatcttccatttcggaagattctccatcatcgatcattgactcatcactctttgtattaccagttgttcgaagattcaaaccggtctataacaaattaaaattcaaatttagaaatcattttgtaagaaaacaaaatatgatacctttatcaaaaaaaaaaaaatgaaacaaaatttggtatttttatttgatatttcaaatgtaaaccaaattatgacacgtccacactaatacaaaccattagtaagaaaattgtatttcatatgatttatcgaaaagtcgtacttacatttacgtccgttcgatcatcttgttcttccttcttcacacgaaatccttcgtcgtcttcacgacaaaccctagatttcttgtcggagaagaaatccacttcgccgggaacttcacggtcattatctccagcaacgccagatgaaaaatcttcatcttcacgatcacgaatacctgagagactcaccggaaacctaaattcactaccgttggttgatattctcgtcttctgatcatcttcttcgtcaattctagacatcgccaaaggatttgagaaacgtcggtgattcttatgagaaatacgattagggtttaaaagatcaagagaagatgaatcaagagtgagaccagaccatcctctgtccatatatagaaaaagaaagagatcacgagattaacgaaggagaaagatttttagagagatcagaaaatgtattttttttttgtttaggggtttggttgaaagagagagagattaagaaagagtctgtgaagtcttctgccagaacataagactctcctataaaaagggtttgggacgtggaccgattttgttttttctttttaagttaatgaactttgattttattttccggagactttttaaaaaaattcttgggagttttacgtcagatcctgcgtcattgcccggttacgacccgacccataatacaccgggattctaagcccgtttcattttcatggaaattcacacacacacacacacataaaaacttcatttgctattgggtaacaggttgacgaaaaggaaaaatgaaacaaaacattgtactattattagaaatttttaacaaacaattgggcaatcctttcaaagctaatagagagtacaccgtttgggatttatgattagtttttagggtttatatataatttgttttttttattacagtgtatgattcaggttaaggtgtagttttcataaattttatacgatatatcagtatgtattaattttagcatttaatgtgactattatcttacaaatttcttttagttttacctcaaagtcagttctacattattcttttggcgacgatagttaaagccaatcggattactagtaaacaacttttatttttttataaaaaattacatataaacatcccattatataaaaataatgtttttttatttacaatgtctaaagtttatttcaagaaatttttcttttttaagattatgaatcagattaatattttttgttattaacatatacataatttttacaccaattattttgccaaataaataataaagttttttattccgatgaaaaggataaaattttatcatgaaacgagtcaaaacataattttagataaaagaatagggttttataagctaactcactataaatagcttataaatagttttaactacaagtatgttataaaaccaaaaatttgtaaattgatcgtaaactatgccactgtaaaacggattagctcatttgacacttgtaacatgatgaccaatcaatcagttccttttattaaattttgatgtcgaaatcacgagaaaatggttatgtggcgtaatcgtcttgagactattaaattgtgatatgaagaaagagcattgactagttctcttctgtttgatcaaacggacgaaaagtttgatccaccgctccgtttactgcggcgcgttccacgtgattataccttttctcttttcttttttttcagcttatttattagtattaatttatttttaacaaaatacaaaaacagttggaaacaaaaaccgagtcaacgattttgacggcccggcttctaatagtcttgactggtgaccggttgcgctggtcgttaggtcttacttccgtggccggccgggccccactcatgtaataatttattttttgacccatttttctttgatatattattaaagctaagcacctagtttcttgttttcttgaagtagacctttagttctctttctctaatgttaaaaaagaaaaataatgaagaccttgttctctaaatacaaagtcgatttttatacatatcttgacaaagtcgattatttatgtttcgttgcttgtcaccgacttaattttttgttaaatcatggttaccacatgtgatttgaaaattttatgtacttcgttacaaaaagaaatcatgaagtacaggaatattctttcttttttttttataataaattacaataacctaattatagtacatggcttatgtttgggataacaaataaaagaatggtaattttcagattttaaagtatacattttcttttgttgttatcatattagaactattgacttttctattatctataattatattttattagactactacataatgtaaatgcaatttttttattttttttgttaaatttgttgaaggataaccaaaaaatggtactatacaaaccggataaagaaatcgaaacaggttcaacaaatttagaaaagtcgaagagatttagtgttactaatcattggaatcgctcattggttggctacatgcggttataagagcgcattctactgagattattttctgaaacaattaattttgaattgcaatattacattggataattttagcagacgaatgtattttaatatttatatttttaccttataaaataatagttaatgaaaatatagaaaaaaataaaaataaaaaaaaataagaaagaaaaagaatacaactaataacacatatccaaatagtctatattatatttatcgtgataacatgtgttgcccataataaaccttattagaaagaaaaaaaaaatttggttggtgaattagttatgttgttcatatagtaatgttacaaatttatagtatcataattatatttgatatttgttttactgttgatttcctttttatgttttcatcgccaaagtttgatgattaaaaccaccaacgaaaaaaacaaaaaaaaactgatatgctatgtcaaatgactaaaataactagatagtgaagaaacgtgtcaccttatttggcatgaccttataatttaaaattcgagaagataataaaaactaaattttagtttgagtccacacacgtagaaataagagaaacaaatagacagaaagaaagagagatcatgtttattttattttatcatgttataataagaataatagtgataaaagccttaaagggctcccacgtattgacaaaagagatgtgtagatcggttgactgtctaccggaacgaccgagtcattagctttgacttttttaccttttcaaatctctctctaatcacgttaaactaattgtattaataaggttacaaaaaatctcattttcttttcttctgacctttttggcacttttctccgtccctcgtgttaatattacctgtcttgtgggcaactaattatatttttttttttacctaattttttcctctataattttcaaaataagctcacggattctcacgatgcgtttatgtttatttatgaaaattaatctgcagaaaattttcattttgatcgaattattactctactctagatcgatttataagccactaatctgcttcagtttgttaatgtaggtcaattttttcttcaattacaagtttgtctgtttattggttattttatttttaaaaggtttcttcatcatcaagaactcttcaaagtctacagtacttgccgtagataaactttatttgaaaaaataatcaatgaattatagtataattttgattaatttaagccacgattaagttgcaggattatgtatttaattcattttacatttaagactgaggaaggagccaagaaagcgtgtaagatgtcaaaaacaggtccactaaaaattaaagtttttagcgatcaaaaatatttttttccccaaaacaattaaatgagttgaagaaaaatagaagaaaatctgcagagctgtctgagatttgcattgaccaacatgatagtactacacaacgtggccgagttcgcatgacgtagaaatcttgtggacataagttttggttttacaagtaaaccatctgactattgatgcttttcacactttaatatttagttttgtacttctttttatgacatctttatgtacttttgtgttttcccctatatgaatatataagtatatagatgagatcatgtgagacatcttccaacttttatgaatgtacgagaggtttagatttgaatccgaccacatatatggtcttaaattttgacgcagtcagcaacctgattttatccaaatcggtgaaatttaatgtttcaaccgtccaagatttatattaaattaatattttatatattttccttttcttaaaaaataaaatgaagtcaggtttgattggtgtaattatcaaagggaatagaagaatcatatgtgccacgaactattatgagtttctcaaaattaatttagatataggattctgatttattcgagattatggttgtttttcgtataatctaaatcttgttttaggaacggtaacatatcttctgttttttttgttcaaatgaacggtaacatagctaattcggatatttgatactatgtgaaaattatgacattatgtgatcacttgatcaaaaacttcttatcataaatctttacctcatatgtgaaagttttaacaaactgtaattcataagttttagattttgcttatacttttatttgtctataaataatctactctatactagtactagactctagatttttaatctactagtttattgtgaaatagagtcttgaactttttatgaaagatatgctcatttgaactttttatgaaagatatgttcacctcataatgattagccgagtaatacgatatggtatggaccactctttaccaatcttagacaaattgtaatagtctaagtttttagtaaactcaattttctatccaactagaaactaacatcttttagaacattgaatcgtatatgaacaagtttctttactagctgctgctttggcaataaggtcaacaagaaacgaagaaaagaataaaccttgtgcttttgagtcccatgttttcaaagttttaaaaatcaaatcaataaaatagtgaaaacatccaaaattctcttttcttgtacttattgatactttcctggtcatatactcttctagagtggttttatactatcattttgatttcccacgagagttcgaactcatattaaattttgggtgacccaaaggtttttaatataaccaagggaccaatcaattgcggtctttcttattgatactttacattgattttttgggggcactaagtcattgtatattaagacttttataaagagtggataagtccaaaagaggtctatctatatgactagtagaaggcaatgaggccaaaaagttcaacgacggaagaagaaggtaacatagacgttatcaataacactttcttatcaatctaattttgactaacttagacctcgtgattgcaactgaatgagattcgtctcttagttttggccaagaagatttgttttgcataaaactgaagattttgactcttatccaaaaatactatcatcaggcctctttattttttttaatcattataccatttcagaaattaatttatatatttattttttggttaagaggaaccacatgtttttttcttctgaaaacaaattatagagattaacttaaaaagggatatatatgtctatttaaatgtcatattaaaaaatatattatgtaatcttagaaaaaatgaacaatgtattttctctgatacaatatttttttctttttgtaagagtttgtttatttattaaggatttaacatattctcttttttttttttggtaagtgattcaacatattctcttttgagaagtttgattttatttacctaataaataagaagaaaaagaaggaaaagggaactcttgattatttattatagcttctcgaaagtcataatcaatttcaaataccttcaaacatgaaggagagaaaaacattggttggtttgacgaaaagaatcattggttccgtactatgtctgccatctttataccgaattaacaaaagtaaacaaaaagagataaaaataataaatttcttttgagagccaaagtgcatatcaaggaattggtctgccatttacgactgtctcttgtgactgccatttacgaaaatggccaaagattcctgtcttcatgttgaagaatagaagaagctctcatttgttttatagagaaatttccacgtacagaaaaaagagaactataatcatttggtcgaaaattgtctaataatttgttattttatagactttattagcatatatataagcattggaagtgtgatggaacatagactagtatataactactagatattccataagtcgagtctccaacctggctgcattttccgatttcatctttgaatgatatgtgccaagtagctcaagcttcggaaataatgttcttgttgttgttgaggctcgtagaccttgtatcgtaccatgattaagggggtcctattcaattttaccccacatgtactaaacaagtaacaacatgtctggcagaccaatatgtaactttattccaaatctcaccaaacattgcaagaccaaaataaatttggtaagtagttaattagcatgtgtttttaacttttagagaaacctttcttacaatagtccaagtatgcatgaaccatttcaatttcgtcagaatctaaataaagagccttttgtctaataataagagtcaaagaaagacaatactttaagaaattttttgtttttcaaataaaaaataatattgtgatctttatgttcttaaaaggcggggcatgcattattatatatatcctacatatagcatatgtatggattatgatttatttgttttgaatttatatttcaaacaatttagggtgatttagtggtttcttaataattctctcataagtcaataaatttgaaaatcgcagcaaagtgtaaatatgcatttaaaaaggtaagaaatataggtagaccacataacacaactccttaacaatactatcaacctatgaaaaataatttatttcataaaattatatggttgacccaatgtacgataaagatgcaattgcgtttttttttgtagtcgatagatctagcaaaaaaattacgagttcaaagagacttgggaacttaatcatttttcaatgcttatatgatgtattatccttttcatcaaaaggaaaaccgataccatttctaaacgcttatattgttagtggaagtgcatgatctatatatgactacaccaacatctctttaatgcttaactcattataacctacgaatgtaatgaatacatgagcaattagagcatatcaacgtctgttcacccatgcaataatcttaaagactatatatgtattctaagtttctaaccatcacaaaatggatttggccacatggccaaatgaaggttatatatactatatggttcttgtctaattttccttgaatctttgaggttcggattacgctagagaaaagtaaatagttgaacattgattaacaggcccgacttgttttgagtccgggtcgattagtctagcccggcaactttaaacgcggtcgagccttcccattatttgaatatacgggccacaggctggctcgtggccaacatgaaaagttagataagaaaatggcaagctcatcgaatccggccatatctgaatcgccttgacggactattagatctgtccgccaattttctagaatgaaatcaggccaaccttggaattttaagcccattattacactaccaactctaatttgtattgtagacaagcgaggtttgtttctgaaaagaaacatcacaccaagtctcctacaaaataaacctaatcactacatccttagcgcaagtatagaacaattgaattatttccctacaagaacctcatgaattgccattttataaacaacttcatataaataccattaaaaagaaaatccatgatggatgtatagtttgtaccaaactactgtcatatgatcgattaatgtactatctgtatgctttcacctgtatattctaagttaacttttttcttttctggtgtcaatcatggtttcttctttcttagttctataaaacctttgtgcttacctttttttttttgtatctaaaaggttgttgtatctatagaggattctattaatccttcactcaaaagacgcattgcggctcctctagtgaacttcctcgcaaacagaaagcacgggacgggttttgaattcgctctgcaccattctgttcgatactccgattcataatatacatggttgattttctgttacccggaatgcaaaagagatttgatcagcttaaccggcgtgatacaaatagagttgagcacaaaaccataaactggattgcacagtatataaaaataagaaaggtacctttattccttctatttcctctggtccgcaattgtcagatgtgaaagtgagaggatgccaagatttagcttcagctttttttgctgataggttccatgtggtgtatgtcactgttctccgttccatttcattttccaagccacgcatctgaagagaccatcaagattgggatgcaaaaagtgaatccgaaaaatcagggggttagaaatagatgaactgaatgggagattttgataactgtttgtgcttactgttagtagagtttgcacgtagtgttcatcagggatacagttgtgtcgcctctttttctgttttcgcattcatcgcaacaaaaaatgttaagaactaatccactcttcactggaaatgaatgagatatgtgcgactaatagtcagaaacttcaaaagttatgtttctgggaaattatggaaagactgtacttacaagatatagccaattctttctgggatccagaggtagagatcgctggaaaagaaaagaaacgaacaacaaatccgttatttcttcaagaaaacagtagaaaggaaactatcaaaacaccagatacattaagaagagtgatagagttcttcgagaaatcgagaactattatcaaaatgacaacaccaaaagctctgagctttaccttgcaaaatttctgaaaaacagggaacacagtatcatcattaacaatgacctctgcatggcttctgatcaatgatatccactgcaacaaacaaaaactgattcacaaaactgcaataaaaattctgtcactgtctgtgaagcttatttttcaaaacaactcaaacttccaatatcttgcaaaggaaacagtctgcaaaagttcatttcaaaagcaaaataaggaagttccttttttctattccagagatcaaatatgataagaaacagacctgagatccttttcgccatttttctttccgtataacaggaaacattttcatagtgtagcgattatctttatcaaggaagctgcaaacaaagagcaacacagttataacacaacaacagctagctgaggcaattatatctactgcttatgctctatatagttttacgaaacaaaatgaaacgcaaaaatcgcaaaatcacctgtctacaaaactctttggtgaagaaactagatatctgtaaatgtaaccaaagtcgtataacggaacacagctgcatcacaaaagagtaaaaaccaatggcttaacttcaacgtcaataagatcttctagtcagagatagaataaagagaccaacctatcagacaaaagaacaaatctttgattagaaggatcttccaaagcagatgcaagcaacaatctttctgctgcaatcatgcttgattctccccaaactacctgaacaagtgaatcaattcatccatcaaaatcctcagaacaaaaaggaactatctaaaatcaatgcatcgaaagagatattgcctcaatgctattcttcaattgacgattgtagaagaaatgtgatcttgtggatgattcatcgaatacgaaaccaggtattgaatgtacatagattgagaaattcctctgatctgcactctgcgaaaacacacaataacaatgagcaaatgttttcaaaattcaatgaataatcaaagttttttttaagaaccttgaagaatctgtcccagagaaaatcaagtggcaaatcacgtcgagcgaggaaaaggaaggcgagtttgggacgatcgccggagtatttaacgagagggatacgagatctcgcgacggagagagacgaagacagtgtcgtcgtcgtcgcagtggaattagactgacggttgatacagaagagagcgaggatgcataatgcggtggagatagtgatgagtatcttccatcgaaaccacacgacaccgcgacgagacgacggaagccgcggcattagtaaactcgagattacttatctccggcgatctgcatcagaactccgggagaattgggaatccaaaatcgaaaaatcttaagggttttgttgaaattgagattttcaggagaaatcgaaatcgtaaggatttgacatgtgagagacgtagaagaagaagaaggcaagtcaccaaggaagacgttgaatctgatgaaaaacgacaccgtgtctttgtccacgtgtaacgttttttgttttaattagggaatcaaattaatactacaaaagagaattaaaagatcattgaatggtttgactagggggattaagagtgtgagtcttttattaagacgtttcttaggaagttaatgcggtaaacgcatttgttttggtatgtttcattttttttcttttacagtgttttggtctgtttcatcggaacacactaacttcatttttttttttatgtttgttagtttttaagactaaaatagagatagtagtattttttaacttcaactagaatgcatatgttattaatcaatttattttggttagttactcgatgttttaaaagatggtttaggcgtgaaaattatcttttaaaggggcctgattgataagtggagaagggaggagtagttgaaaggagctacagcagaaacggggagctgagatatatatatatatttttttgtcatctggttatatttataagaaacttgaagagatacatgagatacaaacataagccggcggaaaacagagatatttccagagtctaaagcccaaacgagggaagctaagtccgagaacaaaaaataaatattggaaacataatctagagaaaagtgtaaactctccataaaataaaccacatcaaaaggtaacaaaccataataaagtgtaaaacagagtttgctaaggaaaataaagaagccaatgccctaaacggcctaaatgttccaaaggacctcccaccaaactttccaaagagatcgttaatgttgggtaacagaaaagactggatgtgcaaaagaaccaaagacaaacagagctgagatatatatatatataacagtaaaaaaatttaaaaaaaaattattaaaatgaaatttattaattttgactaaaattattattgaacgaaaaaattattgaaaacaaaagtttgaataaataataaagtttgattcgtgtccataagaatacaacaatctataaaaagaccaaaacagtaatctcatatcaatacagagtccaatcgctccaagaaacacaaatataacaatctatggaaagaccaacacagtaatctcgtctcctcttttcatcttcaattcgtgtgtgtaactccacaggactaccacgagctaaataggatctgaaacgcccatctctcgttacacttgtaggcttgtagcgatcgtatacgcttttgtaaatgaaatagggaaagtcatttgaccaaacctccgaagtaatcgatgaatcttgtctactaaactagattaatataaatagttttttttacataatcagatatatttgatataatcatgttacaaatgaaatctaattagacaataactatgtcctccgtaacccttgtatcggcaaactaattattcttacacgcaacatattcacgagaaaccacgatggatggctctatatgtaatggaactctctaccatccgtcaaattttaatttgcctcatattaatcagattaatgtggaagaaaatacactctgagacaatggaactcagatcttgactagactttcagatggcactcggaagtcccgatttgcttggtttccatatatatttaaacaactttggaatcttgcacggttataaagatttactaaatatcaattcacgagccaaaatcggcaaacttacgagtaaacaagtaaactaattaatacataagaaaataaaaacttttgattggaaattgatcatttttttttgtgtcaacaaatatgtaataacagaaagagcgggacgtttggttttaagaagattccaattcttccttttcagtaaaaagtataaattccatattatcctaaaggtccttttagtctttttatgatggtgacacaaaaaccctatctccaattctgttatgtactatatagaatcaagttgtttggaaaaaaaaagtttagaaaaagagatatgcaaaggattttggtgtgaaacaagtttttgaaagaagaaaagaacaagatacatctcataaaaaaaaaggttactcttctcattctttatacatatatgtgggtgggttgtgtgtttcataacttttattgggatgaatccatataaatgtcaaacataacttatgaaacttttataaatctaattttacataaatattttgttcaacatatacttgattaggttcaaccatgagagccgtcaaccatggaagctgctaatctccgaagaagtctattttcactacataacataccgaaatcgaagttttactgtgtatgattggtgcccagatcttgtgaagataatgttttctcgaaccgaatggccagtgttttcagcatatttggaggaattatagaactacaaagaagaattcacaagtttctctttatctttcatctcccatagaagattataattgatttgatgatatttgagaccatgaaaacctcccaacaccctgcatttgaaggaagttcccaacccaagactcatataagagtgcctaaccactagtagccactcacggaaaataagaactctcaagttcacatggctattgaagaagaggacaacacctttattcatttctctataatcaagtttatgaaaggtgtcaagtctttctacatggaggaaaatgagactcttgctttctcataaaagtccctttgagcacacaaattcttcaattccaagatgtcatacttccatcttgccagggaatattaaagattatatctctttagtttaatgttgaatatagtgcggttatcttcggttatctataatgtgtatagttgattatctctcttagtatttaagttttctataatctcttccggaaccagccgttgataataccacatttaagacgtaaaatccacaagaactacgtaggattgacctagtgaacttgagcactcactctcaagatcattaggccaccacctacttggtcatattcttattttgctgaagctagcttttttacagattttccttcaagaaaaacgccacccccttgggttgaaagaccgcaaccacctttggaatttggaaagcaacttctcaaacaggtgagctgcctacacttagtcatttattttgttgatttggtatttttacttaggtagattttgttgtttgttaacccttaggtagatttgatacctaatcgcgtcatcttacatgttattataggtttaacatgcggttatgtacaattggtagatgtaccttgctattattatgtgtaatgaacatatttctgaaacccaccaacaaaaagaaaaaatcattaaaatgcgcttataatctataaaaatatcagtcgcaaatgcaattattcttttgaagcgaagctatatatcctctcctatagataaacctttttgtatgacgaaactaacgctgtctcttgcttatctgatcagtttccatgactttttttattctattatctatacagaacctgaaaatcctacgcagcttaataatgcacaacaaaggagctgatggggtcaggacattcacaaacagcagtcttcaactattggagcatcggttggttctcgctcgataatgtttcaagttctttaagagcttgctcgatcgcgtagatcaccatcttgtttgtctgttacacgagcataaacaaaaagcagaaaagtggttagacctgtgattgaatacaaacggagaggagtactgattcgggtcaatccaaaagtctcataaagaaaggtcgtagcagaactaattgactttgattggtcgttgcaaaagccaaaacaaatagaggtccaaccctattatcaagtagaaagctcctttgataaattaattaaaatcattattacaatcctgtacatttcttagctggttatttcttagtctcaactttttttttttcatctactatatcatcattagaaatatttgataatgatcaaccaactattattatttggattaatttatagtttaaaaatttcagtcacttttttactttttggatttccttaccagtgttcagacggtggaccatgcggtccagttaactttggaccgcatgatattcttactggtgaacatcaacccgccattttccaccaattgaaaccacatgaattcacgacttctggtaccatccaagatataagaacactggacctaaatttttcggacgggttgaattctttttgctagttgaacccgatatatttgccatcatctaaggtctacgatcaccgaccaaattttgttcgacagtaatcgaaagctatactttgtcaattttcaagaaatttccctaatttattataaccccaaatttcttttcgtcagttgaaattattgtatgtgaaatccccgatagtcgtcttatcatcgaagatgatcattcgaccaactatttcggatcttagtcaacccgccattttccactaattgaaaccacatttttgtgacaacatgaattcacaactttcgaaaccatccaatatataggatcactagacctcaatttttcgaatgagttgaattctttttgctaattgaaaccacattgttacgaagaaatttactagaacccgagatattttccatcatccaagatctacgatcatcgaccaaattttcttcgacattaatcgaaagctatattttgtcacttatagaaatttccaaatttattaaaatccctaatttcttttcgtcgtttgaaattaaaatccctaatttcttgtaggtggaatccccgatattcgtcttatcatcgaagatgatcattagaccaactatttccgatgttagtcgacccgccattgtccaccaattgaaaccactttatcgtgacaacatgaattcacaacttccggtaacatccaagatatcggatcgttggcctaaacttttcaaacgagttgaattcttttgcgagttgaaaccaaattgttatggagacatgtactagatagaacccggagatatttgccatcaacattcattgaccaaaatttcttcgacatgaatcgaaagctatactttgtcattttctagaagtttccctaatttattaaaatcccaaagcaaattataatgcaagaacaacacaaacaaagtagcacacatataaatacattacaggaaagtagataaaagtaggtgaacatatatcaagacactaacgagttttgtttccgcgattttaaggttctccattagcacgcatcgttacgttcaatttattgaacttgagaacgtgagaagaaatctgcgtcgcttacacatcacattgtagtgttatatcctttaaccgacaagattgatcgtatgatcccccggattcaacgagatcacaacacgatcacaccacgtcggggatgccacgatttgaggaattggttggaaactaagagctagatattcataggatgcattgagaaccatatgcgcggaagatgattgccactaaccaccaagtatcccggaaaattgaacgatatggcctctaaccacaaactatcccggaaaattgaacgagatgcaacctacaccgggatctgcatttagtggaaagacaagggtctcgagtgcagagagaggtcccctctgcatcctgagccctgatgtttcgttgatagaaaaagtatacttgcaacccatccttctttgttgtagagacatgggtcttcaatcttgaccggattgggtaaatcgatgattcaacacttctacacaagtcatatttaccctaaagtaccacaatgcaacctagattcttttttttgtcaacaacacgcaacatgcgagttcgaatatgggtggtgacaaagtgagtacactagcaccacctgagtacttaaagatgttttatttttgaggccgattacaataaagcgcacggcgagtaatattttgcataagacctcactagttttcaatctatgtgtttaagtttacatgggaaaacattgtaaaataaaaaaaatcacatttaaaaagaaaccattgtaacttgttagataaactagttttgtgaaatatacccatcgaacggagacaaacgcatttgtgcaaacaaataacaagcattgaaagcttaaataaaaatagcttatcaataggtcggataaccggccattagatatttccccttgttattgtaattaggtagagatgggcatttaagtttttgatttatgatttataattttataaatgaaaacaaaatattaacctaattgaaaccaaaattttatccaatatttggatcgaaatattttggttcaatagaaaagaaaatccaaataataaaaatatgtaatcaaatcatgtgctgctaactatttaaagtctaaatgtaaattagaattggggaggaaaaacatatatttttgtcatttttagtttgatttctatctcgtcattgatatggagttttctcaacacgattttaaaaacaacaaaaataattgagtaaatcggtttggtcttagttttgatttagttcaatcgcccatctcttctaattgaattc

SEQ ID NO: 108 - DNA, 86373 bp, Arabidopsis thaliana
gaattctttttgctagttgaacccgatatatttgccatcatctaaggtctacgatcaccgaccaaattttgttcgacagtaatcgaaagctatactttgtcaattttcaagaaatttccctaatttattataaccccaaatttcttttcgtcagttgaaattattgtatgtgaaatccccgatagtcgtcttatcatcgaagatgatcattcgaccaactatttcggatcttagtcaacccgccattttccactaattgaaaccacatttttgtgacaacatgaattcacaactttcgaaaccatccaatatataggatcactagacctcaatttttcgaatgagttgaattctttttgctaattgaaaccacattgttacgaagaaatttactagaacccgagatattttccatcatccaagatctacgatcatcgaccaaattttcttcgacattaatcgaaagctatattttgtcacttatagaaatttccaaatttattaaaatccctaatttcttttcgtcgtttgaaattaaaatccctaatttcttgtaggtggaatccccgatattcgtcttatcatcgaagatgatcattagaccaactatttccgatgttagtcgacccgccattgtccaccaattgaaaccactttatcgtgacaacatgaattcacaacttccggtaacatccaagatatcggatcgttggcctaaacttttcaaacgagttgaattcttttgcgagttgaaaccaaattgttatggagacatgtactagatagaacccggagatatttgccatcaacattcattgaccaaaatttcttcgacatgaatcgaaagctatactttgtcattttctagaagtttccctaatttattaaaatcccaaagcaaattataatgcaagaacaacacaaacaaagtagcacacatataaatacattacaggaaagtagataaaagtaggtgaacatatatcaagacactaacgagttttgtttccgcgattttaaggttctccattagcacgcatcgttacgttcaatttattgaacttgagaacgtgagaagaaatctgcgtcgcttacacatcacattgtagtgttatatcctttaaccgacaagattgatcgtatgatcccccggattcaacgagatcacaacacgatcacaccacgtcggggatgccacgatttgaggaattggttggaaactaagagctagatattcataggatgcattgagaaccatatgcgcggaagatgattgccactaaccaccaagtatcccggaaaattgaacgatatggcctctaaccacaaactatcccggaaaattgaacgagatgcaacctacaccgggatctgcatttagtggaaagacaagggtctcgagtgcagagagaggtcccctctgcatcctgagccctgatgtttcgttgatagaaaaagtatacttgcaacccatccttctttgttgtagagacatgggtcttcaatcttgaccggattgggtaaatcgatgattcaacacttctacacaagtcatatttaccctaaagtaccacaatgcaacctagattcttttttttgtcaacaacacgcaacatgcgagttcgaatatgggtggtgacaaagtgagtacactagcaccacctgagtacttaaagatgttttatttttgaggccgattacaataaagcgcacggcgagtaatattttgcataagacctcactagttttcaatctatgtgtttaagtttacatgggaaaacattgtaaaataaaaaaaatcacatttaaaaagaaaccattgtaacttgttagataaactagttttgtgaaatatacccatcgaacggagacaaacgcatttgtgcaaacaaataacaagcattgaaagcttaaataaaaatagcttatcaataggtcggataaccggccattagatatttccccttgttattgtaattaggtagagatgggcatttaagtttttgatttatgatttataattttataaatgaaaacaaaatattaacctaattgaaaccaaaattttatccaatatttggatcgaaatattttggttcaatagaaaagaaaatccaaataataaaaatatgtaatcaaatcatgtgctgctaactatttaaagtctaaatgtaaattagaattggggaggaaaaacatatatttttgtcatttttagtttgatttctatctcgtcattgatatggagttttctcaacacgattttaaaaacaacaaaaataattgagtaaatcggtttggtcttagttttgatttagttcaatcgcccatctcttctaattgaattcagatatcccaaaaaaaaaaaaacacccgcagcaagcaatgcacagtatgctcagacaacgaacaaaaaaaaaagaaagaaagaaatgtcaaagagataaaagacttgcctcgagtttgtcctctctggccttgtggtttttgggaagttggcgaaactcttcggtcaaacgcagacactcatggatgttctctggtgacacaaagtcaactgcgacttttgtgcacgactgtcccccaatcacagagaagttttagattttccaatacaaagcaaattgtatgagtagaagaagaatagaaaccattcagtttacctttagattccgaacttgatgaggacaacccgcgggaataaacaccgcttcacctagcttttgcacaaatgtccatggctcgatccctacagttaacttgtcaatattgactcaaaagattgactagaaacattatccccaagtaaacggttacataccatattccgccttgagttttcttttgtgctctaaggttaaatagcatgattggtcatgtatcggatgataaacctgaaaagaagaaaccgtcagtaccggaaataaattcgtcataaaattgatgcaggtgggtgttgttacctttgtaactggactacaataagtgtgtctaaattctttgcaatgctttcttagatactcttctaacttgggaacgtcttctctcctaaatatgtcccaaagagcactgcccgtttcttcattttcattgctcgaaatctctggcatgttcaattcttcttcttcttcttcttccttttcgttacagtcttcagtactctgtttatcgaccttattctgtaacttgtgtttctgtttcagtgctttgactgaggatatttgttcttgacttagggtcacttcggccgtatgcgttagaatattcacctacatgaatcgcaaagtcagtctatggactatttaaaaccaaaccaagagtgttaaaaacaaaataaatgaaagctttaccgcgtctgacatatcgcagtgaagcttagtcacggaatcgcctctaccaagctcatctggaatcccataggcgatgtaagtttttggacctaaatctggtttgataaatccttcaggaagctttgttgcaatgttaagaattccagttctaggatcactatattcctggaaaggtaacgcggatatgaactcatcacagtgacgaggtagaagatcttcaaacttatcagaaggaggccagtccttaagcttcaacatctcaggccagaaattttcatatgttcttcctttgctataaccttcaaagaactgacgagtattgatctccacctcacaattagctaagcaatcaattgctttgacttgggacatctcagagcttgatgttgaattcacattttcgcataaagcccgccacataaccatcggctcccagcttaaaccaggtgtgttgtcaagagcgttcctaacgattactggttcgccttttgcccaatgctcttgaaaatgaagaagctcttcttccttcaagacaccgagagattcaggacagaaaaggtagttgtcacttgatgttgtcctcgaagctgatttccttgtcagctctgtctccaaagaagaacacctacagttcaacattctagggcttatattgtatgatgataagaaagtctctgctttgtgctctaaatctgacatccacgtgagtggtaggatccgcctaagctctagcatccgttcaccacaaccacctagcttttctggtgcacaagtgatgcttccattttcaccaaggctccacttagcgtcagatgggttagcttcttcgtcttcaaaagtggaagacaagctcggttccgcagcatctaaaccatgcatatatcgatgtcctctatcaacataatggaacttcatttcagggcgttcagaaagcgatccttcacgaatctcttgacagcacttcaaacaaagttcataagagcactttggacagcttcgatgcaagtcaacaattgaagttgcacaatgatcactgcaacacatatgaatattttcagtaagatcctcgagaaattaaaaatatcctaacttagttcttacttaccagtatacacgttcatcagtgtagcttatagccgcagttatttcaacttcagaaggcagttttcctacagaaaagacgtcatgttaactcacatttagcaacagaaaccctgtcttagtagcgcaagattcataccttgaacagttgcctcaaattcaatctctagcttctggaatatggataacttattcagaaaaggaagcatcaacgtaatcaaatactggagatgatgacgtctttcagatttcgcgagttccctcttcgatgtctgtaaacacaaatacgaattaacaaaaaaaatcaaaatcttctgcaaatggattggtagaaataatctcatcatacctcaattaaaccattcaaatgcaagcatttgctacaattacaattttgacggcataaaggacatttctcaacaacatcatcctcagatagatttggatacctgcaacaaaaccacaaatagagtaaggatatattattacaagacagagatatatactatcaaagttaaaacagaaactaaccatttccttatacattgaagacaaaacattgtcttctcacattcactacaaatgagaagtgttatcctttcccctttcaagcactgatgacaaattgggccactctgttttctactactggtgcagtcatttttctgaatggaatctgatacattagaagctggagaccgtgaacgacaaggactaataacatctgtaacattttctggactgttagcacttaaactatgggttctgcttcgcgacgacgttgccttgatcttagaacacagtgtaacttcttcttcccattcctcatcttcatcaacttctacttgtcgtttatctttccttttactactaacatcagaaaaccacttacctattgtgcaatcatcacctgactctatcttaaccataacttcaacttcttcgttgcgcttatcaatccttttcgcagtattcctctgaacccaatcacttaatatgcaatcatcatcttcataatattcttctactttgcatatctttctccttcgtttcgcattccgtttaaccgctgaatcatcgctatcttcagctctcgaaagcttccgtttcctactatcactactactactagggctagaaccttttgacatgaatggtttcagagttctcttcttcctagtcgtccacgaatattgataagataattggaaacaattcatatgctccaatttaactccagaatccattctttagctcctgcaaacaaaaatcgccagtgatggtaattcagatctatgaaacagattcttacaccaaaattgaaacaaaacgaacatgcagatttgaatatctaaaacagagacaacaaattcgagttcttcgatcataatcaaaattaatcgcaataaaacagtatatgatcaatcgattccaatcaaaaccaaacaacattattaaaaccaaatcaatcaaaagagacaattgagtctagaattggaaatcagaagaagatcgaaaactcaattttaccttatgatgaacacaaacacagaaaaaaacaagctcgaagaactctgcaacgatgaatctcctgtgaaaaacaaatctataaaccctagattccagctaagttagatgaaagagattgaacaaactttggattctctcaaacttagctttcctttttatttcataactgaataaaggaaaaaagagaaatagtttattcggagaaatatcccagaattaggaaaaggaaaatttcttgagcacggaaaaaaagaaaaagaatcgagcctaatctgaccgttaaagcacttttttgggacctataagatccgtggagcgcaagtgattaaagaaatgcatcgcaggtgattattaccttcaccgatactcaccacgtggaaaacaaataaagaacgtttactcacttctgataaagcgttagttattttattttatttcaacaagctaaaagcagtcttaataaaattcctgatttgattctacttttagtcaatggtttttaagtagttgtggatttttctttgcatttaaagagatatcttttgatttttggatttattgttgttcttactgatatttattggcatgtttatcgttttagtaatcaacaatttgtaaaggttattataaaaaaaaaatcgtatgatatttatccgaataagaaactgaaaatatcttctgatatcttttattttatttttataactcaatgaattcattagattctcataactaaccaggagtttcattcctacaatcatgaattaatatctgtagatactatctgtgttttataagatcttttaaacataattataatagattgactaattagatagtttatataataataataataaaaagtaagaagtgtataaaaaaaattaggtttttttaatagaaaaattgttttagttgagatgttaaaaaaaaatattgttttaattggatataagccttatgcagttccatttcattggatctcacgaaaaaaaataaaaagttccaacatttttttttaataaagaatgagtacgatatcttcttgtcatggatctgagtaagctttgaaacacgcacaatagttagtcttgagtcttgaccaaacctatcgatgcgatgcttacgtctagtacgatacatacatgtcggattttttttttaattgttttatgttaataaataaaagcttttaaggaaaaaattatcataaaacttttacaacagtaaagataaggtacatacaagtaagatagttgctaatttttgcgattggaagtgctgataaagcttttagaggatgtgatgttgttagactattgatattaggaggattttggtagagtaagaaagcattgtcttctgctactagttcgtgtagctctgtttttgcttgttttgggccatcgtcgaaaggtcgctatattgttgaatgttgatctaatgcttatcttgtttttgatttctctctcggtttcgcctaaaggagtttgtcgagttcactacatctttttaccaagatcttcatcgtttaaggtttagttgatgaaatgaacctcaaatgttttcatgttttcatgttttttttttaatctttctttggtatagaactatgttttaagtttatgcttatttaaaacctaagtttaattttgaatgatatttacattctttttaaaaaatgatggttgttgttgttgagccaaggaaaaaatacttttgttgacaaccaaacaaaaaaaatacacttgccaataggaaaaaatataccgtttcaatgtaagtctcatttttaaaataaaacgtctagtttaatatttcttccagctcaaatttataacgaaagaatgatacaattcattgcataagcataaacaacaattacaaaaccgatttagcaaaaaacgaagcaatatgaaattgcattaatcacctctctttttttttacatcaaactcaaacaaaacaatgataatcatacaaatatacaaaacctttcaccacacgtaacaaaagaaaagataaaaaaaaaagatctctacgtagacaaaccaatccggttaagtcaattactcatggaccatcaagtctccggtttccccttacccaaatcaagttgattaaaaggcgttgattgtgacgagccacggctcgcattgctgctcgcaacggtggttctccgtgatctttgacgtttggtttgtacaactacacaatcttcgtcatctgaatcctcgattagtccctcttcatctgaatcttcttcgtctttaaaaacaggatgaacatatgcattctgaagaaaccctttaagattcaagtttggttctcttgctcgttccaatgtatccttaatcatagcttcctgtaaaccggtactcacaagattaaataacacaaactgaaccaaaacaaatgtagctaaaactaccatccattaaccgaaaatgctcgatcttggtttgagctaacctgcaacgggttaatgacgaatgccgattcgtaccggcctttgcaaaaccgatgaaaaccgaaggtgagaatcgctagaacgaggaggaaaggtgtggactgaacttttcctttcgtgctcattaatcccaacaaaaggatttgtgagatgatcaatgccgatattatacgtccatgaacgtctggccagaatgcacccgcactctcatacttctgattgtacacatttatgatctgcatagaaaccaaatgttaccttgttgtttgatagtaaaagagagtttgtttcctttgtttttacctgatgacggaagacgaggtaggcgaaaccaaagaagaagatgatgaaaggaagaagaacaggagtgacaggagcgtagacaaggccaaggaggaagtatagttgaatccgaggctcggtagcgtagaaatcaatctgtcccggatccatagcttcttctctatccttttcagttttcacaaagaagaagttctttaaatggaaaatgactaatggtttcagcctaaagatttctcccgccacacccgcccaaccgtctaccattatatacgttataaagaacgttgcttttatcggtatcgcgactccaactgtccgcggaatgcttaaaacaagaatgtaaataaaagttgagagcagagttccaagagagtaataaaagtgcgggtcaagtgaatcgaacttactcgtttgcggattgtttaagaaaagaatcgagctgttcaaaagcagatccagtgattacgctaccgaggaaaacattcacaaggttgaaaatatagtatcgaaaagccgctcttctctctaacgatgatattgaaataaacccttcgaatttcgacatgatcatcaatattgttggcaggaatatcaaaaagagcttcaagacaataccgggaagaaaaccttggatcaatgatttcattaacttgctgcacacgcaagattgatcaagaattgaattaagccttattcttgaaatggtaagtaaaaaacttgagaatgtacctactttttgacaatgggactgaggaacggagcggatttctcgataccttcaatactcgctaaggattgcacaaatgcgattgggatgatgaaaaagaacgtgaggaagaagaaggcgatgtgcattacaaatctccttacagtgagagatacgtaaggcattgcgagatttggccagtacatttctcttgcctcaggagcccattcggttaaccattcagttggattcttcgtctgttgtgtctgcgcgcagaccgcagcgccccaacgcgttttaaaagacacaaaagctgcttgcattacacttttgtcatctttctttatcctcttcctttcttccattatctatgaaaatcaaattcacacaagaaaggttaagggtttagggtttggggcattgtgcacccctacacgagaaagatacttacttgctcgctaagtttctcgatctctgctgtataatgatccattgcatctacttttttgccccatagcccgagaaatcccatctgcgaatcaaaaaaaagtttcggtctcaatatgtgtgtcggcttttcgggtttgtcaaagtatttacctttacccgtggccgttgttccttgtttcttgtatacttcaactggtagtaatctaaccaattctgcattttcttcttgtcttctaccaatttagccaattcatttgcattgtacaccacctggatatatataagtctaaaatacttaacgaatagcaataaacctaaagaaatattcattcctttaatgctatgatctaacctgatgtgtaagataatggtctgggtggttaacaagaaagaaatgctgcacgttttcgctaatcgactcgtctgagtccggtggtacgttcctaaccagaacctgtcaaatgcatacaatatcctaaaaattggaaactatctcttcagaccaaatagcaaagagagattctatattaatgaaaacaataatctttacagtgaattgatcagcacgtcgcttctctgattggagaaaagataaccgcattgcagcaattttctcatattccttcattagtacatagcaagtccaaaatgtgaatgcataagccatcacaagatgtgcccaaaacctttttaccaaattaagaaaaattctaatcattataaagtttttaacaaaaatcagaagtagcaactacataattttctttcactaacaaacctgtctgatccacgttcgacattcgaaatcgaaagcttatcgatattactcgatgttacattacgaagttttgctagctgcaatccatcacttgtccaatttacaggtactaaaattgaccatgaaagtaatgcaatcggaccaaagatcttaagcctataaaatagtaaacaaaaaaaaaaaccattagaaaaaaaaaacaaagctataattagtaactgtatgcaagaacaaaacattttttgattacccaatcaagtaaatcctcaagtaaacagcagaatccaaaccagcatgatcaataagttcaggctctggcatcttaagagcatcaggcatccagtttaaaaaccgaacgtatgatcgaaagtccaaattcataatcttgctaacgaaagcacccgaattcacagggctgcttctaacaccttttaagtaccatttagggaaataaaccctatcattgaatggttgaatcctcaagattgcaaatagcaatagaaatatcaatgcacttagaatattaatcgctgctgctagtccaatatctgctaatgtcgccatctcctcaaactaatttataataaaccctcacaaattctttcttcacctgcaaatatataagagccctaaaaattgtcataagagtttagacacaaagatcaagttttagatttgtataatagtcaaagacgcttatactaatctcacctttagaaactcattactcaaaaaaatttggccctttcgttgactcttttttttcacaatgttcttgcgatcagattgaagaagaaaataatatgagatgaatcaagaaatcatattggtgaagtggagatttgtgtggtttgtataaaagcttcttcgaatataatctttaaattttcttcaaggaaaagtattgcacaagtttctttagttttctcttctccttcctctgaaaacagaaacagagagagggaagaaaaaacagagtatggaaaaaacagagagattggttctgttaacagcacaaaaatggggaagagaagaaaagaaacttcgtgccgtttttgttgatacaaaacgctgaaaatacacggagaaatagaagaagaagaagatgatgaaaaagttggatctttttaaaatctttgaatctagttgttgttggtcggccgtctaactcaagagactattattattccttgaaaaagtttcatttcaaaaaaatgtcccaattgggtttattcctaaattaaacttaaaccagctctaactttttattattattacacatctatcttatttgttttagatatacccatgcttattttggagataaagttagattaaaataactaaaataataactttgttgctaaaataagataatgacttcatagttgactaaagtaaaaaatcatgaaattagcttaattaaattgttactaatactactcaagtaagaaaataatgaaaataggcaaataccgtgccatcacgttgaagtctataattttttttgtttttttttaataatcatattcttcagtataaatcacctttttgtctattttattcccaatacgaattacttttcttacgtccaaatcaatgtgaataatctagctacatttttcttcattttctttttttaataaccacctttcatcagtgtcacagaaatttatctaaggacgtgcgttaagactatctgggattacatcaaaactgcaattgttttttaatactctcattatattagtccttgtagacgtgtagtactagtaccatgtcgaaaaagtaaacatttgtatcaattgctatatacatatattaaaatggttgtaaatacaattttaaattcttaacttaattatcttgaaaaagtaagttaataagtgtctgcatgtgctatatttcctttaacaaaaaaaaaaggcctgacaaaaggaaattaataagttctctaactcttgtctaattaatataacaccaaaaacagatgtctaggccccaattaaaatcatattactctgatatgcagaaagcgtatttgaaaccctccacacaaaaagcccaatataccaaacacatgcttgcaactatttttgtttttgacagctagtttagctacttgtttatgttatgaaacacaatgaaaaattattcaaatttcatagatatagcttcaacaagctgtagatagtagtaataaactagttttcaattttattatttacgtagttggtaggagctaatccaactttacacatcgctaaatgaaaaattattattcatcttaaatactcaacaaaattattaattctgtcttaccaaaatgttattaattctaagaaatgataacaactactaagaacagtctacttgatcaatttcttataactttgaaaccacaacggacatacgtagggttatatttcgtattagataaaataataggtaaagattaaaatgattttaaaggacagggaccttaaattaataccagcgtcaatctcaaggtttaaaaaaaactttaataattacgttcagacaaagaagaaaaatcctcactgaaattcgagcaaaaaacactcacttcgctctttcttcgctagcttcgttaaattcagcaaatctatctctcacgatcgaacagaactgagagagagtgtgagcttagccatgtcttctgagagaccagacgaagagaaaccagagactcgcgatgttcttcgagtccaagatctgatccatggaggaggaggagcttcaccggttcaatcaccgacacgtctcggtccaacccgcttttcagaagtagctggagacaagattcttaacaccgggtcgaattgtatcgggtcggttttgtcttggatcaacggagatccaaaccggaatttgaaaaatccggttaagagagcaaaaaggaaacgaatcagaacggcgaaaaccgccgcgtttgtaatcgtacttgttggtttcttcattttcgttaattggtttatgctctctcagctccatgaaggtcgagcttggctacggagaggattctcgaaaaaaacgaatcttaaaccgaaactgaacccggatccgaactcgagtgtgaaacgggtatccgttaaagtgtcggcgaatgtacaggtaaattagttaaaaatttaataatgtgattggtcagtcagtttactgtgaactttaactttttaacagtctgtttcttgtcaaatcaatttcaaatccccaaatggttaaattgtgtaaaaatttaaactttttgtctaatatacaattacttcaaatacagatttggttagagaaaaataaaatcctctgtttgagatttgttagttagaatgtgaaaatgctgtggttaggagacaaagtttacatgtttgagattttgctaggtgaagtatgaaattattgtagtaaatggtaagtttatgtagtgtaatgttatatattacatgatttttgcatttggattaatggttatggaagtttcatttgatgttgagtgacttatgatttggtagcataaagagaagaaaaagatgggaaaaccaaagaagacatataatggaacatatggtagattgttggcttatgctgctcatgctttggctgaggtattatcctttccgctttcgacatttcgaattcttaaaccgaaaccgaaaagcctactgaccgagacattgtgttcgttaggggcaaaacaagcttgaaccaaaagagttgtggagagaaccaaaggaccaagctttggcttggaagccttgtgctgatcaacgttcctggaagcctagtggtctcttactcttactctcaatgagtttatttctcgtactatataggtatagtttttctgatttttgtgtttttttttgtgtgtggagtttagatggtaaaaatggatatataatggtaactgcaaatggtgggatcaaccaacagagagttgctgtaagttttgattgcgttacacattactttgtcatgtcccactctttatattgactaaccgttggatttcgcggggacattattaaaacaggtttgtaacatcgttgttgttgcgcggatgctaaatgcgacactcgttattcctaaatttatgttcagcgatgtctggaccgatgcaaggtaactattgtaaggtccctccgttctctgtctccttctcttataattgatgctttcttgaaaacgtcaaattttaacactcttgaatggtatatatatgtttcatagtcagtttggagatatctatcaggtggaacactttataaagtatctttctcctgatatccggattgtaaagaaactacccaaagagcttcagtctctagatcttgaggctattggcagcgtcgtaagttccttacaccgcttttagtgtgaaaaaccgatttcatcttcgtattttttctaatgtagttctcttttatgtcgttttttaaggttacggatatagatgtcatgaaagaagccaagcccgggttttatatgaagcacattcttcctcttctactcaaaaacagagtcgtccatttcttaggattcggaaaccgtttggcctttgacccgataccgtttgagttacaggtaaagaaccttcttttagcaccgtggatatcgatatattacccgtaatgatccaactttttcttggggagtagaggctgcggtgtagatgtaattttcatgcgctaaacttcgttccgaagatacaagaaacgggtgcgatactcgtaaggagattacgagatagtggatcacaccttgcaccagttgacccgtatctcgtcggtccaaaatttgcgtcattcatattggacaagaaagcaggtcctctccataaggcttctaagtatctagcagtccatctcaggtttgaaattgatatggtggctcattctctctgttacttcggaggaggtgatgcggaaaaggcagagcttgatgcttaccgggaaaagcatttcccgacgttggcaaatctaacaaagacgcaaaagtttgttcctttcctctcttaactctttttcacattattatttcagttttggtatctcactgaatgcccttttgttttctcttatgcagaatgccatctccagacgatctgaggacagaaggactttgtcctttatcacctgaagaagccgtgcttatgcttgcgggtctgggttttagtcggaagacacgtgttttcgtcgctggtgcgaatatatatggtgggaataaacggttagcagctttaacgagtctctacccgaatctagtcaccaaagagaatgtactctcacaaactgagctagagcctttcaagaacttctcatctcaggtgaaatgaaaacaagaaaacccgtcaaaacttccttttcggtttatcggttaactttctccgctaaactaaaccgaagaattgcatatttttctttctggttatgtagctagcggttcttgatttcattgcatgcgctgcatcagacgcctttgcgatgacggattcagggagccaattgtcgtctctggtctcgggttatcggatatattacggagcagggaaaatgccgacgatcagaccgaacaaacggagattctcagacatattgttgaagaacaatactatagagtggaaagtgttcgagcagagagtgagaaaaacggttaggcaaaccaaacatgtattggttagaccgacgggacgcagcgtttaccgttatccaagatgtaaagaatgtatgtgtaatgaagattgattatttggtttacattgttggttcggttttttaaacggtcttcatatttttcatggcatttgtagcggctacacattctagtgagtaccaagcttgagtttggtaccaatatggtattattagtatttggttttgggggtattttgatgctggaaatactaagattgggtttggtaaaccggtggtaagtatgaaatttatctctctatacatgcataagtatgaaatccttccagaagaattaaagttagcttgaaggattaggtggataactaccattctactaagcacttatttaatgagtaactgttttacacttcaaagacttgtcggtaacaatgattcttcatcttgatgttatatataaactaagttagtacacaagacagatattgcaataacaattcacaaaatgccttatcctcctcctcatcgtcatcctcctcctttccaccatccaccgccaccaagaccaccgcctccggagcctcgccctcctccacctcctccaggacctcagccaccacctccacctcctcccagacctgatccaccacctccacttcccggagctacttggtttccaggacttcttgggccacgccctcctagaccaccatattagtcgtcatgaatgttttggtctatttaagtatataattcgaaatatatattgtcgaaacatcttagatctttaaagatttcatatgtgtaacactttcatgtgtattaggctcatctgtgtaatcatccttcatatgtgtaattagaatgtatctcaaccttcgcagggtggtaggttgaaacggagcacgcttgcactttatttgattttgtatttgtaatgtaaaatttagaatataataactagtttgttgtttacgttttatgtgagagccgctgaacaaataaaaaaaataactcttccttattccatacattcattttatgaaaaaacttatctccgttcctatttgatggagtgtcaataaccttttcgttggaaatttttaagaataaagaccttattttaagtgagatcgacaagtaacaataaaattttatgttttcaaatggttttaactgacaacggtattcttataatatggtttaagcttccagtaagaacaacttcaccaaatgtaaacttgtttaagacttgtgtgacattgaattcgatgtctaggtcttgagttttctgtggtggtacggtaaaccaagttggggttaaccgtacagttgtaccattgggaggtaaaaccgaaccaagatatgtctcagtcttgttggagacgtcttggaaacttcttctcaccacaagtgactctttaagtgcagatatagttactgacggatggttaaggttcgctgggtggctaagcgtagtggtacacaagactcctgtcgcgtctcggatagtggctgggctaatgtttggcagtgagcacaagaaacttatgtagtcttcaaaacctggtccaataccccaaaaatgatattataaagttacctataagattttgttttactacattaatagcacaaactttgtataatttatcaattcctttccatgatatgtaaaaaacttaccagcgggtaaaactagtccaggatctagggctctagcaggattaacatggcccgcaccatgatcaaaatgattagatggaaataatctacttagctcataatactccgctgatataatttcaccattactatcgtattcgttagccgtggtggagatggcagatgcaatcatggctggagtccaagaaggattaagttgttttatgagcgcaccaatccctgctatatgaggagtcgccatgcttgttcccgacaatatggcaaagcttcgtcctactcacaaaatgatcaattttaaacttatgggagtaaatttcataagataacaaaaaatgagggatgtaaagttagaacctgtcaaaataggatcaaaggcactagggaggctccaagcaccccaaatttggtgaccaggtgcaagaatatctggcttaagtacatctaaaggactccgagttgcatcaataaaagctggccctctcgaagaaaatctgctcaccaccggtgcttttccggcgaagaccgagtttcggccttcgcctattctagcacgtgccccaaattgtgtcgccactcctctcgtgtctctaaaggttttctcttcgtagtatctcaaaataatctaacatgagaaagtctcaaaatgtgaggaaacgtttgaaatataatttcgatgcaaatcaaatggccagtttgttagtgaaccatgaatatagttacctacttcactcaagttcattgctacacataaatgtggatttcgttattgctaagtgacatactatgtaatagtcttcttcatccacatcaaatcacatattcgaacttatatatttgctagactatttttattgtgtcaaatagttgcacataaacaagtacaagagtatttttcgtccaaaaatttgttatggcaattattttcttattatatggcttttacgtaaagaaattacctgggcagctgatactgtagggattagaataccaggagctgaaaatatcactggttctgcaacataatcgccgaatctaggatttgcaatgagtataaaacccatgaaaccaagagtcctggcggtttgggtgatggcaagaacggtcgacatctgattgtagaagccatcagaaaatgtacatatcacgatacttccaaaaactgcggcagggtcaaaattctccggccgctggcattcttcaatgtctctggttaagggttgtagaaccgagccgtttgttctaacagcgtctttggctaagacaagtctgtgttgaactaatggagctccaagggttggacctttaatttcaagttgaaaaaaaggagaaacgacattcctttcatgaatatttactacaagtataaattgttgcgagtttgaaagaacatgatccaaatatttcaaatcgtttaggtcctaaataatttactagctactgctatgctataattaggtacacaataataaccaaataaagcatctatgaaagaagacaaacttttatagcgatgagtgccataattttatactaaatcttgcaaattttggtatttgaagatctaagatcatcactaacactacattgttattattcttctattataaaagtcttgaaactttatatgtttatagtaattcttgttttacctgatagtccaacgccctgaacggtttggccaccgtcgaggatgaggggggcaggataagaccggtcagtatttccggcagcaacaccgacgacccacggactataagacaacacagaagacggcgacgggccattattccctacggcttgcaccacaaacacgccggcttttctagccaatagcattgcgaggtcgaatatcccgagtaccgtgggcttatccaccggtggttcgtctggtccaaccgatagcgtcaacacatctacgccgtccataattgcctatgacaaaattaaataagtaaacaaataaaattggttaaagatcactaagagaaatataggccctaattagtattgtttacttggtcgatggctgcaattacgtcaacaagagttccgattgatggataaatcgccttgtagacggctattctgccacacaaaccaataaaataactcgtcattttttttccaaaactataaagtatcatttagtctttgaactttcaatatatgagctaatgaatatgcgtgaggtgacaaaccgtgaacgtggggccataccgctagcacggccgtagaagaatccgtcgacgatcaccggaactccagcgttcccggctgcgatggatgccacgtggctgaaccaacccgaccaaatagtaaacacttatgcaacacatacaatgcacaacaaacttacaaagcaaatgtatagaccattttacaaacacaaacaatataaagacatataatctacccccataatatggccgtaaagagactttagcaaaacttattgtcattaccgccaataatttaaaaccattatatagagtcaagtctacaacctcatttccatattctcaaaaaataatatgaacatatcattacagtttaccaaaaaaagatagatttatagttttttttctaagatatatagttgactacaaaataaagacatgtatttataatacaatggctaagtgatttatcaaattcaaaaatggtatttcacaaaatctcttcaaaaaagagagagacatttataccttccgtggccggacgcatcgaacggagagagtatatccaaggaggagttaagagcgcctgaagctcgagctccggcggaaaagaaccttgcggagataatttttccgttacaagatccgggtggaaaaaagggaccgatctcacagtcaccggagaaatgcaaacgtgagagatttgatgagtaagggtttgtgagatcaagtgcggcgaagctaggatgagtagggttaattccggtgtccacgaaaccgatcacgatgtcttctccagcacgtctgtctccttcgtttgagatcttttgccagacttgttgaggaagttccaagaaatcgggagtgtatgttgtcattagtttcactcctttgtcttcttctactgccttcactccttttgttttcccgagtttcttggcctgcaagtatcagacaaccaaaattaaccagtgattgaactaaacctaattaaaaatggaaattatcaagagattcaaaactcggcgatcctggttggtttagtttcaattgtttttgatattttcttaatatatcggattcatagtagttgatatcaagtaaaaaaattgggaattcatttagttatgcacttgcgatataaagtgggttcaatttcttaaaaatatgactttttatccaaaaaaaaatgaagtccttaaacttgactaacgaaatgaaccaaaacagaaaagtgaaccgagttatattcattttgggtaagcggagaacctgagaagcagtggtacggactgcaatagcattgatgacatgtttgaagctataaagctttgtataacttcccttttcaagtgtgcttccaagtatttcgtcatgaatctcttctatcttctttgcttctaacgccatagctttgctaattaattgtcgaacatcaaaaaagtattcctcaataaataaatgaattatataatgattaatttagatattggccaagtcaaagacatattgttaatgaacatggaagatgagaaaataagaacttatagatgaatttaaaccaagtatatgaaaaaataataatgtgataaattctttaaatttcgaagaaaaatgtattgatgtggacctgttgatattagtagaagctcgaaaggccaatggttcaccttcaaccaaaatagagtaaatctttggtatatgatcatcgttttcgccttttccttctttttcttctgctctggacaatattgcacaaacaaccaatacaaatatacatactattaaacatatgtaggaatatgatcttagttttcttggattggtttccattagatctttattaggattctccatttgcgttaatgaagataatttatatcatgtagagggcaatgagagtcatgttcttggacaatgcacattaccaacgtgaccattttattctatcagaggtttatatatatgcgttacaatttgtaatatttggtattatggtgtgagccttgcttataaggaagttattttcttagttcaaaccataaagaaaaagtaaaaaggaagcttatttagaaaaagttatatcttaaacaatctgtcattcctttttttcccatttaatgttatttttcaacttatataaaataggtacacaatttatcgtatgccacatggcatgttttgattcgttttctaggtttttgctgacccagattgataagattgtgaactacatttttcaagagtaatttcagttataatgagaaatatggaaaattaattaaaatatagcaatgtaaagataacaagattgtttgaatattccttaagacaagtttaaaccattttacccttcatttaaactgttacagaaaagaaaattagattttttcattagacattttatttctgaaacatgtgaatatttgcattctcaatctcatattctcatatagccacaatattcgaaatataattcatgtaacaatattatcgtccaaatcccttatggaattgtacacaaaccacttcatttctcgactcatttattattgggccaagatgggccggactattgtcttaagaaaatataatctcaaaacccaaatctgctaacatatatcgaacaaaaaacctcaggaactcttgaaaacttgttaaatgttgagagctaaaacccctaaatcctcaattcaacaaagcttcgttctttatattctccgccaatttggttctagaaacaaagaaattagtgttgattcgactcgtacgtaccaatcagggcctgcttcaagcccaagcttatcgatatggagacggaagaaagaaatgagcaaagaaggtttaatcgcagccaaagagctcaagcgtctccaaacccaatcagtccgacttgatcgattcattggttctcatgtctctcgtctccttaaatccgatctcgtttccgttcttgctgaatttcagagacaaaaccaagtgttcctctgtatgaaggtataatcgttgaatttggttaagtttcgaactgagtttttgatagttctgggcgtttaggttaattggtctcctccggttcgtaaatttgggtgtttcgatttggaaattggtgctgaaatggaaccgaaaaccaaatgtggtttggttcgttattgataatttgacatttctcatcattttggttaagatttggtacatttcggtgattctggttaaagtaaggataaaatttgggtttaccagtcctgaaccggttttcatgcttcctcttgccgcttggcttcacctaataaaccgaatccgaaccgaattagcctaactggtttggttcagctatttcggtttgattttataagcctagttctaagtttggttatggagtttgttgatggtgttactgttaatgtttatgcttcggttaaattttggtatatttctgtgaattcggttatatttaggataaaattttggtaatttcggtttggcaatgccgaaccaaaccagttactgaatttcatacttcctcttgccgcttgatacctaataaactgaatcagaatcgaattagcctaactggtttggttaaactatttcggtttggtttatatggagcttgttgatgtttatgtattgtcacttgtcgttgatgtttaatttggtttagtgtttgtcttcttattatgtttcagctctatgaagtagtgaggagagaaatatggtacagaccggacatgtttttttacagagacatgctaatgatgcttgcaagaaacaagaaagttgatgaaaccaagaaagtatgggaagatttaaagaaagaagaggttttgtttgatcaacatacatttggagaccttgttcgagggttcttggataatgaacttcctttagaagcaatgagattgtatggagagatgagagagtctcctgaccggcctttatctctgccttttcgagttattttgaaaggactcgttccttatcctgagttgagagagaaagttaaagatgatttcttggagcttttccctggaatgattgtatacgatcctcctgaggatatatgtgaagatagtgatgaagaagcaagaacagatagcgatcttgaatagagaggtatgtcttgaatcaatgcttggtttggactgtttagttagtgctcaaaatgtcagtgatgatattatcctcgaggctgacccgatgtatcttcgatccatagtttctcttgttctgcacatccactaacttcaggaaccatgtcccagtttcaggttagatcaagtgggaaaacaaatggaagattgtggctatgcagaaactggaactattcgtctttggtaggaacaaattatggctattgaaaactgaagatgatgaggagcatatgaagaagaatttgagaagcttataagcgtatatatgtgtaaagatcactctcagcaatgctaaatgctgctgtattgaatcggttcaagataagtcatatgtttgtgaagatacatacagcagaaagcgttttaagggacaaaactattagaagtggattaagttttggtcgatcttgtctttttgggatagtgatgggtctgtttgggccagactaggtcttttggagtaatagcattctctcttttcttttcgtcttttccatcccaaaagtacaaaatttcgacgcaaatacttaaaaattagcaaggaagatatacatacaaccaaaaaatggtccaaattgtcaaaaaggttgtcaaataaaaagaatagatcaaaaaagctttactatcattataataggaataggaatttcgcataacaatagaacaacacaaaaggatacacaccacaacatcaaacgcttgttcatcaatcggaacatgtttcatatgttccaagtataccgagaaccatagattatacatattataagctgtttaacgattataaatataatgaaataaacgttttaaaggatcgatcaaagcatggtggaggagatgtgatccattgggaaaggattgcccaagacattatccatgaagtaatggtgaggatgtgttgcgtccattactacaaactgcatgtcctccgacggcttccaatgccgtttcctctggtttatgaaccaattgtttatctgtttctggtccagccccgttgattccgcaagggcgagcttttgttgctcctgcaatttcatatcacatgcgagaaaaaatcaatcatcaagtgttctctccgatataaggtcagtccatgatcacagctacatcacgatttgctagattgtaaggagaacttagaatccatctactcatacgaacatgggtaatgacactatacaagtgtaataaagacatgagctactattgcattagggtatggcctcatgcaccctactttccaaagttatgacttgaaatatgtgcaacaaagtttagtctaagttatggtacacagccataagatgaaattgatcgtagtcttgactaagattgacatattattcggaccctaaaaaaggtatggaagcaagaatcaagtttgtcatcggctaatagaccaaaacagtacacatagactaaataagttcacttcattcagcttttaggatttcaaattatgcaaatgcatattgtgcaatgccaacatgagctaacataaactaatgtccctaacgatatagtatgaatgcaaaaatcactaaaaacattgaaacaagctaatagacaactaaattgaatttgctatcatataaatgcttttttaaaaacatgaaatgattatttaattagagtataagggaagagagttaccgaagggtaaggccatttgtagtgacggctccaccaatcaagcagttgttgacgagcttctttagggagctttcctttcttcctcttcttcatgaactcttgcttgaggctccctaagtaaccactgtacttgcgcaagagctgtcctttaagctctctatcctcagcttgtggatctacaaattcattgttcatatcgacttcttcctcggatgacccattattgttcctatcaattgctgtctctccataaccttatattgattaaacatgtgaaagcaagacaaatttgtcaacaagaacatgtgtctagggaaatgaaaaagaataggctagtgatccaaataattcaaagtaacatgttaagtagatgtgagtttgtgtgtctatataaacttaactacattcttgaaaagaagagtgatatgacattgtgtagatatatgtatatgtgattatacgtacaaaaacatgtgtatgtctaaattgagcaatagatctaaggacgagcagactctagatccagatattctttttgatgcatttgaattaaatagatccaaaacaaacggagaagaaagagacaagaacagtgattgttgttgtaccaaagcaaatgaattcaattccaaacaaaacaaaaaaacagtaaacaaactgttttaattcaatgaaaacaactacatacactaacttatgtatagatagattatacacgtaaacctagtaagctatatataacaatctgacactaaccctagtaacaaccatcaaaggggtatttacccaagaaaaatcagaaaaaggaaaatctttcttaaaacccacaaagaaaaaaaacaactttcctcatcttacgtttaatttgacgccataattaacaagaatatgaattaaaaagaaagaaaaaaaaacagagaactagagagagaggagagagtaaccggagaaagaggaaggtgaggatagagagagggatttgaattgacactcgacacgttgaaggaagaccatagcttccttgaaaggtttggagagctcttgctcatacttaacgagcatttcacagtaagcttccatgaattgatcaagccctggatcttcacctagacatcctgttggtcccatagatgcggcagcggctgcggcagacgagcatgcctcctctagcctcgccacaacctccggtggtgctccaaccttaagaaattgtgtaattagtaaatgatagacataaaaacgttaattgaactaagataaggatcctcacgtttattgtggatatataatatagtaaagaaaaaaatgaaataattatatatgtcctaatcttcaagcctacatacaatattttggataatctcttgcaagtagggtttttacaaattgtttcttgaaactttctcaatataggaaaaattgtatcctttgatttgtatatacttagctgggttaagtaactagtaaacaaaagtagatatcaaaatcaaactcagacatcaagtaaagggttatgtaaaaaggaaataaaaggtaaagtttggtaattagggtttctagaatctttctcttcttttttgtgcaagaaaatcaaataagaatcattagagttacgaagaaactttcaaagtaattttttcaagtttctttctctcatcaccttctgacaattgacataagcggccaagaggcggtggtagtgaggatgagccatgatcttggccttgacagaggctgaagaagaggaagaggagcaagggttgattcctcctgcaacgatttcgttatgatggatctccattagagaataggcaggagcacaagaggaaggagaagaagaagaagcaactttgttcttagttccttggggaggagctagtgattgaagaaaaagggaactactttgttggtggtgtgactgatatgcataaccatcatgttcttgttgttgatgttgatgatcatgaccatgatgttgatgtgatgtcatgatgggcggcatcatcatcatcataggacacatcggaccatcactattatccccggcaaaagccattggacaagaagtgctgttggaaccactctccatcttctctttctctcactagtattattattcactttggctttgctatatagctatgagaaataaaaaatgaaaataacataaagaaaaaaaaagaggagcccccattgtaaatacagctagcatttatcatcaatatcatgaaacacattaaagtactataaatttattgggaaaccctaaaagagtaagtaactgtgtgtgtgtatctatggtttaatttaattatttgaaaatgcaaaagtggtctcccgggatttatgcttcaacaatcagcttccttttccacattgaaaattctaaatagtgatagttatgggggagagggaagcagcagaagagagaccaggaagataaatctaaggaaattattataaataggaaataactttttaggagaaacttattttaaaaaagtgtaaaaagcagacatggacagaggttgtgtgatctgtgggttcttaactcttttgtgttcttctgctgaaatatgatttctcatttatgccttttcggaaattaatgttgtaatttctcttcttcttttttgaggtaataaaccggatctcaatttatttttgacaatttcttgaaatggagaaaaccggaatgtgcctcggaaagtccagtgaaagatatattggaatttgttatttctttaccatgggtcgggagtatcaaatcgaatgttgtcatttggttttggttttcataccatgaattcccaaaagtctaagtttcctgatgggatatacgtatgctgatgttggtttaaaaagtacatttgtgtatatgtatatatgtatattatatggtatgtgaagatattattaggactgttgtactcaaaaactttcttagattctctcaataattaaccgatagatctccatatagtataatttacgcatttgtttcagtaacatatattggattcgcttttgtcaataggaaaagatagcagtcttagtaattttataataagtgatctaacatttgattgcaatcaaagttttaatactattgtaaatgttcttatgggaaaaaaatgttgttaagaagaagaaaaatgtcataaatataatcatagagtaaaacatgtaactgtttatttgttatataaacgaaaatattaaacacacattttaccttaaaaaaaaagtatcttgtattctgtattgtttttaaaaagtgacaactgatggcttgttatattagacaacaatgaaccatttgtatttgccaccattatcatgttctcgacctttttggtcgattgattgtaatattagatggtagacctcttgccacttgaaaaaataaccaatcacattcagaccactaaccaaatctatcgaggcattttaattagaataatatacgaggctattaacaattgttagcacttcttcgaacgtagaattgactcaacataggacacatgttactatcaagagaataagcatgggacacctgtacctgtttatccctgaaaatagtatacagacttgagaaaaattcatttacgattgacaaagtaattcatcaattgtcaatttggaggattgtacgaaggaaaatgatattatgcatgttactttaatacacaacgaaagaaatgtataattttactttaaatttaattgtctagttcaatactgtgggaaaaaaagaaaaacaatacaattaaaattatcaaaattgataagtacattacatcagtgccgtttattcgatcaacatttcactagccgtatgtattgctaattttgttatcactattcgaaatattatttagaagttggatatactatatattcccatactcgtatgtctatgtttataagtaaactatataaaaataaatatgttaaaaaaaagtaaagaccagtataaagctaatttttcttgcttttaggttaaggacagtgattcgttgaaatcaaaagtcttagaaaaatattgaagagagaaatcttcaaggcaaagttttactttccccatgaaagaagaaaaaaaactctctcctcagccactgccttcactgccatttctggcaaagaaaagataactgagaaactaatagatagagagagattacaaggaacccatcaaatcatatttatatattaccaaactggattttatttcatttgcttcaaattatgatttatatataccctaaaatatatttttttaaaaaatcttcatttagttatccaaaatatgttggatctggactaaaaagaagaaaagaagtgatttttctcttctttttttttttattttttttttctttgtctcctacgctcatagaattttaaaatcgaagtaataagttctcttttttatgatgacaaaaaaaaaagttctctttttatcaataataagattttaaccacaacaaattaggataaacaaaattaggataacgtaaaaaaaaaaaaggataacatagcaaaatattagatataaatattttgcatatgtttcccttatgaactttaaataaattttaaatacaataattaacttataggtaaatattaatcaatgttttgtcaattatctctagttgtgatttttaattgcgctgcgttttcgtttaagaagttattatactgttttcgacaatatgattaatgatttatgcgattttgggaagtgatgcacttgcaaaacttatatatatatcacactatttaaatatatatcacttttcatattattgaaaacgaacgtatatctctataatagtaggacaaataatctgaaagtagtagggattggaaagagtatgaaaagacatcattactaaaaagccattttggatgtatattcattacataaccgaaagcaattctactaaacaaacttatttcttcagttttgcagtttctactgaatatattagttggatcaacttttaccaaagcaatacaattttattcttttgccatggaaccaaaattgtaggatttacttaattgtattacctaaacctttttcatttttcaatgaaatatttacatttttagcaaagcaaaatacaattttacttttcttatttggttaattgatgagtttttggccaacctcacgcatatcttatgataagttaataacatataaaactatttaattcatattctaaactataaagaatatgattttatatctaaaaatgtaaacagcttgatgagaaaaaaaaaaagattttttcgggggtctctcatttaagaaccaaatagtctatttctatttgaatttatatattattttgaaaaatctcactttaaatgttcatagtttatacataattatatatatatatatatatcctaaattttgtctactattgtgattgtaataatagtttgatcgttgtgataaatgatgattacaagtcaaacctaatgtaataaacctgaacttttaaaaaataaacctgaactttaaaacattataagctgtaaaaaataaaattgtgttttataatctttttaggtttgtaaatattatgttaattgttctttttagaacatggattatattgtgctaaattaaaatgaaaatttagaaaatattcacacagaaataattaagaaggttagatttatttattcaaccaatggttttaaaagcatctatattggctcttaatataattcttagagatattaaaatttaaatttaatgtttaattggtaaaatagttaagatttggttcttatataagaaacaaaacacattttaataaacaaaatacactcttaaaaaaaaaaaattatcaaacctcttaacattaaaataaattataaaattattgttaagaacatttgctaaaagcccaccaatatggatggtctaatagtcaaataaaggaggtaacttatgctgtaatacgtagaattttagagaatctatcaggtctagggcaatcatttatcacttctacgaaagaaaaagttctaaaacaaaaggacttgaaactgttacttgcaagttttatttagtccaagtcagagcatataatctgcatttattttaaaagttggtttcttcttttagttgtaatatttaattaaaaataagatttaaataatgttattctacagaaaagcaagtggggacagtccgaatgtcttctctctctaaagccctaatgaccctactctctccctcttaaacagtagggctaatctctctctatactcttttcttttatagcttatataatttaaaaaaaagttttgtctatttttttcagtaccttgttcttttgttatcccagcgggaatctgattctctcgcatatagaagactcaataccatggaaatgagctgtttattaagcaaacgacgaaacacaaagtgaatatttatcaaattatacatatatacatataatggtgatggataacggtaccgtcatatatttgtattgctacattctatgaaaaacgtagtaccgcagttttgtattcctattgttcacaactaatttttctcgcttaaaagttataaccatttcgacgctcctattgaaactaataatgttaattcttaaaacaattttttgcattaaattaaacggaggctagagaaattgtaataattcttcgtaaattatctatatttttgttaatgtttgattttaaaaccaagttttcgacagttccacgtcaatcttcgaaaggatttcatttattagtagagaagtaaatgttttagtgaccgattgtgttatcacgggtatttatgcattaaaccccaaataagttaattattatctcatgggtaatacattaaagaacgtgttgcattatgtcatgctcacttttcttgactggtctgaaaagctattttattccaaatcatcaaaaaaaaaggttaaggataaattaattattggttttaatcgaagagattagttattgaccaaaaaataactgggaagatcctcaactggaacattaatagtagcatttaaaaactgtattgcaattaaaatttatactatgactatatctgttaatcataatttgttagttggtaaattcatagcttagataagaacatatacgcagtttaataaaattgctagatgttattaacaaagtcttaatacaaacttttaccaaattatattagccactttaattgtttttgtaatattaatatgtttggttacttatttctcagtgacagtagcaaacttttggggacgactgataggatcggctccattacatgagttgctttgatttacattaacttatataattaaaaaagaaaattgaatacaacctatacgtataaattttataattagaacccattacaaatacgcaaaaatattttaaattgttactttataaataaatctctgtaatgtatgccaaagcatgcttcagtcagattattctgataaaagacatgtatttgtctacattaaattgtgtccgtttacatatcaccttgatattcttaatttttaaagtagtaatacaaattaatagctaaattttttaagactatatgcataaaacaaaagtcgagattatgcatatttatgtacttcttgcacatctttaaaacagactatcatgaagatgatgacactagtcctgaactgcttaaaaatctattacttttgttttaatttcattttactttctaggaagttgaatttttcttctctttaagaaaaaattgttgaagacagctaggttgggttataatgggtgcttgatgtttagatacgtgacaaaataaaaagttagatacatgtctcggagattctatatgctttgatgctttgtaataattccaaacattattggactcttgaccctataaatttaaattctatattgttgtgtatcatataacagatgtttagtggtagttcatatgttttaatgtgttcactatattgatataaattatcaaatatatgcttgtgaaaaaataatatcaaaatatatattaagataatttgggtaaggtaaaatctgttagtttcttatttggatgaaaatggttgtttgagagagtaaatatttcttttatttgaaaagaagatctccaatggtgcaaaattttgagaagaaaacatcatgtttagagaatatagtaatagtaataccctaatcgagatctagtattactacgtctagcgatcactgtcgttagcattaaatattggacacttataacctcttaaaaactgaggttcggaactaacttgaaaccgcgtgtaagaactagtgatcttaattggcttatctctagtcgatttctaaggctcttgccttgtctctagtatttttgctatttcggtctggttggtgatgtgtgatggtgtttgtatttgtgtctctcgttcgggtggtttcttgctatcctccatgttggattgttactggtttaacatcagtatgagttctttctgatcttattggtgcttccgatgttcactgcttctttgaggaacctttgtaagagtttctggttcttttgcgcaattttagtgtttaaattttcattttcgatcttttttttagatatttgtctttttgtttttattgttggtctaaatagtttttccgtttggttggagcttagcttccctcttttggtcttagtttctgaagacattttgttggtctgccggcgtttgtatttcaaatggtattctaccttgagttcttaataaaattcagacgacaaaaaaaatgaactaatctgaaacagttttaacaaatctcaaatgaaattttaaaaaaccaatacataaaataaaacagatatgtaaaagtcctaaacgaatgcatggttctaatacggttcgttatgtctttgctaaactagtcacatatataatttcgtattcgccaaacacatattccaaataatatatatgtatattaccataccggcatacccatacatgtcaatgacatgtccatctatgtaaacaatcacatatttttgttaaattgtagggtcatatctttaagttgtttgacctcacaactagagcacattaggtattttatgcatgtttgtataagaatttaatctctctaatttacagttttcacctttttgttgttgctgaagagcaaaaaagaaaagaaatatatactaccaaatttgtatcacattgttttattgaaatttatggtggtggaaagtgaatgtagttttcatgtaggaataaactacaatctcttatgcatgtatttttcaatcggttttgtctttcataaagaaacgtcgcagttgatgaaatttttttttatggtatatattttgttcctagtaatatcatgtaccattatgtttatcaattttttttttttttaaatcaaacatgtatcattggctccgaaaaggaacaccatgtatcattactcttcaacaatgatacttttactcgatatatatttcgtggacgtggtccaaccatgatttgacacactgaaacaataacggtgaatgttaatatcatcttcaagaagatgaataatgaagaattgaagatggcgatgatatagtgtacataattttatatatccataatccattatggtacccttcaaatcatagtagggccacggggttcccccgtgaaaggtatcaccgtacccacaaatatcaatctcaacatataatgacaatattttttggcgtaatatgacacttaaattacatctcatgtcaatgaatattggaagtagttttttttttctttttcaacaatgtattgtttatttcttttcttttccctaaagtaaattatatttaatatatacctgttaacgatattaattagaattcaaaagaatcatttttgaaaaatattataaatgcatgatataaaggagtttggtacaaatatttcattcaaattatctattttaacatttgcattatgaaaaacaagctattgtatcattatattgtttcatgcaaaccattaaactaatcactcctcaaatttctttgtgagttagtgaaatgaactaatgtaactaagagatatattaacatttgttaaaaagtcgaaaaattacctaataacgttggaagcttcaacctctagaaattccaaaatttaggaagtcgaagatttgtagggttagggattagcatgctcttaaaaacacacatccacatgtttacacaaaaactcgtagatacgtacgtaagtatacataaatatatggatgtgtgagaaatgtgaatccatagaaccaaaagaaaaataaaaacagagggaagagagaataaaggaggaaaggtgaggtcgtgagacgtcattgaagagggagacaaactacaatctcttactctctctctctctcccttgctttacgtcacctctgtctactattgaaagatttgttattttgtttgccttttcctatttttatattttgtatatttaataaagcatgtatacctatattccaatatttttagtaatagataatttagcctatttttctttcttgcagatctgtgctatatctataaaaatatacttatattccaatattctttttttccaatattcttaataatcagattttaaacttatgaatatttgtcaatttttaaacatattaaattttttaagttaaaacaaaatatataaattgccacaagttttttttaattacgagataaattatagtctataattttttgcactagaattttgaaaatgctattttaaatttagatacaaataaaattatcgtaactttagaaaacaaattgtatgaaataaattacaagggccatgatatgatgataatggaattttaatttgtccaaactttttgtttagttatggtctatacagtactccatacatttttgttttgttatggtctatacatacttacgtacgtccatgtataaagttttgttatggagtttgagccaaaaaaaaatgtttagtgaaaaaataagaatgagtagagagacttgtgttctctcaaacccaagaaggcaataagcaaaaagaatcaaaactagtgatcgaccaaaaacaattgactaatattaagtcttgtaacatctgatcaaactcttaggtttgactaggattcaaaaagcaatttggtaaattaaaaggtgaatacctgttaattatatatagtgcacaagccacaacttcatgttaggatatgatagaaacgacataagacaagagattgattggtaactacaaacgtcaaatagatattctccttgttcccctcttataccaaacattcaaacaataatggcttacatttggaccacccaaccttaccttctttcattcccctcttatgctttcagtttcaatgctcaaattactttcactatagctctcaatctgatcggtacttgcttatcgacaggactacaactaaagatgttttaaaaataaaataaaatttgagtttatccttcaaagctctatatagctatattcgttgtagttgtatatcgaacatacactttagtagagtcccacataggaaattgacgaaattctttgggaatatagaagtgtgtagcaattcctcctcttttgaactaacttttggatgcgagttaggtccacagtccacactaataatttattttccaaatgttcttcgtacaaatcattttgagttatgcactttcataattttcacagttttaactttttcaacttgattagtaatttatcttctatatctcgttataaaacataattctatatcttagctttccaaacgaaagcataacagtgggaatataaagaagaatggatcacaattcaatatttgtggcacaagtgtaagaagagcagattgttagagaataatacacacaaacttcagtacatctggttttaattacatttctataacctaaatatgttgtatcggatccgaaactagtaggaaactctttggtcacctagtgacattggtttttaaagttttttttggttttggtaaattgttaagctcattagttttgaaagttcttacaacagaaaccaatcacaaagatgattcaaaaaatcaagttcaagaagatggttgatagaattccgcaagtagacaagaattggcgttgataacaactaaacttggcctaatctaccttcttgactgtgttcttgagcccaaaaaaataattttatcggcctgtaccttggacttatgccttcagctttaggcccaaatatttattcttttgttagtctcagtttttttatttggtcacgaaatcttggttaatcacaagatcatattttagaattaatgtttcaaaatgtatagtatataattaaaacgccttcaatcattgattaatataacaacatttttttgaagaagcaacatttgataattgatgtcttccctaacggacaaaataatcttattaagaacaaaaacaaaccaaccaatggaaacataatataaaaatcgatgtaccaaaataatataaaatcataacattgagaaatacgtgcgattccctataatacaaaacgtaagtcaaacaaatacgttactattgatattgagtggttcccactaattattctcctaattttgtcattttgtccattttaatagcataatgtattgtcacaaaaatgcaacatttaatatttatatccaaatttgtgatcttctcaaagaactcaagataaaaaaaaacaagagttcttgcttaagcatttattgattggagccattaaagcttttatatttctcgtgaatttttgagccaaaacggttatatatttcttgagtttttcttttcttgtaacgggtccgagtcacgatgagtcaactcggagatttgcttagagaatcagaagatggaacaagaagtgagaggacgatgatgatgagtttgctcgaagaagatcaaatcaacggtggagatagaacgatgagcaaatggactacgttaaagcaacggctgagatttgattgggttggttgttgtggtaagcctcttactctgcgtctcagacaagcggagacaccaatcgtcgtcgatgatgatgacgacgaagaagaaagtcaaaaccaggtcgttgacttttcggatccgggtacgggtacggagttggattgtttgacacgtggctcaacgaggaaccttgcagaggctttagcggaggagagattagcgcacgtgacggaggaggagacagcagttactaaagtaccgttgatgaggttgcttgcggaatcggacggttgtgattcgacgacgacgtggttgggtaatgatccgctgtgttgtgtgtgtatgggaagagagaaaggtgcggcttttattccctgtggacatacgtattgtagagtttgttcaagagagatttggatgaatcgtgggacgtgtcctctttgtaaccgttcgatctttgacgttcttgatctttactgaaaaaaaattcatagatcgatctgatcgacggtgatgatatgttaaatttctttgtgcatatttatattagtaattacatgatttggtgatgaatcttgtagtaaagataaataaatggtgactaatcaaaaaggtaccactaattaacgttgtgaacaagtacttatagatctttaaagaaaaatattctatataattttatgattaaatttagtaacttttctcttattcacttcaaaaacaataattcaagtcattatatattttcaaccgttgttacttgtttagtagagtgtttttttaatagtaaacatagttagacgtagtcacgtagaacttgatctcatcaactttggacttaatttgtataattaatgtcttagtagtggtgatatataccattctggttagcctcggtttctgctgcagaaagcttgtatggtgatgtaatttgagctcggctgcaacgctaaggaagatcgtcgatcgccggcaccgctagctttaaggaccttattgccactaattgcttcacgttgttgagcgtggcactttgtatgcctttgttgggcttttttctttctaaaatttacaagttgcagagatgcttgtaggcctgtttatgcacatcatcagttattgggcctgatcgaaaatatggaccactaatgtcgaggttgtttaatatattatttgttcacgaatgatctaatacatgatagtcacttgagaaatcttagaaattgactatcagagtaatacacgacgaaacttttgaatgttacatatacgatttaatcgtgtggttgaagtcaaacaaaattatgaaatggaaaattcaaaatattgtcaaatcttgtgatgttatctccgaggcatacatgagtttgtgatgtcaacgttacatgaaattacacgcatatatgtagaatctaggctgtgtgagattatgaatagatttatgtgttattagtgggttggtaagcttaaatcacatcatgaagcattatcaattatctagttaagtttcaacaatattcgaaaggtcatgcataaaatcataagacaatatatactgatggaaaattcaagtgttgtcaataacagaatataaactaactgatatatctctatcattatgtatataacaaactctgtccaaaaaaaaaatgtatataacaaacattccattttgaatttattcccttcttgagtttaaagaagaagaaaaaaacaagaaggtgtatataacgctaaagagtttattctccgtgtcaatgttttaagagaaaatatgcctttgagactataacttttggtggtatcaaaatcaaattctattattagtgtcaagttcagacatttctatgtgccatcatgaccgagagctactggtgttaagtaagtaccttacgtaacctatttgcattcaaattcaataagtggtgcaaataaattgacaaatcgtatgaaagtgcagccatcaacattgttgacgattcggtttggtgttatttttcgaatgtattataactttgtcatgcattagttaataccattatacgtgaaagtaagtataaatcatatcatctcatatctatcaaaaaagaagttaagagagaacatgtcttgttcaaagagttttaagaagatgttttgccaatgtgtcgagagtgtttttattggttattttgcttagtttcaatgatatatatccccttgtttgttttatttgcaaaaaaaaaaaagaggatgttttttcccacaacatatacgtcttttggtattttgaaattttgtaaactctttattgcgtttagcattcacaatttttatttttttaatgtaaacttgaaatgttttcttttttcacaattatatgatatttttttaaaaaatagttgttttcttgggtcaaaataattattatacatgtaaaaacgcagaagaaaaaaagtcttttataactatgatctcatatactttagactttagtatctatacatgtaataattttacagagtattatagtttaagctttgcatatttcaatatatatatatatatatatatatatttgtttttacctcacagaaagtatgttacatcataaaaaccccttaatttttctatttatatcacctatcacataaattattttgtcttatgtatttaatgaaaacttacttttatacttctattaactcaaaccaaattctttttattaaaaaaaaagtaataagtctatagatatgtcaaaagtgagtgctgtattatttgtggctattgagagaagatgtgtcatggatgtgacccaggttagatacatatctatgtatgaatgtaatgaatagatgagaacaaggcatgtgcatcaagttccaaaatagagttgagacaatgtcgtccatgttcatgaacccatctctcatttatggttaaccaattggtacaaaccttaaatatgtcccctctcatggaccaaacacatttaacgaaacacacttttcctaaaatggcaatctacctatccccatcccatcatttagtttattaattcccacactctcgtgattatagattcatcatggcgacaaagttaagtggctaattaatttgatttaaataaagttgtttttacacgttgatgtgttccgagtatttaaacgaaaagatgaaaatgttttattttttctagagataaaactattacatgtttttgtttatgattaataaataaaagtagatcacaaagactttttcaaaaattatgtatatacaacatgatgataaaatttaattagggataagtttgcttcccctaatttttttttttttgattatcatgttgtcaaatgatatgattatgtattaatgcgctataacaacttgataataaaaatattagtgcgataaggatcataggatgagatcatagagatgaatgtttaatttagtggtaaaatttaattttcgatcatcttgtaaaaatttaatttcttttttacatgctgttataatgatcatgctgtaaaaatctacgacaaatcttacgctgggcacaaattaaaatggggattgaaaattaagatttataattaaagtattttatgcatgtattaatcggtcctatgatttgttctacttatctattttgactacggaacttcttttatttttcttttgaatgcggaacttgtttattatacaagaagaaaagacaaaaaaaagaaggagttctaaactcccaattgatagaaaaaaaagtacatcaattaagttattagtcgaacaaaaaaagaagataactgtgagaaatataaagtgagttctaaactcccactttgatcgttgctaatccgcattgatgaaaataatatataaccactcacatttaaagggtagatcaaataagtaagatctacccttattgagcaacaaaatatgactccgaattaactagctaaaggaaaaattggtagacctaagatatgattattgagcaagaaatgagacggcacaatgtttgccataacgaggaagtacacgaaaccgaattatgggtaagattcatagaatttagtccaaaacccggactaataatacccaaaaataataattttatctgattatattcaaattaatactatgcagaacgatccatatatatatacacgcaactattactagttatacctataagtgtttattaatatgttttcgacatcgtttaaacatagcagttaagtgttgtttagcgtatgtggagaagctccatggtctatagttctgctagtgtaatagtataccttctagagaggatatggttaaagtcacgagttcgaatctcgaacatggggagaagactaaatgccctacgctagagtatatgatctggtccgaacggattatgagtatttaatctcttgctaatccaaaaaaataacattatataaacgatacttcattttaatttatttatcttttgttcaatacgataaaatggccgcaatttgcaaagctaaaaagttgatagacaatttcacattttgtctctgtcatcatttattccaagcatgcgctggtccttcatttccatttctatcattttccatctatttatttcgatttgtttaacgttttatagttatcattatcatacaaaagtttgatatatgtcacacaaataattcaaaagtttgaataaaccattttatgttagttactttggtgttatcctgaaatatacgcggatcccgctctcctttttggttcaccaatctttgttcagcactatataaatacaaaaccaagatctagcaaacaaaaggcaaaaatttgtatttcggtaacaataaaatttaggctatgtaattttaataaattttctaggtagactagattcgagatcataccattaacactaaaacaacgcatgattaattaagcagcttggacagaaagcaaaaactcttatttgctcactagaagtcaatagtttaattgaaaaagtattatggaataatctaataggttacagaatctagtggtaattcgaataaattactaaagaataaccccggtttaaggggatgttgtaagttcaattcataatttacaccaaaagaaaggaaaaaaaaaactatgtttctttctcattttatttcaaagaaacaatagagaagtaatcacatacacatgattgaaccaatgtcggttaattacgaaaacttaaactttaaaccataacaatattgaaagttttgtaaattatgtaaaacactacaattaaagtaagcctggttatgttttcttttgtgcacaagtaaagacctattattagttgttattatattgtagattcatgtacatattgaacaaaagacaatattttgaagggcggccatatataactcattagcagttagcgttactatgttcattaatcgattcttcgaaccttacatatgtaagaaccataatataaaatctctggtactaaatgttccacaataagtcattatttaaattatatataaagaaaaagcaaacaaggattaaccatttaatctaatgcagtgttataaagaatatgaagaataaattcttgatcataaagaatgtataacctaatcaacatgatatttctattttgataaacacacatactaaatgattcctaagaaacttgtaactaaagtaaaatcatatatatgtactattcggtatgattaaagttgttaaatcttttgctagattacttttttatttaaaaaataaaatagatcagtaattatttttataatatccatcatttgctatagaatctgtaaatcactttgaatcggtaaactttaattgtaaaaagctggaaatcacaaactgtgataatctgtaaactctaagattgaaatccgaaactttttgtaaaagccgtccaatcttttttccaacccaaattttctaacataaaactttctagcaaccaaaattcaaaattaactaacatgggattttctaattgcatagtaaccatttgaaatgtttagttgagtaaatcttcttttgtgttaaaaaatatagtagtgtggaggactttcatcgattaaaaacgttaataattgtaatagcattcaaagcaccaataagaattattaaatattcacccaacatagaatgaaatatatgtattgtaactttgcatcatatctctttcatgtaaaccgaatatttcgaaaaagaaaaattcccattattcaatattgccctcgtgatttatagatatacaaataaacatatttaacttatataaaaatgctgaatcgtgacgtaaacgaataaaaaataaaaatcgaaagccatgaatgatgaagttcatgaacctgatatatgtcctcttgtgatataacctaatttgtatgatttgatttgtcgtacgccatgctttcaaccactcataaggataaccaattataagaataaccaattgaccaaaaactttgatttctccaagggaataaagaaagacattttgtagattacattatattttatcctcgatctagaaataacgactatatttcttatttttcccaatcaaaaatttcctaattttctatatttgtttcaataacgtatcaaggtaaaatcattaattaaaaaaaaatatgcttctcgtttaaccaaaataccattcacatataccctttaaaatttttaaatgattaatttcatgtagaaatcatatagactgtaaatgggttcacgaaaaaaaaactggaaaacgatgaatattgatagaatgaataaaaatggtattgatagaatgaataaaaatgagaatgtaacaaaaaagatacgtgaaatttgctaatcccatgacaccgtgcttgcactctttttaagatctaaaaacttatatatttcttctaactagtagtaaaaaactaacccttttcttaatacaacttttttgcaataatatatatcttaactggtttaaatcttatggtataacaatttgtcccaaaaaaaaaaaaacttatggtatacaattaaaaaacagctactaatagtctaatacttcttgtttttttcatcagaagctactaatacaaaccattaaagttttttatttatttctatcaattatttctcgtggttttttgaatggtcaaagatcaaattgtatttaataacgtcacaaaataatctgagaaaaaacgagagaaatggtttgcgaaagtttctatcagactagagcaaactgaaaagacagaaaaacgaaaataggttagcaagcaaattgccacttaaaatatttcattaaattaacaactcaacaagaccttgttccggcaaacacatacagtgcgtcggattataaaaacatagtcggcattggtaaaatacaagttaaatgcgtattaaacataaacacataagctttacttttagttttattgtagtgaagcaatagttttgttaaaacatttttccaggaaaataaatcaagaatgatgcggcaatgcaaatcatctatctagcatcaacacctttttgacttttggattcatttctaaattaactagtataatttataatttaggatgatttgttttatattgaattaaaatggatacagaatctatgatcgagtagattacaaaaaatgattaaaaaaagaagaagaattaagttgaacaaaaaaaattgaaccaaactcgcatgaaatagtgaatatacagggtatgatgggaaccaaatatatatttaaattttaaacttacatctatcttaatttttgcttcccatgttatcttttggtactcatatcatagttcatagattatgtgcgtacacactacacatatgattatgatttatgaatactgcattaaactgtttcaaatgcacactttaatttctctttttctccaaccaaactttaatctagatctaaacattatatattcataatcatgtgtacccattagacaattattggaaaataaaaaattatatcacgcgcatgaatggagtctaagatcgcccaagagaaaagtaggtagcagccacgaccgaagtctttgttctcactttggttaacgtttttaagacgatagggagagtgagaaagagacattgtgttattcaacagtttattatgtaatataagcttaattgcaactagtaactaactaataacattttacattgtgtatacgtaacgacggcttatggttgtgatattgttttggatgaattattgagttagaaaacaggttttttaataaagtgaaaagaaagaagtaatattttatggttttataccataatgcactctttaagttgagtaggaatattcgataaatttaattccaatatataattatttgacttgtattctttaattatgaaacatcagatcaacgtagaaagtgtgaaggaattttaagatgaattgatatattaaaaggtggcgaatattatcaaacaagccaccctgtaaatttggtagtttatatcccatatgctttctatttttctgaaacactgatacataatatctcctaaaaacaaatatattagagaatttttttgataaaggtttcttagttcttacatcaattcgaaagatgatatacatgctatcaatatcaccatgaattatccttgatactagaaaattgatggcacacttgatataagaacttgtattttcaatatacatttattctatacaaaaaaaaaaaaaaaatcctagaacaagtgggtagagaatctctaacaagtaagtttcaataaatatacaagacaaaataaattatgtgataaatgataaaaagagacaaattaagcgagttttatggatcaacagatgatttgtctgataaaaataaaatctttatactggaaataattcggacggtgtgcaaagccaaatctaaaatacaaaagaagtaaagtgttacacatttgaaaagaatcctagaatgttacattattgcaattttaaaaattccttataaaaaggatatcaagtaattttcgaaatcagtatcctgaaaatggaaaatgtaagtgatagaactagtctcctttttaggaagggtctcttctcaaatttggttatatgattcaaacgatgggctcaactagtaaactttgtcattcagagttgtttcgaaatacttgaaatctctcattattgttctcttttttcgtaaatttttcaaactatttcgaataaaataaccccaaaagggaagagaaaagaaaccaattgaagtgtataaatagagacccaaaaggaaaatgccaaatgaatcaatctcttaaagaaaggagatggtaggggtccatctatgatgtgctcacatacatgctccacgaactcttgtttcttttactttaacttcttcttttttaacaatttgaatgaaacatatttatacatcttatctatgactatgactcgcacatattttctcagaattttatttattttattgaaagccaatctctctcatttgcgcctataaatagcaaccctctctcattctacaagtctcacatcaaagcaattaacaaatacacaacttgtaacttcaaatagattactttcaaagaagagagagagaaagaaagatggagaagaacatgaagtttccagtagtagacttgtccaagctcaatggggaagagagagaccaaaccatggctctaatcaatgaagcttgtgagaattggggcttctttgaggtacatacacaatatctaacatattattgtttgaaaagatttgactatagctagctcttagtggtaaggttgatcttttgttaatttcatttttcagatagtgaaccatggattaccacatgacttaatggacaagatcgagaagatgacaaaggaccattacaagacatgccaagaacaaaagttcaatgacatgctcaagtccaaaggtttggataatcttgagacagaagtcgaagatgtcgattgggaaagcactttctacgttcgtcacctccctcaatccaatctcaatgacatttcagatgtgtctgatgaatacaggtacataatgtttttagaaaaatactattttagatcgaatgttatattcatttagtgataaataatatttattttcttctatgaaaaaaattagtcaccacacaaaaactcccccttaatcataacatctcttaggatacatgaataccaataaggccagttaattatcacttatttgtaggaccgaatttaattctatttttcttaaataaatctcaaattgactgtaaaaaaatttcagttgtacactctacctcttttacctttaattataaatattttcttactttttactttttctcacatgcatgagtttaagaatttctgactttttgtgatatttattggtaaatattttattgttaaaacccatttaaaaattattattttacttaaaagtaacttgaaacttgcatagtgaagcataatcattttcttttttgggaaatattatgtaatatattctgatttggcaggacggccatgaaagactttggtaagagactggagaatcttgctgaggatttgttggatctactgtgtgagaatctagggttagagaaagggtatttgaagaaagtgtttcatggaacaaaaggcccaacctttgggacaaaggtgagcaattatccaccatgtcctaaaccagagatgatcaaaggtcttagggcccacactgatgcaggaggcatcatcttgttgtttcaagacgacaaggtcagtggtctccagcttcttaaagatggtgactggattgatgttcctcctctcaaccactctattgtcatcaatcttggtgaccaacttgaggtatgtcatgttcacaccacattttcaaaatatctttttgctaacaaaaccaatgtgttatggtttagtctcggtttgatggaactataggaaacggttagtaaatgttataaccgagttaaaccggaagaacgacatgcaatcttaattgagtatgattcggtacagctaaaccgatctgaattgtctgtaggtgataaccaacgggaagtataagagtgtgctgcaccgtgtggtgactcaacaagaaggaaacaggatgtcggttgcatcgttttacaacccgggaagcgatgcggagatctcaccagctacttcgcttgtcgagaaagattccgagtacccgagtttcgtctttgatgactacatgaagctttatgcaggggtcaagtttcagcccaaggagccacggttcgcagcaatgaagaatgcttctgcagttacagaactgaatcctacagcagccgtagagactttctaaaaatggatttgagattcaagtgaagcagagaaagaaagatgagtttgtgttgtgtgttatggcaataagttaaaacttgtattagtgttgattaattgttggtcaattggtgtgttttaaagtgtggggtgtttatgtttatggaagatgataataattataaaaatctaaattctaagagttctaacgtggtcatcaccaaatcaagtcaaaacactctgtttcagaacttaacacaaatgaagctaaagtagcttttatcattaaagaagaagaaggaagttcagaagaatcaatcactaatgcaaaaacaacacaaatacttaaaaggttgaaacttaaacagagtttacaaatttatctaacaaatgccctggaaaatttatcacctttgaggtgaagaagataaacttaaaaaaaacatctgagaatcatcaaatcaagcaagattcagtagtctacatcttcagggttattttccagtcacacaaccattcattaagcgagaatcggtttttgtttcatagcttttgatatcgtaattcttgttcggataaagggtttcaaggcgcaggtacctttttctcatctccttcggtagcagcggcttcattggaacaatggttcttgacaactgttgctatgtcagcttcagaagcacctgcaagtttgaatctttcaacagctgaatcaagattcttattccaaccatccttcccgattttgcattcaacttgcgatctttcgaacagcatgtttccccaaaacagatggatctgtgatctcattgcagtcgcttgttctgctgcttcctcagctgtgattgtctctgaaacctcttcattcccatctcctccttgcttctttctcctctttgaaacttcctctttcttgttcgagttcgggttttttaaatcatccatcctctgctcttcaagcttctcccacatctctgtagcatctttcatcttcgcctctgcactgtcaaagagatttagggtttccgacggatcccaacctgagatatcgatcttctgagctagcaagtaagaccagtgtagcttcgccatttcaaattgctgctgtcctaacgcaagcaaaccttcgtaaaaatctggtttgatcgagagagcctgttcatatttctcctttgccaatgtgtatctctctttcacccactcgtaagcggtttgaagttgtgcagcaaccacttcttttcccgcagattcgtctaaaggaatcctctttctagcggcacacatgtgaacatttccccagttaaagaaagctaaagcagcgacttcttggaatttcgcagaagctttatcgaatagtggttgagctttctcgcttgtcacagtttcttcaagcgcctctgagcaaagctccattcccaactcatgtaaatcaatatgagcatcagggtcaataccgacatgagtacggaacagatgagcaaaatcaaacaaccagtcgtccatctccaattccttggtctcaggatcttcagaagaacttgctttctccttttcaacttccttatctgtcttctcagtgttgatctctgtttccgatagtgattctgtaggagatgatatgacttcttctataacaggcttctcttccacttcctcctcttcttcctcgagcaacatcggctcttgctcaggactcacatcaacaacatgcaatctcaacatcccaacagaatcagacttatcagtatcaggctctttcgtcaaaatacaatcagcagcagattccgccaatttcagctctgcagtagaagttatagtcaccaaatctccgtcattgtccttgtacttaatcaaaaccgcctttgaagacgggaaacgactgctcacaatctctctcaattccttaaacctacagttcacaggcatctgacccaaccttatgtcatggtcataaacaaacttcaacggcctccaccgaatcctcttctcttgaaccttcccaacaaccgccacagaagaagaacccaactcctcaaccttcgacccttttggcgaatgactaaccggcttcaacacaactctcgacgcctgtcccttactcaccgaaccaccattttcagtcacaggattcaccacctgtggcctctcaaccttaccattactagcattaggcaacgaaacagacccaacaggcgaagtaactccctttttatgaacattacgagaaggcaaacaaggaccaagtccagcaataggaccgcctaaagcagccgaagcaccaagagctgcaggtgaaggacggctctgcaaatcttggtgaggacccaaagcagtttttaaccgcttcgaaatctcaccagcatccttatgattaggatcagaacccaacaaaacattaacatcctgaacagctaaatcaaacttgccaacagcttcaaaagctctagctcttctaagcaaagcacgagtaaaaccaggctgagatttaagagccattgaacattcagaaatcacagattcataatcaattggtttcatctgcatcaaacaagcagctctattgctatgaaacacagctctatctggatgactcttaggaataagcttaataccattctcgtattgttcaagagcaccaacgtaatctcttgcttgaaactttttattaccttcttccttaagctcatgtgcacgtttcaagaatatcgaagcatcgaaatcaacaccaccattaacaatcgttgacggtttggataatcctgaagtttcagatgaattgacttgactcgaattcgaattcgaaccaccactcttcttcttccttcctccagatttccccattttcaatctcctctatcccaaaaaaagcttcaaaatattcaaaatctaagcgcaaattccgatgaatagatggagaaagggagatacccagatgcttaaagatcgaaatgaagggaaattagtcggagaaatgaagagaaaatggtcaaattcagataaagttgaatactttaagggaagaagaaggtgctagaagaagatgagcctgacggggttttgaaaaactagaaaccctagctcaaaggggaatcatcaacttgttgtctctccactattttaccaagtcgtgagataaattttgggccgaagatggaagataatgggcctagagattttcagcccaatggctgaaaacattttatgcatgaatggatttgtaactagtatcggaaaccatccaaacatgtgatgttgtagactagatcatctataaaattgtatggtctaaactatacaagctatgtaaatggtgtctgtttctaatactatgtaaactagttaacaagatttcgttaaaataaactataataaccaatgaatcaaatcggtaattggaactaattgagtgtccaacgctcacaaagccaacccctaaatctcataaacctacaaaaggacaaaatgtattagaagattgtgaatcgcaattttgacaaaaaaaaaagagtgagaaaagaagaagtatagttatctttctaagtctagttaaatgatctacttgttggaacttcaattctaaaccaatgacttctggtgaagttcattaccaaaatgatcggatcttgaagtcattagattctctgcaatgaacattataaactaatgtaactacatgtaaaaattgaagtcatattacataagaaattgaggtcttagtttgaaagcttataatagcaatgaacaaatataaacatttatttcacattggaaaatgaaatattttcctctatatatattatacacttactacaagtttcactagctttgtgaagaggacattatggtataagtgatgaatagacatgcaaaacaaacatcgggttttggtgaatgtgcccacaaaagatttatgaaacatttgttttttgaatttaatgctaaattatattcaaaataaaaaaaaacgttttttacacaaaactggaaactgattgaaactttttatgaaaaaaaaacttctcttctctaagctctcgatgcaaaccaaactctcatttcatccttatacttcaaaacaccacaaccactcatcgtacttaaacgatttctgacgtttttgtctatcatttttataagtctctccggcagggatgggctcttcccgtgtcttctttggttcctttcattccaaattgagtgtatgaaacattcgtcacatatttttggtccaagatcaaactgttttctcttcggatttttattcaacatttgtcacatatttttggtccaagatcaaacagttttctctaacggaacaagattctacagcttctcagcttccacgtggtcccgatcatggattgccacgtgtacgattccacttggtaaacatgatttttttttggaaagacaagttgtatctgtaagattaaataattcagtacgaaaaggcatcgaatcctcactcacggattgttcacaaatgttgtctccaagtagtgtaaaatatttcgctttttacacattgccaaagatcatctccatccattaacgttacgtttatctccgaatatactttatgaaacagtttgttaattaattaagttctagatatcaggtagaaagagagtttatgacactttctgtcatttttagtcatattttaagggaaggtttttgcagagactagaaaactgcaaatcatatagtgtttctaactttgatatattgaagatttttttttgttgatatattgaaattttgatgtaatattaacatgtcttatttatgtttctttatctcattcggatgtatatattttttatgccacaaggttttctgtgacctaatatcttatatgatcaaatcaatagtttctatatccaaatataacatgatctaatggtacaccaataaaaatgctccaacgatgatcgtgaaaaccaataagaatgtgatctgaatttggtttattattacggtgtaattttgttattttactagccagtgttgtatatggatgaatcaaagtgtaattttttgtgtaactaattattcgtcgatcgcgacaattcccttttaagataggatagtttattgatatataaaataatcctaatactaaaatagaaaaagacggtcagataacaaatattttcgcagtcgcgtctaatggtttttacgaagttgaatacagtgtgatctttggattatttttgaagtcaatcttcatctataatttttttttaaataatattaggataataataggttgaagagaaataattatatccataattttctgtaaataaatacagctttactttatatttattatcatcatcgaaccaatgatatgaagcaattttagtcggtaacttggcgagtcgttaattcagttcgaattataaaaagacttctaaacacgaaccgaacacgatttgatttgttctcaagagaaaatatataaatagatttataactctttacttctcaaaaggctaacttttgaaccaagcaatcacgagaaacctttgaaaatctcttactttggatccgttcccttattcacttggtttcttctttaacttccaaaactcaacttgtaaccaaaactttctggtgcttttctttcttctcgtgtcctttatttccccggaaaatttaagctcctcttcgttagtttccccggaaagtttcatcattgttatacactaggaaaaaagaagaagatgaaacccatttgtttccttctctgtttctgcttccttcctgtgaaagtctcttccttttgacacaagtctcttctgtttcaaattttctctgttggcttatttcttcttttccctgattctgttttgttttccctagaaaattaatgaaacgacggttagattctcgggagatcctatcgaacccatgtttttgaatcagttcatgcacttcctgaaatctattcatactttcagaaggaaaaacctagtttaacatatctttaaccctaatttctctgctttcaaaccctaccttgtgaaccaagcaaaactctcctttgatcaatatgtctggtttatgtttcaatccgtttcgtctacgttggtctctaagatccaaattacctttagagccgtccctcccgaatttaccctgtaacccatcttcctccaaaaccaaccggtatgcagaagcagagacgatggagaagaagagatttgacagtatggaatcttggtcgatgatcctcgagtccgagaacgtggagacatgggaagcttctaaaggcgaaagagaggaatggaccgcagatctttcgcagctatttatcggaaacaaatttgcttccggagcacactctagaatatacagagggatctacaaacaaagagccgttgccgtgaagatggtgaggatcccaacacacaaggaagagacaagggctaagcttgaacaacagtttaagtccgaggttgctctgctttctcgtctctttcaccctaacatcgttcaggtctgtattgtttatcttcttatcaaaacatgtagctttcattatcaagaagtaatatcattgagggagaaaaaaaacagagcaaagatcattggctttagaaaatatgtgtctctacaaggtttaaaattcttgctaatttcatcttttattttgatatatagttcattgcggcgtgcaagaaaccgccggtgtactgcattataacagagtacatgtcacaaggaaacctccgaatgtacctaaacaagaaagagccttactcgctttcgatcgagaccgtactaaggctggctctagacatctcaagaggaatggagtatcttcactcgcaaggtgttatccacagagacctaaagtccaacaatttgcttttgaacgacgagatgagagttaaagttgcagactttgggacatcttgtcttgagacgcaatgcagagaggccaagggtaacatgggaacttatagatggatggctccagagatgatcaaggagaagccttataccagaaaagtcgatgtttatagctttggcatcgttctatgggaactcaccaccgcgttgcttccgttccaaggcatgactcctgtgcaagccgcattcgcagtcgctgaaaaggtcagtctccattcatcttatttaccagattgttgtttttcttgggatacaagttattgatttttttggtttctttgatgagcagaacgaaagaccaccattgccggcgagctgtcaaccagcgctagctcatctaatcaagaggtgttggtcagagaatccgtcgaagcggccagacttctcaaacatagtggcggtgctagagaagtacgacgagtgtgtcaaagaaggactgcctttgacgtcacacgcaagcctaacgaagacaaagaaagctattcttgatcaccttaaaggctgtgtcacatccattagctcaccattttcttcctcctctgttcctgtaaatgcctagtagtagataaaagttatttgaagtacctgtaacctggtctcattccaaagtttacaattcttctttttctttcactagttatttgattgtatatttgcatctacgtgatgttatgatttgatatacacgaacttaggctaactaatttgtatgatatataatgatacttattgatcactggtctctcgtttaaaagggaatgagctcaaaaagaatacgtaagtgtctaattatctaaatgtgtcgaaagtggataacttgaactcacaagaagtgacttcttagttatattgactcattgtttttaactttttttttctcaaggaattaaaatcataggctattacaatgtaaaggcagactttttcagtttataatgatattaacattcataactagaaaaaaaaatgatttacattggaaaacggagaccatctacatttataataatatcattatttcttttccaaatgtaattccattttaactaatcttaaataaaaattaaacaataaatttcggtcgccgacgtttcagttttctaggctcgattttttctgaacattgacgcatggggaaatattccccattatcaattttggacacgtttccaccatgctgtggccattcctttcttatatattgtagattcttctaagtctttgcacccaaaacgtgtcataattcataactacagatgacagaaaaatccattgaagaggctaggttggcttgtattcgatctacagtattgttgcaagattggataacattcaaagcattggctttggaaggaataagctggtaatttaattcctctatccgctattttgtacagaatatatatagatatatacacttctgatctctcatattggcatcattatgttatttaacttccaaacatcaaatctttagatttatctttgtgttttatacttttcttgggcagtataacgaaccagatagccgaagagaaatatggtcgtctcatgacccaacttatcagctcttgcaatacatctgatatcttaaaaggtgcatgctcttaccatatagtaatatatatagattaacttttatataattatctgccagaattagttctatatatcatatttgttaaaattacattcgtttatactacatatattaaagctctacgtaaattattttctgtcggggttttagctatggggaaaaaagtctgagctaattaaccatgtattaagtttttttttcttggtttttagttattttttttatatgaataacactctgatttgaactgaaaaaaacccaacgaacttaagaaggtttggttatggcttatgggttgcatcttctctttgcgtaatgagttatctatcttcagtttcgtgaatatggctaatttgtgcccttttctttcactacagcgtttgacaacccttattttcgacaaagcagtccttgagccgaccttttgccctatgtacgctcaattgtgctttgatatccgccacaaaatgcctaggtttccaccttcagcgcctaagactgatgagatctcattcaagagggttttgctgaacacatgtcaaaaggtgtttgagagaactgacgacttaagtgaggagattagaaagatgaacgcgccagatcaggaggccgaacgggaagacgaagtaagactgttgaacctccggactctaggaaatcttcgtttttgtggtgagctttttttgaagcggatgttgacagaaaaggttgttttagccattggtcaggttaggaagatgactgtttaactttctctagttccggtctgatgggactacatgcctaacacttgtgttagtgtgttataatttaaatttacttttaccatacagaagcttttggaggatgctgagcaaatgtgtccatcagaggaaaaaattatagctatttgtctctttctcaacactgttggcaaaaagcttgattcattgaactcaaaactgatgaacgagattttaagacgtttaaagaatctgtcaaatcatcctcaattggttatgagcttaagattaatggttgggaagatcatccatttgcactccattggggtcccagcgcgaaagagttgttctaatacccttgaaaacatcataagctttctgagttacgagattaagactttgttttgttgctacttacaatttttttttttaattcaatgttaaattatattcaaaaaaaaataaacgtttatatatgtgaatgcaaagttttcttagcatacagataaagtccgatcctataaacatgtgggaggactccaagtgtggttatatcctcggtattatctcgatgtgaaccacacttggagtcctcccacatgtttttctaccttccctttccttagagtactcaatcggtttctcacatttttatcaatcaacttgacaatttttccgttgttgagggtcgctctccgtgtctttatcatttctctccctccatatagaatgtatcgcattctaaaacacaaacataaggatgaatctcttagtgtttcatgatctttgctttttagttccttcatcacttctagccttaatgatagccttaaaggcaaaaattttgtttgaatccatggatgtcatcatatgagaatgatagaattaataagatttctggaagattcaatgctaagttaaaaaacgaaaaccaagcatcactcaccagtcacgaagatgatgattcgagcacataaatctcgttttttctcgacaactatgtttactctcttctaagctcgttgaaacaaaactagatgctcgtcaaccgatgtcagtgggccttaaagaactagacccaaattaagaattgaaccagaacttaacatgaggtaacatgaaacaaagactaaaccgagaaccaatacactttggtttcggctttcaattgcatactctatattcttatttccttcatagtgatctttccacaataaagattctctatttcctcattgttcatttgttcttatacgttttatagaattttttaccgtgttcgaatttaccgataacacttgtttttatcaaacttccatagaagtgtgaattgtaaaaaaaaaaaacattgtgctacgaagtctctgattaaatgaacattcatgtgcttggttattttgaacattatttttgctaaacatagtgtacttaatatcataataaagatccgcaatttcatactgaatatctttttcacatctctttaaattttacgttatgagttatttaagcctacttgtatcgatatttaaattggtaaaagaataaagttaaaaaagaataaaattggtaaaaattaatagtactctatatatgttatgtttttctatttagtatgaaatattttctttttaaaatagattacggatattaataatatctattgacaaaaaaaaacagattaacgatatataatttaaaatatttatagcaaagttcacatttattttatttgtttggtatctctatagacttaagtaaagcacgtgagatcattaaccatcgaacttatttttttttcaaacatagacgctaaaaagcaaagttctcaacgatatgaacaagagctcactacgtaagcacgacctatatatatcacctcaaatccttttattattgagttagcgttgatcaaagaatatgaaactcgactgactgtgaagtgatgatgataacaatagatacctaccaaagaaagttttcttaactaagggagaagatagtctaaagattcttagtaacaagcatataagttctaactaatctacctaatcctatattttatttatttatttattaggtttgatgttaatttatttcattatttattgcctttgtagtgaaaatttaaggaatcatggtttaatcccttttgtcaacactcttagctaggcttatgataattaaatattcatctctattcactagtgatggtagctcgtatgatgatttaacttttcattaacgccaaaatttttagcatttcttaatggttcgttggtgagaaaaaaaaaaagtcagaagagaaacattgagcgataaactcttgacagtaatttagtatataggggtcagtgttttccactattttgtttttattcttctagcatatataagagtttctaagtcaatattatcacatttggccctttttatggtccgaaaaaatctcacaaattgaaatgtatatgtaagttacaacttacaacgtagtagctagtttttcaaggttgacttttttatatatatagtattacaaaagtttatagtagcgatttctatttggcgaaaataagatcaattccaaactaagacatgacgtcgttaacaatattcacccaaatatataaatcttttgtagtgaagaaaacaaatccaaatttggtctttgccaaatttattccagattcagatatttcctggtatagttcacaataactgaaagtctgaaacaaacgaaccaaaattgatgtgttccacgactcataagaaaaaaaaaaaaaatcttaaatacaatatttcaggtgataaatgtatatagtcactacaaaaaagggatcattttaaagcacttattttaaatatttgtattacttataattgataaaaatatatcacttaaataaatgattcgtatcttgttgatgcaaataatttacatcgatttattaacaactgatgcaactttacataatatttgcatcgcttgttataactgatgtttattttgagtcggttataaaaactgatgtgatatttacatcattttctataagtgatgtaaataattacatcattttgcctaaacgatattagtatttgcaacggttataaaaactgatgtgatatttacatcaattgctaaaagatgatgttaacatttactttaatttatttaagtgatgttaatatttgttttggttaaaataagtgattttaaaaatagtaatatatttacagaataataatatttagaataataaaaaattatttaaaaaatatatttcctaattatcctttaatttggttccatttttaatatatataataaatcatggtggatattttctcccaaaatcactagttgcaatatctactaaaatcttttcaagattttataaattacattttttaagaataataaatttttataacaaaaataataataattggatgttcttcatgtttaaacacattccttcagtttcatacttcttccttcgagtaattgtttgctcttcttggaacttctatttcttctttttttatatcatctctcttccatttatggaatcaaaatcatgctgacttgagatcccttgaatcattatcccacttaagtattttctctacaaaatgaaaaagatattaattgtttggagatttttagaatttttaggtcggaattagaataagcaattgtaacagaacataaaataatggaatacctttactttatgcttctcccatctgtgtaggaaacacagtcctaatgattagcaatgcatatttgtattaattatgcagtgttcttccgtgttcatgacagatttataaaaatagaagaaaagaaaaaacctcagtgatggttaggacttaggagagaaaatagaacgatagagaattaaaaagtacagatgtgtgaaggtgaagaatggtatgagagttatgagatttccaaaaactgatttggagatatcataagaacgtcttttggagatgacatagcaaaaaagatcgtgaacgtaaaaataggatcgtgattaaggaaataaatttatttaatttcgctgattttgaggagaaaagaaaattaaaaataatgataaatctaataatattatttatctacggaaataacaattccgtgtcatttataacaataaattgtttaattcagttagtttttttttctaataataagtttttagcatcactttctattaatctatattttgtatcatttttaaaaataatgttaataaaagtaagggaatacatcggttatcttaattgatgtaaatacatatttttgtatccattttctgaagtgatgcaaactaatacaaatttatatcaatttgattaaactgacactaaacaaactaattaacaaatcacttattagaattgatgttgaattatttattttgtgtcatttgcttataagtaatttaaactataagtaatttaaactataagtaatttaaactagtatcatttatacttctgattctaattaattgctgtaatccaatcactttttttgtagtgagtactgtcaagatgctttatatttcaaagaaaaaaaaaaagcctcaagatgctcgtgatgaccaaaaacaagacgcagtcaaagacaacgtattgacttttgtagtatgaaataaaaacaaattagaaagcccttcaaagttcaaacacgtttcatgccgtgacaaacatctctcattataaggtttaacactacacttaacgttaatggtaaaagtttcaatagtaagtttactattaatatacaaaaaataaaaagcatagtgctaataaccacactaactaagtacaaaagatcattaacggaaaataccaaactgaaccttaattcgatttagtgtgtttaaaagtttagaaataacgtttttagtaacatttttatgattggtaattgctaagaccgtaaatctcattaccccattgatataaatttaaaaattaagattgttttaattatcataaaaaggttttaacagttttatatatagaactaaagttttgaccaaaaaccatttgtcattgaaaagtattatttcacatacagaactgttaaccatttttttatgccaaggaatgtgtctggagaggtaaagtagaacaccgagacaagagcccgtattgtctcttctttatgtattttattcgtgaagttcaatgttggaatatgctcatttctagaattaaagtaccaattcattgtatttgtatattggtaaagcattcgaccgaatctctatgcaatatctataattgtttttttttggttaaagctctatctataattgtatgataccatgtaacgaacaatcttgcactcgtccatcaaaacattcaaaatgcgatttaacaagggatgattgattagtaattgtaagcttaataacctagcatttatctgaatcgatccttgtccctgagattcccctgatctatcatgatatataattcataatctatttgccaatttggtcaaggtgttttcatatactttgaagtattaacctaaaataaaaataaaattatgcctttgtactttcgagcaaaagaaatttcaaatatatcttcattcaggaatttatatacatgagaatagggataaggatataaaattccaaacagtcaggtgatgtatttttttaacgtaagtgtaccaatcccatttatgttcatgggaagcataaaagtgcttgttggtggtggtggccggcacaccagatattgtggacatgctttaaactatttttgtatgtatctacgtgattatatgtatagccaaactcataattcatatggttttatattatatatatagcctaactcatactacttcatatagctttatattatttaatgtttttggttggtaaaatcagcaacaacgatgttttccaaatagcattcgacaacgaatcaactgtcaaatgaatatttgaaaatacgttctgacacatttaaaccatttaatcacaaaaattatactcgtaatgactttacttgtagtcatatgcaatttttatcgtatgtcctaaagtaaaaattatgctaactcgtgaagatggaacaataaaattaaactattcctcccaagttttggtcagcacttacttgtgacatcttaggcaacagtttcacggcaagatggggagtcacttcttcccttactctccgcctcagctactccaagtcttcacttgttcgtgttgcgatatgtgtttcagcttacaacctacagtaattggtgagagaggaatggacgaaggcacaaagatacttcaacaccagcctccaaactcacccgccactccgccagcctctaaactcacccgcttgattgacaaaagtgttagaaattggctgaatattttagctctgtcggatccatcagaatataaaagtggtttatacactacaggttccatacctatagacactaatctctttttcaaattttaatttttttttctaaaactttcgaactccttcgatattacgatgcattatttgtaaaatggtgtttttaggtgaatataatttaacatttattaaaaccaaaataatttaacatttatacaaaaaaaaactattccatgattttggaagttgctaatcggttttacaagtgtaaagaattcacttatttcgtctttacaaattataagttgtaagataaatgtatctttttcattaaattatcttttttattctttattttttcatgtttacgattccatgatatcatcgaccagagccaatcagaaagtataaagcagagactctttaaaaagtgtaggtatttgctatgatacacatatatttcattttagatgttataatacagtgacttaaacttgaaaaattacagggtgcgtagttaaacatctatattacatgaactaaaccctttaaaaggaaaaattaaaattaacggaaatgcaaaagaaaagaaaaaaaataaaaatctctggaaaaaagcttgagccagaaataaattttacaaaaataaactaaagtttatttatttgtctttttagtaaatttcatcattttttccaccaaaatgtttggaaatttccttatccccaaactcccaaaaatctctgaccaatgaaactcataacctttccaacggagcctttctccttctccgcctcttcaccgccgcaatttccatctttctccgagtcaccaccagcaaactcggctgaactcgaacccaattcactgagtcgactcgttcctatcgagttaactcgtccagaagcttttcccgatcgctttctccgatctttctttttcttcttcatctccaaactatcttcgtaagcatcgatgatctcgtgaatgagttggcgcctcggtgacgtgtcccatctgacccagtaactcgtgtaacaactaaaacaatcacaaagaaagagaggagagtgatgattatcttctttgtttttcttgagacgagagatacgatttgagtcgccggagtttgagatgaggtaagcaagaacttcacgatcctccaccgagagcgccgccacgagagagaggatagctacggggagaagagatagaaactgttcgtcggtctttatcgccggcggtggcgacggatgaacggttcctttccggcaaagctttttcatagagagagaaaagagagtgagtctttcttgaagaatgagtttgatgagactttgaattttgaaaggttttttgttctttattcgtgacgccgaatttcgaaaggtctaagaaaagtccaactatgttttctttttatttgttaattttctaagttgtattttattcgccattgaaggaaataaaaatgtatggataatggataggtttatattgaggaggtatctactgagccaaatcccacatgtaaatcataacatttgtttaattaccagaatatgatctgtcattgcagtcccgtaacacgtagttgttttccaattctcatcaatgttactagagctacacaataaatgtaccatgtagtatatatagaaaattaaaaatattactcgaagaaaaaaaaatggaaatggtaagttttttttttttttttttgtctaaatggtaagtttcttataaatgtttatcttatgttctttttgttgataagatctgattagtagtgttttcaaaatacttcatatgcaatactatttgatataatttttgcttttcacataattaaagtttcctttgtaatttgttttagagttctacgataatggctgggtttttttttccaggatttataatactagctaattatatttgaagacagttaaaatggtgtatggatgtttaaagagcctaggagcatgcctctacgtttggtaaacgaaacaaaagtactaaaaattataaatattttgctattattattattttcgtaaattgtaattttttttctacatgcgttatctgcatttttcggataatttttttttaattttcgttttgaggtttaattctattgcggaaaattcaaaatcttacagaggagaccggagaatttaacctaatggtttacaccaacatttttgtgagaacttgcagatgaataattgagtacataaacgataatttggacaaattttaggacctgtagttgttgtaaatgtgaaaagaggaaacatatgatatctcaaaaaaattattttatcaattacaagaaatccagtgttatccatttgtaaagtctatttccaatttttcctatttttcccattttacatattactaaaagattgttaatacaaatgaaacatttggtaaaatttttatttattatgctacctgttgcaacctcataactaaactaaacagatttgtaaaaaaagagtttgatccttgtctttacatgtgttaatgaagacaagccttccacatgaaaagccttccacatgttactggcccatgatcgggttatataatgggcctaaagagtcaagagtctattggtcatttcacatcgaaagcaaacattatgcttataaacttatgaaacctgaggagacagtaatggaaatctgtttgatataatcacaacactaagatgaagaactttttttagtgcactgtatcatcaacaatcacatagaacaaaaataattcatccgattttaacagtggcaactaattatggtagaaggataacaaaattagtaataaaccatttagcttataaatgaaaaataaatattttgtgagtttctttatacttttttgactagttagtacaattaatgaaacacacactttgccgtcaaaaacactcggacacaaatttctttttcggggaaggaataacgctaaaataccattcaatttatgacactcgtctttgactagatttgtgttgaaaaatgaaaataaaccaaaacaaatctgacttggtcagtagagttaaaaccgctccgaaatgcatgttatttaaaatacattttacgtattaatctgcgtaactaaatcaacaaaaatttcactattttagtatttacaaacaaaacccaagaattagcttacatattagctcaaactggaaaaggatccctcttttgttttctgattattattacacttcaaccgcactaatgttgaaagcaatcgaaagctgaccaaccataaccttaagacctttagcttcccaaaactcttccttgcaacccttaaacgcagtcgtatcataagtattaaccatttcgtagttattggtcgtcgaagttcgtttatagaaaccgaaccacttagcttgcatgtaaccgtttctcctccacggtggcacgtggatccctacgtgcttcatcgaccgtctcatctcatggcacatgattctcacgagcagtttcagttcctctgaagttcccacgaagacgcgtggcacttggcttagtattgagaggtaccttttcgttggtctagctatctcaaactctccggcaaggtttgtctcgacgaaataccgattattataatctccgccacaacgaacgtcgacgtactcgtattttccgccggtgtttttgccgaatctttcccaactcgacttgcaaagacctatacacatacatggcgatgattattgtcatttttcttacatatagtagaaacttattccaagtaccacgagtacatcataatactacagaaagtacaactttttttggctgcaatataaagtacatatttatataacttttagtacaacttaattatttctaagtactttatttaggtaacttctgtttaatatgattggtaagcaattgcacaaatcatagatatcagtaggaaaaacaaatttggctacttgcggtgaaaaggaggattttttttaatctacttagctattcgaccccccaagaaaaaaaatcttcgcagccatttcgtctgaatattttatggttctaaatttccaatatccaaaacactattttattaactcaaaaaactaattttttaagacactactgaatcataaaacgaatgaagaaaatactcaagttaaggaaccttacgtacgctctagatgataaaaataaattgtggaatcgtgatttaaattataaaatggtggaatggaactacagtatgatgaaaataaatcttctagttaacttttaaaagaaaaacacaaataaaatcaaaactttgattcattttagccactaattacacttgtaaaatcacgaaatagttaaacaaaattacaagtttacataagatacgaaaattattccgtaggttaaatataatcccatatattagtcacaaactagtaaaatcatctccgttaattcccatttcaatataaaaaatgtaaatttcagtatattatatagaaagagatgattatagactatatatatgtacctgcatcaaaacccttgttacgtagaaacgccattaagtgacgcttagaagaactaatatctccgacgaacgttccagcaacctccatcgtcgctgacagtattctcatccgctcttcgccacaggataaaccttctagaagcttccgtaacctctcattcacatcttccaaattgttatcgtcggaagaagtttcttcttcttcacgtaatactatttgtccctctttctctataaaagatgcgaccaaatcggaaagatccggcgaatgatcgcttccgctactgttatcacacggtggatgtacacgagccgcggctacgttgaaagccgactcaattcttttgaatcttccctgaatctcaaccatctctttcttttgtccttttgataaaatctttttgacgatacacaaatgattcgaagaatttataacgtatatttataatacctatacgatttaatagagagagactaaacggagtaaacgacaaaatgttaaaagatgacgacagagtggtgaaattatgtgacaataattaaaaagattgaacgtcgttgatgtaatgttttttataacttactgaatataattgtgaaatgttgatggttaaattctcagttttatcgcacatatagcgtctagattcactttgtatcaaaataaaatcttcaatggttatactctttattataatttcatgcttaaaaataattagtgctgaattaaattattcagatttatttctatgtattttatcacttaagagtttattgatatacgacaaaacatgtaaaaaaaaaattgaccaaagaaaaaaagaaacgacaaaaaaaagtttactttgatttgtgtgttgtgtttgttgttcttattttctttaaccaacgtccacgtcatagtaattatcggttatcagttgctgacgtgtactaaagaccttgcgtgtttagtctaatgtgccggcgcgtgagaacacgtgccagataacaagtgactcaaggttaacatgtgattgtcacgtgataatatgtggttatcttggttttttttccagatttttggtattatcttcagacgcggaaataagaagcaggcttataacctaagaacgtctagcttcaatgtatttaatgaatagcgttttcgtttgttcaatgcctctctatttatcactttgaagttgttgaaaaaattaatcgcatcacctttttggtacaaacgtgaaagacgtgataaaatcatctttttcatactagtatcgtagtatcaccttagtttagttatgttttggctaatcatttttgtcatagtttagttgatcattgtttcattttgaggtgtcaaaatttgggttttaagtccgtcagctagagataaactcgccggtcataagacatggtaggactaaacccgtgaatacaaggccgcagactggtctttggtgcgataattctgtaattctgtttcaatttctgtaattctgctgcgatatgaaatataatctatgattagttcatgcaaaacactgttagtaaaaaggccgaaggatgttcacaaacattggaaaactagatacgtattctcagcctatttccaacaaaacatgtgggcctatcttcaaagcccagaagagtcaaaaagaatatgggcctactatgtcatcgttatgcattcaatttctccagttaaaaaagaaaacatagaacaaatcgaatcatgagacaaacaaaccaaatgttgtttcattttaaccaatatacaaaatacagctaaaaaccaccaaagctactaaataagtagatagtagtagatacaacttccttcaaaccttttgtatccaatgagaagacttaaaaaaaaaaacttctatttttttcgacaaatttcgagaggatttacaatggcaggaaacaacaaatcttaatccaattttaaatttattgtctctagtaaggacaaagataaaaggatattccagaggaacctgttcttggagaatcagaatctgaataaaagaaacttttggcaatggagcctatgagagcttgtccttcagcatttgtcctaacttcacgaagagcgcttgttgttcctcaaaggtaaggttcgtcaatatctacaatgaaaccatcacatgtttgattcaatgattcagtgcaaaagtgaatatttttcagttttgatacaaagtcgagaagttcatttacctggtctaggattttgtcaaccgaaacgctttgggagacaataaatgattgaagatatatgtaggcaaatactgccataaccatctgtaacaatagataacattaggtctggtttatgtatatgcttaaagatgagagttagagaagaagaatatgcaatgcgaatcttgtgaatgaaaactctaaagacctaatcataatcttacgaagagatactagtttcattagagttacctggcagtccattctatctgtgattccaccatgtcctggaatactatcaccaaagtcctgcgattacggtttttgtcaagcaaggttttgttagaggttagatgcgtatggaaagtgaagcttggctcatatttggaggtattgattactgaccttaattttgaatgctcttttgaaaccgctagcgaaaaatcctccaaaaggtgctatgattgaagcgaacaaaccgaggcataaagcatgccactgaacagggaggatcgtcatttccttccaaggaaactgcacaaatgaactagaaagttgagaaacctcatgcaatattattcaaacagaaaggctaaccgcacagtctaacactactatctgttagctaacaagagctaactgagtaacctccataaaatggctagaatccaaacctatttcagaaactaataaaaaggccaggatctgaacctatctaagaatacactatgaaataagttatactctgagggagttcgcctacattcacttattcatgactagaaatataccaagtacaaacgccaaaatatacaacatagataattttcttctacacgatgcaacatgataccaaagcttacccattctggaatccatgcaggtaaagcaaaaggttcaggtttgaacaatggatcagcgtcacactgtagccagccagtggacaaatcctgcatcatgattcaaagatttactataaactccctaaaagatcgtctgcaagattagtgttattctttgtgctcaatgactaacctgtcgtgggcatgtcaaccaagggaaacgacccaaaatatttgccagctgaaacattacgcatacaaaacatttcagaagcatggtgaagaaaaagatgatgaaatgatgtaagcattttgatgtgccatgtggtggcaaaagtaacatatactcacaacaaatgcagagatgatagttgtcacagaggctccgatgaatccctcccatgttttctttggagacagctttattaaaggcgttcttccaaagaagaaaccgaaaatgtaggcgaagatgtcgttgattataattaaagatgctgggagaagaaacctgcattggaagccatcagaagtagacaatttacattacagcgaagaaaaaagtaaaatagatgcaagtgtaagaagctatgtttgttaagaacagtctgattcaatgtggtgacaaatagaaaaagatgattccttagcaaacttaatatacgaatagtcgaaaaagcataaacttcatatggtgacattattaaatgtgtaccagaagatcccttcaaatatgttggcaacagtgaacgacgattgagtaaacacgactatcaagatcatgtgggtccaagcatactggccaaactggtacttgtacatcttcttctttaatgtgagaatgaaccacatgaaacctgaaatttgttacatcgaggcatattccataagcattaaacgtaaggtgaatcaactaagccaagcgtcaagacctattttcaccgatgctagaaaatcaaattccacaaagaggacagaacggtgaagcaagactgacctataatatacaacaagtaacagattgccatatggtatttgattaagccgctgactagccgatagaagaactgatctgcagtcatggtattggctaaccgttgactaaggatccgtccataaacgaaaagcatggcagtgaaaaagaagtgcctgcagaggaaaccaaacaaacaagacgacttaacaacatcttacatcacctgagccaatagcctttttaaaactagaagataaaaagcttgtgactttaccaattgagctgtttaatataggggagacatttatcctcaggagctttcctcagcagattaaacaactctttagccataaatatttgaataacaacaaccatagctgtgatataaagatgacccatgtagacaaccaaaacaaaaccaccaatcatccataacgtagagtaggtccggaccatgaaagatttgtacttattccgatcattaaccaacaaaggacttgcattcactttatccccatccgtaacaacctaacacaaacaagcaacactaagtaaacctcacttcaaattttcttcaatgaagctacagaagataacgaaccaaacctcattagaacgtcttcgatgcctaagcctatgtaccggtgttgaaggtgaactagtaacattctcttcctccatagctcttaaaaatttgattttgcagaaaaatcaaaaattaagagacaaacatctgtacccaaaacaaacaacttaagattcttactataaagcttgaagaaattaggaattttgactaaaaccctatcagtgaacgtcaacatctgagattcctaatcacttagcaataacagattgaaaaagctgggatttttaatcgactattcattaacccaacagaaaagaaataagattcgtgacaaacttaacactgaaattaagaaattgattacttaaaagcatgaacaagtgacaaaatttgaggatttaagtaagaagaaaatgttggattttttttttcgcgtatacctattggggaagaaagattttgaatccagaactatagcaaagatcgggaagaaacagcgacgagaacgaggagaggttaacgaatattattattgtggagataaaaggcaaagcaaacccaaaggccaaagcaaagcgaagcgaagcagaaaatatcaggaatctgttttttttttttttcccctttctctggaagagagagcaagcacgaggattaaatagatattttaattatattgtttttggtgattttttttttttttggtcacacttttgatattctagttgctgttagtatatttggcttattcctataactaaaagaagaagatttcatatttcttcttttgacataggaagtaacatacctatgattaatgattttgggtctactacttcaaccatttgtttactctttaaaggttttaagcttttaaggttttctgttaggtgtgtatgattatattctatgttgtaataataaaacatataaagtgtataagattatgtatgaatttatctgatgggtttttggcctagtggtcaagagagtgactgcgtgtctgcgtgagtgctcaagaagtagatcactagctcaaccccacttggaagagatgattatacgccttagtattatcaacggaacaaatgtttggaattcctacggtttatcaaaaaaaaaaaaaagagattatgaatttgtgatgtatacatttaaaagttacaaaaaataacgttgacattatctttgatatctttaaaaagttgcaactcgttttatataattccatatcacaatttaggtttcagaagttactgaaaagaaaacatatatgttgaagaaaaatgtgtaatattcaacttcaaaactttgaattgtatatcatatccatcgcggaaaccaaatatttttttgtatagccatatccttcgttccaacaatgatgcacaaagttcatttacctatgttttcacgtagcgccacaaaaacatatctcatcgactgagtgatttcctttgaaaatgccatttatttgaggtatgtatacgttgaaaaaaaaaaaaaaaaggaggtatacatattcaatttcattgtaaagtcccttttaaatgatgaatgtgtcttcaaacatttaaggcagctacttggcggcttggctacaattagacattctcactttgttcgaaatagtacacagtacacacacttatagcatacaatcttcaccaagatttcgtagttttaaagagatctaccaatcgttaggctaaagcttaatcagagaccactctcccgccaacatgtaggatttgatttctaattaaataagttccattatcactttaccaatgtagattattttcaattgtcatttacctaataaactcctaaagatataggacatacacccataaaaaagttatatatattataaaattgaaatcgtgagaaataagagaacccaaaaacaactaaaccggtttctaagcaatttgcatagtttagaaaattggagaatgcatttttttttgttaaatgaaaattagagaatgcatgctaatcaataagaaagtacgtcattctttatcagttctatgccatttttctcaaaatcgaaacagtagtcttcgaaaaaacattattaacatgacccacaataaagattccagctcgaaatgaaagggaaacaaacatcttctctaacatttgttgagaaattcattcacttggcaatttgtacacatgtcaaatattaaatattatcttttagtttagtgatattctttgaaaaatgaaacgaatatcgaatattttgctcacatttttgtagctcttttagtttatagaaaaataaaaagagaaaggaaccaaatggtctcagggcacatgggccttacctgtctcggcctgtttaattcgataaattgtctcccaaatattataaaatctgttttagtaggaaatattttgattaaataatctggcttgagaaaagaaaaattaaataatctgactgagcattaatacataattctgttattagtgtttttctttaatataaaaaaataatcataaactaattcccaattcccttttaagattgtctctagtaaagataattctaaaatattataaagagtttatcaacgttagtcatttaattttggtagttggaggttaatttacgcattccaattttcaataagttggatttaaaaatacactttatgtctctgtctaagaaaaaaatacaccttatttctagtttctgtaaaaaaaaatcaattttcccacagttttacaaaactaaacttcattagtgtagcattcgagtcaaataaatttatatttttggttgacaaaaaaaaaaattaaaaaacaaaaaaagtgaatgaaacattgaaaactatgtttagtcgaatgaatcttacaccaaaaaaaataatgttcagtcgtatgaaacgacatcgtaaagctcctgcgacataactcgacgaaacttcccggcgtccgaatcagcgaattataagactgcaatgctgggatggagtcttccgacgattgcttcattcaggtccgttaattcggacgtgaaagtatcttcctatttattctattctttaacagatcttgattaaaatgaagaaagagttctgattaggataaaagaccaattttgattaccgaatcttttgtgtgtttggtatgattgtttgtgccttagtgtgttttaacatatataagtttggtttgagcttgaagttagtgtaaggctcggtgtgaacgatttgttatcctttgaaaattatagaacctccttcccctgggactcttattcaggccttgacggattttttcatcttggtgcagtggatgatgaaggtaacttgactgagataggccagttgatgaatctcgaggtctaaacctaactaatccatatatatatatatatatatatatgtagtctctttgaatttctttgcataaaatttcattagatagacactcaacttcattttgtacatgcttaacttcaagattccaacactaaatacaaaatcttacgggtccaaaactaccttgttggtacataatgtacaagacaaacttgttgtccgtggaaaaatgttgcatatataattacaacatcagcttgtacctataatgtttgtgagagacatgcatcaaagttataacatgcagatgtgcattcatgtctttttgagttatataaaaccatattatttgaattatcggttgacgcgttttataggtaagtgacggcttgagagaatctttagggacatgtatccaagtttatatatagagttaaagtcggtgacggtggctccaatctattgccgcgtaattaaaggtcagtctttttgtctcctccttcgacgtgcttatcaatatgtcatagtattaaacttattaacacaaaaattgattgattacttgtaattttataacaaaattagatacgacttctgagttttttttctgactgttatttttataaagaagcacatgggagttcttagatgtcacaattagtgaggtggggtctcttttcccatgtgctaaattatattttctcccaacaaaaacctctcaaaattttcaattttctcaaactcttgaaactaagaaaaaatgttgttgtttccttctacttctttacgtctcttcttctttctcttcctcttgttctcctcttgtttcttacagattagaggagatgatgatgatgatgatataagcgatgataatatcaaagtcgacccgagtctcaagttcgaaaacccaagtcttcgacaagcctacattgctcttcaatcatggaaacaagctattttctctgatccttttaacttcactgctaattggaatggctctgatgtttgttcctacaacggtatcttttgtgctccttctccttctagtccgaaaactcgagttgttgcgggtattgaccttaaccatgcggacatggctggttatttacctcgtgagcttggtcttctcactgatcttgctctctttcatctcaactcaaaccgcttttgtggagaagtacctctcacgtttaaacacatgaagcttctcttcgagcttgacttaagtaacaaccgttttgttgggaagttccctaatgttgtcttgtctttaccttccctcaagttcttggatcttcggtacaacgagtttgaaggtagtatcccttcgaagctattcgataaagagctcgacgcgatattcttaaaccataaccggtttatgtttgggatacccgaaaacatgggaaactctccggtgtctgctctagttcttgcggataatgatcttggaggttgcataccgggaagtatcggtttaatgggaaagactctcaacgagatcatcctctctaacgataacttaaccggttgcttaccaccacagattgggaatctcaagaatgtgacggttttcgatatcagtttcaaccgtttaagcggtccattgccatcaagcattggaaacatgaagagtttggaacagctcaatgttgctaacaatagattcacaggagttataccaagcagcatttgtcagctctctaaccttgagaacttcacttattcttccaacttcttcaccggtgatgccccgagatgtgtggctcttttgggagacaatgtggtggttaatggctcgatgaattgtattgatggtaaagaagatcaaagatcgtctaaagagtgttcttctccagcctcacgctctgttgattgtagtaagtttgggtgtaacaactttttctctcctccaccaccgtcttttaagatgtcacccaccgttcgagtacttcctccaccgcctccgtcttccaagatgtcgcctacatttagagcaactccgccaccgccgtcttctaagatgtcaccatcttttagagcaactccgccaccgccttcttctaaaatgtcgccttcttttagagcaactccgccaccaccttcttctaagatgtcgccttccgtcaaggcgtatcctcctcctccaccaccgccagagtatgagccatctccgcctcctccttcttccgaaatgtcaccttccgttagggcataccctccaccaccaccactatcaccaccaccaccatctcctcctccaccatacatctactcatctcctccaccaccgtcaccatctcctcctccgccatacatttactcatctcctccgcccgtagttaactgtccacccacaacacaaagtcccccacctccgaaatatgagcaaactccttcaccaagggaatactatccatcaccttcaccaccttactaccaatacacgtcttctccgccaccgcctacttactacgccactcaatctccaccgccaccaccaccgcctacttactacgctgttcaatctcccccgccaccaccaccggtatactacccacctgtaacagcaagtcctcctccaccaccggtctactatacaccggttatacaatctcctcctcctccaccggtttactattcacctgttacccaaagtcctccaccaccaccaccggtttactatcccccggtaacacaaagtccaccaccatcaccggtctactatccgccagttacccaaagtccacctcccccaccagtttattatcttccagtaactcaaagccctccaccgccatcaccagtctactatccaccggtagcaaaaagccctccaccaccatcaccagtctactatccaccggtaacacaaagcccacctccaccgtcaacaccagttgagtaccatccaccggcaagcccaaaccagtctccaccaccggagtatcaatcaccaccaccaaagggatgcaacgacagtccaagtaacgaccatcactaccaaacaccaacaccaccttctctgccgcctccatattacgaagacacacctcttccgcctatccgcggtgtctcttatgcgtctcctcctccaccatcaatcccatactactaagtttaaaccatgcatgatcaaaattcttttggcatcaacctatttgtgtcttatggttgatacgagacattcgacttattttttttccgagtaatattttgttcttttatttcttgattaaacagagaatatggagtatatagtttcacttattttattattggttacccatctcttatatgtattttcctttcttctataatgttcagtataattatacattcccttcacaaaagcctcttctcactgtagaactcacattgtctttttaatttctttcatgtaatttgggaccatccttaaaaggtgttgttgtttattgttgttatcctcttttctgttttctccttttcttcggcaaggcaaaagaattgtaggctgaattcttctaagagtttgtattcattttgacagaattgtttatgtttatgaccgttattctacctacattcaaattaatagtgcccaaaaaacggtctacttacaagaaaagtgaagagtaaattccataaatacacaaacggtctcttatttctgctcatttaatcaaaagctaaatcatttttctagtcttgaaaatcgaatgtaagattaaatagatattgatgatcaaatattcaaacgagcattgatttagactttgggagaatgtatatacggtggatcattgccaactcttgcggatgtcgaaggtgtagttgatctccaagtagcatttgttatcgtcatcgatgaactgaaatatgtacaataagatgacatcaaactcaccaagttcagtgaaaataactgtattatttaataacaatctgatcagtttctgcaaaacctttcatcatgtatactaaatgatataccttagttcttgcggaataggatcctctagcaaacataccagacggtgtcatttcttcaggcattacatgttggtaagactcagcttgaggactaaacgtcccaagcattgcttttgtactatccactgctcagtagggaaaaaaaaaaactgaacatcaaaagagaacattcgacaatatttttaaaatgaaggagaaacacacgaaaatacaaagtaacctttaacaccggttttccacacggtattgttatagcgaaggcccgaaacgatattgtttgtgacacggaagttgaagacaagtgtgtatttagaaccttcctttatcgtaaaccaagggcctttcgggtttggcaacccatcttcgggtattgtcaataccatttcctctctgtctggtgatctaattgtgagatctagtatctttactactggatccggtgtttctgcatttcagtttaattaattttatgttagataacatgattcaatagttttgaattttgtatccgttttttttttccttttaaccgagcctaaggcaagccaaaatgtcatttaactaacatgcatatgattcgttcctttcgtacgtaatacttcatttgaatcagaactagtgagaccggtataatcttttcaccattagagctaaatacatttgattcttaatcaatattctaaaccatacttacgaaccatggaatctaaatcaagtaatgaatttggtttacctccgacatcctccaaatccacgacgccaagaagctgttccttccatctcctcaggctttcatcatcctatcaaattttcgtcgaaaataagaaatatcgaagaaaaaaatttaaattatataaagccatttttaaacaagaaaaaccagatagttattcttgacgttatcatctattattaattttaatttcaccaagttcatactttaatatgccaagaatatagtaaactactaacattttttccccattcataatatggtatagtttacatatttcgtataaataaacaaagtaaaagaccttgtctctctcgagttgttctttgagagcgatcatgggaccgagttcgagcttcttgtcttcatcttcttcatcatcctctgtcggagacaaagagctcccactgttctttctgcttaaccccattttctctgatgtctctcctgacgcttcacctttcttcatctcatcttccaaaaccatcttaattttgtttcctcttaccaaaaaaataagttcttgttgatctaataagaacttacacaatttcaaccgttggcttggagtagaatgcaacgatggctatagagaagacagagagagaaagagttttttggtgtatttttgttgagcaatgtttatatttggagcatgaagaaatggtcatgtggtgatcctacaatcttgtaagtctcactttcaaatcaaaattgtctaaatatatacgtattctacaatgcacatacatttgtaggctcaacacctaaatacatggcaactaatttgacttataggagactaaaaagaggattttaacaaaaactataaaaggagatatacctagtactcggaggaatcaactcgtgtagttgggctattattatcagtttccttagcccaatgtggcctcgtgaggtttgcagtttcccaatagtgtgattgaaaatattcatttctagagatgaccttaaatatctcttggtttactctaattacgttagaaggtttactttttgtttgatggtcggttggttatttttgaaggcttagaaaatttcttgagtgctcatatcaaacacgctggacactaaagctttttaagaaagatctacaaaaatcaaatttcaaagtaatttattttgagaatcaaccatcaacaacaacctcacgagtcacgagctaataagttgatgattgacggctcaaaatctagtggatttgagagaaaacagtaagtactgtaacgggacaatgtgaggtggtaaccttatttcttgaccagggggagagaatatatccaacaattaactaagcgttattcatataagaggataaattgagcttgcgaaaatggtgtagaagacaacctaataaatagaacgggctttgacaaaaacaaagatatggtagcccaaactcaacaaagcccactacagaagcccagtcaacatatgcaaaagaagataaagaccaaaagctctttacctgcaaaacagaagactgtcactaatacggagaagaagacaataacacttgaaaacaaattcaagccgttgcagtcgctgccgttgcagtaattcacaataaatagctattgattaaagataacattgtcaaggattctagattgttctaaagaagtctataaaagaaagatgtaaaactccattgaaagataagcaaaataaaaacatttttgtcaagaaataatcacagttttctttttctcttcatggtatcagagctattataccttaacaggtgattcaatggcccctgcttacccttttccagacaatgtccatgtctctagttccgttaccttaaagctcaacgatagtaactacttgttgtggaagacacagtttgagtcccttctatcgagccaaaagctcataggttttgtcaatggagtcgtcactcctccagctcagactcgtcttgttgttaatgatgatgtcaccagcgaagttccgaatcctcaatatgaagactggttttgcacagaccagctcgtccggtcgtggttgtttggtacgctttcagaggaagtgcttggtcatgtccacaacctcactacatctcgtcagatctggatctctctagctgaaaatttcaacaaaagtagcatcgccagagagttttctcttcgtcgtaatcttcaacttctgacaaaaaaagataagtctctatctctttactgtcgtgattttaaaataatatgcgactctctaagctccattggcaaaccagtagaggaatccatgaaaatctttggctttctcaatggactcggcagagagtacgatcctatcaccacagttatccaaagctccctaagcaagctccctgctccgacgtataacgacgtcatctccgaagttcaagggtttgacagtaagctgcaatcttatgacgacactgtctctgttaatcctcatcttgcgttcaatactgaaaggtctaactctggcgctcctcaatacaattccaattcccgtggtcgtggtcgttctgggcaaaacagaggacgcggtggctactctacacgcggcagaggattttctcaacatcaatccgcttcaccatcatcaggacaaagaccagtttgtcaaatttgtggtcgcataggacacactgctatcaaatgctacaactgatttgacatcaactaccaaagtgaagtccctactcaagcattttctgctctccgtgtctctaatgaaaccggcaaggaatggtaccccgattctgcagccacagcccacataacagcctcaacatctggtctgcaaaacgcaacaacatatgagggaaacgatgcagtcttggttggagatggaacatacctccctattacacatgttggatccaccacaatttcctcatccaaaggtactattccgttgaatgaagtcttagtgtgccctgctatacaaaaatctcttctatctgtgtccaaactttgcgatgattatccatgcggtgtttattttgatgctaataaggtttgcataattgatttaaccactcagaaagtggtgtccaagggtccacgaaataatgggctctacatgctggagaattc

SEQ ID NO: 109 - DNA, 97054 bp, Arabidopsis thaliana
aagcttgaagaaattaggaattttgactaaaaccctatcagtgaacgtcaacatctgagattcctaatcacttagcaataacagattgaaaaagctgggatttttaatcgactattcattaacccaacagaaaagaaataagattcgtgacaaacttaacactgaaattaagaaattgattacttaaaagcatgaacaagtgacaaaatttgaggatttaagtaagaagaaaatgttggattttttttttcgcgtatacctattggggaagaaagattttgaatccagaactatagcaaagatcgggaagaaacagcgacgagaacgaggagaggttaacgaatattattattgtggagataaaaggcaaagcaaacccaaaggccaaagcaaagcgaagcgaagcagaaaatatcaggaatctgttttttttttttttcccctttctctggaagagagagcaagcacgaggattaaatagatattttaattatattgtttttggtgattttttttttttttggtcacacttttgatattctagttgctgttagtatatttggcttattcctataactaaaagaagaagatttcatatttcttcttttgacataggaagtaacatacctatgattaatgattttgggtctactacttcaaccatttgtttactctttaaaggttttaagcttttaaggttttctgttaggtgtgtatgattatattctatgttgtaataataaaacatataaagtgtataagattatgtatgaatttatctgatgggtttttggcctagtggtcaagagagtgactgcgtgtctgcgtgagtgctcaagaagtagatcactagctcaaccccacttggaagagatgattatacgccttagtattatcaacggaacaaatgtttggaattcctacggtttatcaaaaaaaaaaaaaagagattatgaatttgtgatgtatacatttaaaagttacaaaaaataacgttgacattatctttgatatctttaaaaagttgcaactcgttttatataattccatatcacaatttaggtttcagaagttactgaaaagaaaacatatatgttgaagaaaaatgtgtaatattcaacttcaaaactttgaattgtatatcatatccatcgcggaaaccaaatatttttttgtatagccatatccttcgttccaacaatgatgcacaaagttcatttacctatgttttcacgtagcgccacaaaaacatatctcatcgactgagtgatttcctttgaaaatgccatttatttgaggtatgtatacgttgaaaaaaaaaaaaaaaaggaggtatacatattcaatttcattgtaaagtcccttttaaatgatgaatgtgtcttcaaacatttaaggcagctacttggcggcttggctacaattagacattctcactttgttcgaaatagtacacagtacacacacttatagcatacaatcttcaccaagatttcgtagttttaaagagatctaccaatcgttaggctaaagcttaatcagagaccactctcccgccaacatgtaggatttgatttctaattaaataagttccattatcactttaccaatgtagattattttcaattgtcatttacctaataaactcctaaagatataggacatacacccataaaaaagttatatatattataaaattgaaatcgtgagaaataagagaacccaaaaacaactaaaccggtttctaagcaatttgcatagtttagaaaattggagaatgcatttttttttgttaaatgaaaattagagaatgcatgctaatcaataagaaagtacgtcattctttatcagttctatgccatttttctcaaaatcgaaacagtagtcttcgaaaaaacattattaacatgacccacaataaagattccagctcgaaatgaaagggaaacaaacatcttctctaacatttgttgagaaattcattcacttggcaatttgtacacatgtcaaatattaaatattatcttttagtttagtgatattctttgaaaaatgaaacgaatatcgaatattttgctcacatttttgtagctcttttagtttatagaaaaataaaaagagaaaggaaccaaatggtctcagggcacatgggccttacctgtctcggcctgtttaattcgataaattgtctcccaaatattataaaatctgttttagtaggaaatattttgattaaataatctggcttgagaaaagaaaaattaaataatctgactgagcattaatacataattctgttattagtgtttttctttaatataaaaaaataatcataaactaattcccaattcccttttaagattgtctctagtaaagataattctaaaatattataaagagtttatcaacgttagtcatttaattttggtagttggaggttaatttacgcattccaattttcaataagttggatttaaaaatacactttatgtctctgtctaagaaaaaaatacaccttatttctagtttctgtaaaaaaaaatcaattttcccacagttttacaaaactaaacttcattagtgtagcattcgagtcaaataaatttatatttttggttgacaaaaaaaaaaattaaaaaacaaaaaaagtgaatgaaacattgaaaactatgtttagtcgaatgaatcttacaccaaaaaaaataatgttcagtcgtatgaaacgacatcgtaaagctcctgcgacataactcgacgaaacttcccggcgtccgaatcagcgaattataagactgcaatgctgggatggagtcttccgacgattgcttcattcaggtccgttaattcggacgtgaaagtatcttcctatttattctattctttaacagatcttgattaaaatgaagaaagagttctgattaggataaaagaccaattttgattaccgaatcttttgtgtgtttggtatgattgtttgtgccttagtgtgttttaacatatataagtttggtttgagcttgaagttagtgtaaggctcggtgtgaacgatttgttatcctttgaaaattatagaacctccttcccctgggactcttattcaggccttgacggattttttcatcttggtgcagtggatgatgaaggtaacttgactgagataggccagttgatgaatctcgaggtctaaacctaactaatccatatatatatatatatatatatatgtagtctctttgaatttctttgcataaaatttcattagatagacactcaacttcattttgtacatgcttaacttcaagattccaacactaaatacaaaatcttacgggtccaaaactaccttgttggtacataatgtacaagacaaacttgttgtccgtggaaaaatgttgcatatataattacaacatcagcttgtacctataatgtttgtgagagacatgcatcaaagttataacatgcagatgtgcattcatgtctttttgagttatataaaaccatattatttgaattatcggttgacgcgttttataggtaagtgacggcttgagagaatctttagggacatgtatccaagtttatatatagagttaaagtcggtgacggtggctccaatctattgccgcgtaattaaaggtcagtctttttgtctcctccttcgacgtgcttatcaatatgtcatagtattaaacttattaacacaaaaattgattgattacttgtaattttataacaaaattagatacgacttctgagttttttttctgactgttatttttataaagaagcacatgggagttcttagatgtcacaattagtgaggtggggtctcttttcccatgtgctaaattatattttctcccaacaaaaacctctcaaaattttcaattttctcaaactcttgaaactaagaaaaaatgttgttgtttccttctacttctttacgtctcttcttctttctcttcctcttgttctcctcttgtttcttacagattagaggagatgatgatgatgatgatataagcgatgataatatcaaagtcgacccgagtctcaagttcgaaaacccaagtcttcgacaagcctacattgctcttcaatcatggaaacaagctattttctctgatccttttaacttcactgctaattggaatggctctgatgtttgttcctacaacggtatcttttgtgctccttctccttctagtccgaaaactcgagttgttgcgggtattgaccttaaccatgcggacatggctggttatttacctcgtgagcttggtcttctcactgatcttgctctctttcatctcaactcaaaccgcttttgtggagaagtacctctcacgtttaaacacatgaagcttctcttcgagcttgacttaagtaacaaccgttttgttgggaagttccctaatgttgtcttgtctttaccttccctcaagttcttggatcttcggtacaacgagtttgaaggtagtatcccttcgaagctattcgataaagagctcgacgcgatattcttaaaccataaccggtttatgtttgggatacccgaaaacatgggaaactctccggtgtctgctctagttcttgcggataatgatcttggaggttgcataccgggaagtatcggtttaatgggaaagactctcaacgagatcatcctctctaacgataacttaaccggttgcttaccaccacagattgggaatctcaagaatgtgacggttttcgatatcagtttcaaccgtttaagcggtccattgccatcaagcattggaaacatgaagagtttggaacagctcaatgttgctaacaatagattcacaggagttataccaagcagcatttgtcagctctctaaccttgagaacttcacttattcttccaacttcttcaccggtgatgccccgagatgtgtggctcttttgggagacaatgtggtggttaatggctcgatgaattgtattgatggtaaagaagatcaaagatcgtctaaagagtgttcttctccagcctcacgctctgttgattgtagtaagtttgggtgtaacaactttttctctcctccaccaccgtcttttaagatgtcacccaccgttcgagtacttcctccaccgcctccgtcttccaagatgtcgcctacatttagagcaactccgccaccgccgtcttctaagatgtcaccatcttttagagcaactccgccaccgccttcttctaaaatgtcgccttcttttagagcaactccgccaccaccttcttctaagatgtcgccttccgtcaaggcgtatcctcctcctccaccaccgccagagtatgagccatctccgcctcctccttcttccgaaatgtcaccttccgttagggcataccctccaccaccaccactatcaccaccaccaccatctcctcctccaccatacatctactcatctcctccaccaccgtcaccatctcctcctccgccatacatttactcatctcctccgcccgtagttaactgtccacccacaacacaaagtcccccacctccgaaatatgagcaaactccttcaccaagggaatactatccatcaccttcaccaccttactaccaatacacgtcttctccgccaccgcctacttactacgccactcaatctccaccgccaccaccaccgcctacttactacgctgttcaatctcccccgccaccaccaccggtatactacccacctgtaacagcaagtcctcctccaccaccggtctactatacaccggttatacaatctcctcctcctccaccggtttactattcacctgttacccaaagtcctccaccaccaccaccggtttactatcccccggtaacacaaagtccaccaccatcaccggtctactatccgccagttacccaaagtccacctcccccaccagtttattatcttccagtaactcaaagccctccaccgccatcaccagtctactatccaccggtagcaaaaagccctccaccaccatcaccagtctactatccaccggtaacacaaagcccacctccaccgtcaacaccagttgagtaccatccaccggcaagcccaaaccagtctccaccaccggagtatcaatcaccaccaccaaagggatgcaacgacagtccaagtaacgaccatcactaccaaacaccaacaccaccttctctgccgcctccatattacgaagacacacctcttccgcctatccgcggtgtctcttatgcgtctcctcctccaccatcaatcccatactactaagtttaaaccatgcatgatcaaaattcttttggcatcaacctatttgtgtcttatggttgatacgagacattcgacttattttttttccgagtaatattttgttcttttatttcttgattaaacagagaatatggagtatatagtttcacttattttattattggttacccatctcttatatgtattttcctttcttctataatgttcagtataattatacattcccttcacaaaagcctcttctcactgtagaactcacattgtctttttaatttctttcatgtaatttgggaccatccttaaaaggtgttgttgtttattgttgttatcctcttttctgttttctccttttcttcggcaaggcaaaagaattgtaggctgaattcttctaagagtttgtattcattttgacagaattgtttatgtttatgaccgttattctacctacattcaaattaatagtgcccaaaaaacggtctacttacaagaaaagtgaagagtaaattccataaatacacaaacggtctcttatttctgctcatttaatcaaaagctaaatcatttttctagtcttgaaaatcgaatgtaagattaaatagatattgatgatcaaatattcaaacgagcattgatttagactttgggagaatgtatatacggtggatcattgccaactcttgcggatgtcgaaggtgtagttgatctccaagtagcatttgttatcgtcatcgatgaactgaaatatgtacaataagatgacatcaaactcaccaagttcagtgaaaataactgtattatttaataacaatctgatcagtttctgcaaaacctttcatcatgtatactaaatgatataccttagttcttgcggaataggatcctctagcaaacataccagacggtgtcatttcttcaggcattacatgttggtaagactcagcttgaggactaaacgtcccaagcattgcttttgtactatccactgctcagtagggaaaaaaaaaaactgaacatcaaaagagaacattcgacaatatttttaaaatgaaggagaaacacacgaaaatacaaagtaacctttaacaccggttttccacacggtattgttatagcgaaggcccgaaacgatattgtttgtgacacggaagttgaagacaagtgtgtatttagaaccttcctttatcgtaaaccaagggcctttcgggtttggcaacccatcttcgggtattgtcaataccatttcctctctgtctggtgatctaattgtgagatctagtatctttactactggatccggtgtttctgcatttcagtttaattaattttatgttagataacatgattcaatagttttgaattttgtatccgttttttttttccttttaaccgagcctaaggcaagccaaaatgtcatttaactaacatgcatatgattcgttcctttcgtacgtaatacttcatttgaatcagaactagtgagaccggtataatcttttcaccattagagctaaatacatttgattcttaatcaatattctaaaccatacttacgaaccatggaatctaaatcaagtaatgaatttggtttacctccgacatcctccaaatccacgacgccaagaagctgttccttccatctcctcaggctttcatcatcctatcaaattttcgtcgaaaataagaaatatcgaagaaaaaaatttaaattatataaagccatttttaaacaagaaaaaccagatagttattcttgacgttatcatctattattaattttaatttcaccaagttcatactttaatatgccaagaatatagtaaactactaacattttttccccattcataatatggtatagtttacatatttcgtataaataaacaaagtaaaagaccttgtctctctcgagttgttctttgagagcgatcatgggaccgagttcgagcttcttgtcttcatcttcttcatcatcctctgtcggagacaaagagctcccactgttctttctgcttaaccccattttctctgatgtctctcctgacgcttcacctttcttcatctcatcttccaaaaccatcttaattttgtttcctcttaccaaaaaaataagttcttgttgatctaataagaacttacacaatttcaaccgttggcttggagtagaatgcaacgatggctatagagaagacagagagagaaagagttttttggtgtatttttgttgagcaatgtttatatttggagcatgaagaaatggtcatgtggtgatcctacaatcttgtaagtctcactttcaaatcaaaattgtctaaatatatacgtattctacaatgcacatacatttgtaggctcaacacctaaatacatggcaactaatttgacttataggagactaaaaagaggattttaacaaaaactataaaaggagatatacctagtactcggaggaatcaactcgtgtagttgggctattattatcagtttccttagcccaatgtggcctcgtgaggtttgcagtttcccaatagtgtgattgaaaatattcatttctagagatgaccttaaatatctcttggtttactctaattacgttagaaggtttactttttgtttgatggtcggttggttatttttgaaggcttagaaaatttcttgagtgctcatatcaaacacgctggacactaaagctttttaagaaagatctacaaaaatcaaatttcaaagtaatttattttgagaatcaaccatcaacaacaacctcacgagtcacgagctaataagttgatgattgacggctcaaaatctagtggatttgagagaaaacagtaagtactgtaacgggacaatgtgaggtggtaaccttatttcttgaccagggggagagaatatatccaacaattaactaagcgttattcatataagaggataaattgagcttgcgaaaatggtgtagaagacaacctaataaatagaacgggctttgacaaaaacaaagatatggtagcccaaactcaacaaagcccactacagaagcccagtcaacatatgcaaaagaagataaagaccaaaagctctttacctgcaaaacagaagactgtcactaatacggagaagaagacaataacacttgaaaacaaattcaagccgttgcagtcgctgccgttgcagtaattcacaataaatagctattgattaaagataacattgtcaaggattctagattgttctaaagaagtctataaaagaaagatgtaaaactccattgaaagataagcaaaataaaaacatttttgtcaagaaataatcacagttttctttttctcttcatggtatcagagctattataccttaacaggtgattcaatggcccctgcttacccttttccagacaatgtccatgtctctagttccgttaccttaaagctcaacgatagtaactacttgttgtggaagacacagtttgagtcccttctatcgagccaaaagctcataggttttgtcaatggagtcgtcactcctccagctcagactcgtcttgttgttaatgatgatgtcaccagcgaagttccgaatcctcaatatgaagactggttttgcacagaccagctcgtccggtcgtggttgtttggtacgctttcagaggaagtgcttggtcatgtccacaacctcactacatctcgtcagatctggatctctctagctgaaaatttcaacaaaagtagcatcgccagagagttttctcttcgtcgtaatcttcaacttctgacaaaaaaagataagtctctatctctttactgtcgtgattttaaaataatatgcgactctctaagctccattggcaaaccagtagaggaatccatgaaaatctttggctttctcaatggactcggcagagagtacgatcctatcaccacagttatccaaagctccctaagcaagctccctgctccgacgtataacgacgtcatctccgaagttcaagggtttgacagtaagctgcaatcttatgacgacactgtctctgttaatcctcatcttgcgttcaatactgaaaggtctaactctggcgctcctcaatacaattccaattcccgtggtcgtggtcgttctgggcaaaacagaggacgcggtggctactctacacgcggcagaggattttctcaacatcaatccgcttcaccatcatcaggacaaagaccagtttgtcaaatttgtggtcgcataggacacactgctatcaaatgctacaactgatttgacatcaactaccaaagtgaagtccctactcaagcattttctgctctccgtgtctctaatgaaaccggcaaggaatggtaccccgattctgcagccacagcccacataacagcctcaacatctggtctgcaaaacgcaacaacatatgagggaaacgatgcagtcttggttggagatggaacatacctccctattacacatgttggatccaccacaatttcctcatccaaaggtactattccgttgaatgaagtcttagtgtgccctgctatacaaaaatctcttctatctgtgtccaaactttgcgatgattatccatgcggtgtttattttgatgctaataaggtttgcataattgatttaaccactcagaaagtggtgtccaagggtccacgaaataatgggctctacatgctggagaattcagagtttgtagcactctattcaaatcgtcaatgtgcagctagcatggaaacatggcatcatcgacttggccactcaaactcaaagattcttcagcaacttttaacgcgcaaggaaatccaagtgaataaaagcagaacttctcccgtttgtgagccttgccaaatgggaaagagcactagattacagtttttctcttctgattttcgagctttaaaacctttagatcgagttcattgtgatctttggggaccatcaccggttgtatcaaaccaagtattcaaatactatgcagtttttgttgatgatttctcaagattctcttggtttttttcctttgcgcatgaagtcagagtttatttcagtgtttattgcatatcagaaattggttgagaatcaacttggtacaaaaatcaaagagtttcaaagcgatggagggggagaatttacaagcaacaaattaaaagaacactttagagagcatggcattcatcatcgtatatcttgtccatatacaccgcaacaaaacggtgttgccgaaaggaagcacagacatttggtagagcttgggctttcaatgttatatcacagtcatacgcctctcaagttctgggtagaagctttcttcactgccaactatctcagtaatctcttgccttcttctgtcctcaaggaaataagtccctatgaaactttgtttcaacaaaaagttgattatacacctctccgagtgtttggtacagcctgctacccctgcttgagaccgttagcaaagaacaagtttgatccacgctcgttgcaatgcgtgtttcttggctatcacaaccaatacaagggataccgctgtttgtatcctcctaccggtaaagtctacatctctagacatgtcatttttgatgaagctcaattcccatttaaagaaaagtaccacagtctggttccaaaataccagacgaccttactacaggcttggcaacatactgatctcacaccaccttcagtgccttcttctcaattacaacctcttgcaagacaagtgactcctatggcaacaagtgagaatcagccaatgatgaattatgagacagaggaagccgtcaatgttaatatggaaactagctctgatgaggaaactgaatcaaatgatgaatttgaccacgaagtagctcccgtactaaatgatcaaaatgaagacaatgcactaggacaaggctcattagaaaatctccatcccatgattacaagatcaaaagatggaattcagaagccaaacccccggtatgctctcattgtctctaaatcctcttttgatgaaccaaaaactattactactgctatgaagcatcctggctggaacgctgcagttatggatgagatagatcgcattcacatgctaaacacttggtctctagttcctgcaacagaggacatgaatattctgacatccaaatgggttttcaagactaaactcaaacctgatggcaccatagataagttgaaagctcgtctagttgccaaagggtttgatcaagaagaaggagtcgactatcttgagacattcagtccggttgttcgaactgcaactatacgtcttgttctcgataccgctactgcaaatgagtggcctctcaaacagcttgatgtgtccaacgcgtttctccatggagaattacaagaaccggtgtttatgttccaaccctctggttttgttgatcctaacaagcctaatcacgtttgtcggctcaccaaagctctttatggtttaaaacaagcgcctagagcctggtttgacacctttagcaactttcttcttgactttggctttgagtgcagcacatctgatccttccctcttcgtttgtcatcaaaatgggcaaagtctcatactcctcttatatgtcgacgatatactcctcacaggaagtgatcaactgctcatggataaacttcttcaagctctcaacaaccgcttttcgatgaaagatcttgggcctcctcgctattttttgggtatagaaattgaatcttacaacaatggtctatttttacatcaacacgcatacgcttccgacattcttcatcaagcaggcatgacagaatgcaaccctatgcctacccctctgccacaacacttggaagacctcaattcagaaccctttgaagagccaacatactttcggagtttagctggcaagttacaatacttaacaatcacaagaccggatattcaatatgccgtgaacttcatctgccaaagaatgcacgctccgaccaactctgattttggccttctcaaacgcatactcaggtatgtgaaaggaactatcaacatggggcttccaatcagaaaacaccacaaccctgttctttcgggattttgcgatagtgattacgctggctgcaaggacactagacgctccactactggtttctgcatcctcttgggatctactctgatatcttggtctgcaaagagacaacccactatctctcactcctcaacagaagccgaatatagagctctttccgatacagctcgagaaatcacttggatttcctctcttctccgagatcttggaatctctcaacatcaacctacacgagtgttctgtgataacctatctgctgtctacctctctgcaaatcctgctcttcataaacgatctaaacacttcgataaagactttcactacatcagggaacgtgtggctctcggtctcatagaaacgcaacacatcccagcaactattcaacttgctgatgtcttcaccaagtcactaccgcgacggccctttatcacgcttagagccaaactcggcgtgtctgcgtcaccggtctcacccacgccaagtttgaaggagggtgtagaagacaacccaataaatagaacgggctttgacaaaaacaaagacatggtagcccaaactcaacaaagcccactacagaagcccagtcaacatatgcaaaagaagataaagaccaaaagctctttacctgcaaaacagaagactgtcactaatacgaagaagaagacaataacacttgaaaacaaattcaagccgttgcagtcgctgccgttgcagtaattcacaataaatagctattgattaaagataacattgtcaaggattctagattgttctaaagaagtctataaaaaaaagatgtaaaactccattgaaagataagcaaaataaaaacatttttgtcaagaaataatcacagttttctttttctcttcagatggaagaaagaagaataggtagaacatagtacttaggtcttgttgtccgttttaatgtcaacaatggtcatgatttgttatgttatgttatcagaattcagaaccaaatcttttgaatatcttttttttttttttttactttggaatatgttatgtatcattttgtggattttattcagaatcagacataacatctaattactaccgtttagtgtatgtgtttttttggatgctgaaatttcatgcatctggtctttttctatagctaggtaatatattgtttgtcccaaaaataaaattcccacaaatcattgttctagaacgttagaattcaatatcatcatcaacatatgtgcatgtgcatgctaactatgaatgtactgtaaagttttctttatttataattatgtattgtaaagttgtatactatatgtcaattaaatggtatactttccgataggaccatttcaattagttgccaaatttgatgtgaatgaagcaaaaatataacggattttgctttagaaaaggaattcgtaaatgacaacgtaactccgaaaagtatttccattgtgaacatattaaattacattaatatccggtttcttacaaacttaggggattagtaagtttagtgttctcattattcaatgcaaattttttatttctttgactattgatattctgctgaacattttgttattggttgaatatattaatttaatgatatttttaatatagataaataactatttacacaatctaggtagtttcttaatatgtgcgcaaaacccttaaaatacaaagaaattgaaacataaagagtaggtttttatttgattatcatgactaaaatagataaataagccgaatatgaatggttaaatatattttaacgtctttacactatccgatatgataatccaataaaactctattcaatgagacaatgactataactggttgaagtaatttttttttcttttatcaccatttaatgttgtatttgcactacttattctacatcaacacacacattgatcaaaacgtttgtttcactcaaccatgattcttgttttacatcgtaaaccatatatccaaaaaaatagatatcaaattagcttatttttcacactagatttcaaatcagctagcattaacaaaacaactggataatagataagattcgatcggaagttgaaaaaaaaaaaaaaaaaatagattcattctttggtggtttagcggtggtggccaactatttggtgacgaagagattctactctggtggagccaaggagaactcgttataggatcaatcttaacatgtggccgaccaatgaataatcgacagctggctgatctgccaccgttgatctgaatcggtgcttaacatgaacggctaagaattaacacagctattaggagacaattatacctaagattgttcgactttaggattacacatgttcaaggcatgcccgcatggggtcgtctaacataattccgatgcaaaaagcgaattatttcgaactttatctttgttataagatctgaatgaaaaaatataatttcaaagctaaagtgcaagagaagacctacctttttatgaataataaaattctattatcaaaaatcatataatataaaaatttgaatatgaagaagtgactagcaaattactatgatatatgtcataatcctttaatatattaacaaaagtaaatatgtgatgtgtacatactacataatagatacgacctacaataattacagtttagttgatttgtatgtgataaacttaatacttaacaaccaaaataagttaatacatatcgatacagtaaactttttttaccttacaaatacacgatgtggaatgtaagatagttagctcccaaaaacaatcacaaaaggactagattttaacctgcggtacaccgcgagaacaatttattttttaaagttagaatatataaaagtttgcaaattgtatctatctataaaatattttattttatagtttacaattgttattaagtaacgtcctgccaaacccgtcccgccaacccgtaccgtaaaaaaaactatttattttattaatgttgatcttatttatgatatgtttatgaattattgtctaaatattttgtaattttgtagtaattaaatgctatcaaatatctctgcggtttgatgattataatcgaattgttatagtcatggagaaaaacaatatcaaaaatgataattttgtagtaattaaatgatattaaatattttggaagttttattttagtaactaatcgtctagttaatgtggagagatttagggaagattgttaaatattaaatatttaattcgaatatttttttttaattatcaaaaacaaacattaaaatccagtggcaaccattgtaaataagtcttaactacatgatttatttcacaaaatggctgcaaaaatgtatatatagatggtttaatttgtttttaaagataaacgacgagcttacaaattcacttcctaagattcgataaatccgatataagtcatatcttctgttaattataaaagtattccaaaattttaatggggccatcttagccgtccaactcctttttctttaatcagcttttccactggcgtacctttccagatggtgattacgtgtctataccaatctttatgaaataaaaattagcaatttggttacaaattcaaaaatagcgatagaagtttgatacaaaattgacacttcaatttccttccaataccgcagacaatatgatccgtccctttgaatacgatagtccttttcaactttttaacatagtacttaatttttatttttgacatcacatagtacttaattaaactactatatttatcatgtaattgagtatcatttgtgaataagatttgactctctttcttttccggaaaataggtccgatattttcttttatattcttgatttaatgaaatggcattttctaattttaaaattaattgaacagtttgaaaaaaattaacggaaaatgttatgcactgcgttcatcactttttggtgaagaacttacaaaacattctgaaaattttgaaaatcctattaagtttagataaaaatttataaagttttcgtagttttcaataatagtaataaattcaacttaatcaacaattttcaataaggatgaagaaaaaatattaattataaaatgaaatttttaaaaatttgcattgaacatccttctcataaaaccagttaaaatttttttttagtaagcatccttttcatactttctaatagacagaccctgaagagttctacaccaagacgaaactgcggtgaggattttatctgacggggcaaatcagaccggctggtatgtggacccactttcaaatggaatcatacgtggcatacagtcacgtgtcagcgatcggaaacaacttgtcaccacgtcattatttctgactcttatgggtcctacccaccggcctattacttgtcgtcaactgtccacgtagatttttaacatggaaaagatcaaaaactgtaatttaataacaaaatcagtgacctaaataaaatgctgggtaaaaaaatagaaatctcaaagccagaagaaaaaaataatttcaggatactggatactcaaaataaagaaggataaatatatatagtttgttataataatgcgtacaattataaaatatttatataaatgtaaaattatatatagaacatataaaagttctatcgtatacttttaacaagcttataattaagtggatatgaaaacgattaattcacgagtgactatgactcactaaaatgtcattttcattctacccaaattcaaatttctgtaattggttccatatatttcccttacatagaaaatcagatcactaataactaatatttacctctatgccgacttatgaatatattgtggtcaatttcatatatatgtttcactggatacaaacaaacatatattcatatataaagtatgtactattcgctacttttgcggttttacattccatgtgatatcttatctggatcagtaaataatttgctttgtacaatgttaagcaaacgcaaaaatccaaatgctagagtttataataaggatccatttatgatatatcgtgttattttgttagttgtttacactttatatcactcacattctatctcaattcatacaaaaagacgtagatattaattaattctagctttaaaatgatcaatctatatagcaatctaagaacagttatcatctgtgacaccaacattcttaataacattaccgactataagtgaataaatgatcacctaatcttctatgaatgataaaaaattccaaccaccactttcaccgaaattgttactcgagggatcaacttctttttgtgactaatttgaggctaaaactagtaagaagaaataaacaaacaaactgtatttctatcaaaaaaacaaaaccaaaacattgtgactctttaacactgttttaatgtcttggtagaattcgctgatgctaactaaggtttaaacgttttaaaaaaaaagaagtttaagttgttaaaacattaaatcgaccatgcacgatccgagatttgatatgattttttagtgggaagaattgatgaaaatgatttgatattgttcataaacatgttaatatgtttaatatcatgaaaaaatattgttcataattaaatggcacaaagatttacctattgttttgagttctattttagccaattcaatcggtgttcctatattttaaccaaaatacaaaaaaatcgtatttatgtcattatattgttttcatgaaacatattttttcatatccaacctcacttatgataatcagtatctaacacgacatctagaattatgagtttctatacatttttataattaaaatttcagattttttggtatagtgagaattgtagtgcacggttaaatcaacaactagactaaagacgactccatatcattaacattctcattcattgcaatactgtttctgccatcgattttctcctcaccatcatcactccttcaaatattcattttaactatagtttgttttcatgctataatgattctatatttctatcaaacaatagttacagaatttctttgcttaagaaaataatatatatttaaatctataatattcacgactaatagacgttaattgcaagtggtgtaagatctgtatatgatatatattttctttcacgatcacaaactgtacatgatgtttctttctcaaacatctatacaacaaaagcttcattattattgccagagaataattatgcttaatatgtgattttgttttaggattttttttttttaaatatatcttgaaaaatgattctaaagctttttttttttttttgataaaggtgtatttgtttctcctataaattaagccatcttctcaaccaaactcttcactcaccaaagcatcacataacactcacacacacactttctcttctcttattttctcagttcttttaactcttttctctacatatattcaaatggccaccatcgaggtatgcaaacatatattcttaaaatttcaaccaaatttatttcgttggtctaacgtttgattagcgatccaagcaaacaaatcaaaatcggaatatatgtattcacttgctttaatacagactaactatatgctaaagtttacataatgatcatgtattctgttgaaggctaactaaaacagactacatgccgtttattatatcctttattatatcaaataaaaacctcacgcagttttgaattgatctatataatctaagttttgaagtttgaaacaatggtttttgtaggttgaacaagtgactccagtagcagctgagaacatcgaggtgccaccaccaaaggctgtggagtcggaggaagtcaccaccgtctccgagtctcttccagctccggtaacagaatctcaagcgcctgtcgaagtaacaactaaagatttggtcgtggaagagacagagaaaccaatcgaagaaacagaggaagctcaagttgaaactccggaggttgtggagatcaagaaagatgaagaagctccggttgaaactccggtggttgtggaggatgagagcaaaacagaggaagttgtagaggcgaagaaagaggaagaagtagaagaaaagaagacagaggaagctccagtggttgtggaggaagagaagaagccagaggcagaggaggagaaacccgccgtggaagcctccgtgacagctccagtggagaaggctgatgagtaaatgtgaagaaaaaaactgtcttttgaaagacaaaagaagaagaaaatgttagcaagtaatttatttgctactttaagtactttgtgtcttgttatgtttttgagtctatgactcttcttgcttttggttttttaatcttcttaagtactattttcaatggttatcatttttaataagatatacattattttatatatagtttgtttgatccaagattatgaccagactagataacaattcacatgaagagaatcagcgagatcaatatggtaatgatgatttttgagatacattacttcagtttcttaaattacaaaaagtttggagattcaattgcatacaatctaacatctaacagtcaaaccatttactcctaggatcaactagtcattctgcatcatttcaaagttagaatttagcgtctaagcgaaaactttacatggaaaaattaggttgtgcacttcatacagaagctttatctgttttgctcttctttccaatgaaaacagccatcaattcagccacaagctcttagtcattctgcatcatcacatacctttttacaaaatcatgatcgttacataccaagccagacgcattgaagggagttctcttccaagcaatcctctggacgtgagtgctttgattacatttacactttggtacaatcctcttctccatgcttaatccaagtacctgagggaacaaagtaatgtcctttagtgatcaattcatcttcttcaccacaaactcagtcttctttttcactgtctctgcagacaatccaaagcacataggaaaacacgtgactatcatcacgcactcatctctactgaatcctacacctaaaagtgtatcaattaagctcaatatcctctgctctcaagtacgtatgaattgaggatacttcttcaaaacttgaaggacctcgtagaccgcacatcttcaaggtttcaatcgtctgagtaatcttttcctctgagtatttcaaagagtatggccacttcttgaagattacccatacatcttccacagcaaagcctaacattttgtagacattgactttttcttctattgttttgtcgttcatttcgtaagatacgtggagagctttgacaaactttgcggtggtcggatcaaaacccatctcaactaccttcttgagagacgtattaaatctatcttttccacatacaggttgaccaacggatataagcaaggggaataacaacttgtgaggcattcccaattctcttaaaaccgatacatttctcttcttgttctccagattaccctgtggaaaagactgacataaagtttcatacttagaactcttatctgcttctaaactctctttaacgaaatcatagtataagctgagagttttgtgccctctttttcccaagagtttaggaactgtagaaacaatcttagtgagctaagagcttgaagctcctctggactgcaaaaaacggaaacttgggaccaagtgatttctcaacatctactataagcaattatggataatccgtaatgatacttgagatctgagaaactgtgaacccatgacttctcaaaagactcagaacagaatcaggattggccttgtcctcgaatctaaatttctttgaaatcgattcagcgagctttttaggtaaacccaatgaatcaacgaggtaagagactgtaaagttcttacctttttgactatctataaggctcacatcagcagcagcactagcaacagtggagaaggaattggaaaaagcagagaatacattttgcaaaagcttcactgaaacactaaagttacgccatttatgtaactcgatagatcttcttccatggagtatcagagaacacatcacataaccagtcaaatctcttccgcttcgaggatcaatcttagaacccaaaaaatcgcgaagaacaagattttggagagggaaaacaaaattcgtcatctgggttttagattccgacatgatcagagtattgggccttttgggcctaatcgctcaaaacaatgttaaagccataatgatctaactccattatttacgactgtgccactctttccttgtagctttgcttttttctctattaagaatgtacggacaacgaaaccctctacgttattaagaagcgttcactgtttgttgtcaagtcttttcaagtttcaacaaaatgtcattagaaataaagttaaatacataagagaacaaacaatttcacggactctttagttcggagacagtgatcataatctgatatatactttgtagtcacgggcttgaccttgaagtttgcatcggaccaacaacgatccaaaaaacctttagttgtaacgcaataaaatgctccaatatttctcgaagtttggaacatcttcttttttcttcattttcttgccttacacatgttcgtttgtacgtaccataacaaataatcaaatctactacacttataaacactatacctatttatgtgcgtagtggttaacacccatacaagagtcacgggtcacatttaagcttcaactatatatttgcatgttatttgccaaaaggatttgacaataatgcaacaagagtttcattgaaaatttcaagaaccctagttaataacgataatgggttcgagagttttggcttccttctttgttttcttaatcttcacggtcatcacattgcctcccacgatccaagcttgcactccttgtactcgtcctcatcctccggttccgaaacctccacaacacggcggtggtggaggtggtggtagcaagccgcctccacatcacggtggaaaaggtggtggtaaacccccaccccacggtggaaaaggtggaggaccgccgcatcatggtggaggaggaggaggaggagggaaatcaccgccggttgttagacctcctcccgtagtggtgaggccaccgccaatcataagacctcctccggtcgtctatccaccaccaattgtgaggccaccgccaatcacaagacctcccatcataatccctccaattcaaccaccgccggttacaactcctccgggactcctccctccgatcacaactcctccgggactcctccctccagtcacaactcctccgggacttctccctccagtcacaactcctccaggacttctccctccaatcattaacccacctccggtcacagtcccaccaccatcgtccggctatccaccatatggtccaccttccggtggaggaggaggaggcggcggcaaacaaccaacgtgtccgatcaatgcattgaagcttggagcctgtgttgatgttttgggaggattgatccatataggacttggaaatccggtggagaatgtgtgttgtccagtgttacaagggttacttgagctagaagcagccgtttgtctttgcacaaccataagacttaagcttctcaacttaaacatcttcattcctcttgcacttcaagctcttatcacttgtgggatcaatcctccttctggttttgtctgccctcctctcacttgatctaaaaacatccccttgatttaacaaatgtacgtatgatcaagggtggttttcgaggcttttgtaataattcaaatatatatgtggtacttttgattatcaggtttgttgattatctagggttttaattaacaagtgttgttttctgttattgtcgttgttgttataattaagctagggtttttgcatggccttctttaaatttcttttgcgtgtaatctttcgtacgttttgtattgttccagcttctcgctgtctatcaatttgactctttagtctctctatctccctctctctacgtatgtaggagtttgtgtgtattgtcatgcattatgcatgcagtcatgcagatgcagtgcagatatgggaacgtgtgtggatcgtacggaaataaacttttatgaagagaactattatattatattcatacaaatcattgtcttttgtcataaaacgcagctaaactccaacatcaaggacatttgtcctcatggagatcttgcattattctaaggcaaaatctatcattactttggtaacaaaaaaatatgtatcatttttcaattacttaggtctctgttgtgctgtggattatatatatatattttttatttttgctgataattaaaggttgatccacataaaacatgttaagattttttagtaaatatattcaaaccaaattaaagtgttaatatgtaagaaaaaaaatgttttgcaaatatatgaaaaatgattatatgttttttttgggtcaaagaatgattatatgttcgataaaaggagcttcaagctttagtcacatatatgaaaaataaaactgcatgtaacttcggaaagtataaaaagtttagttcattgttacaagttggtccaatccagttcacgataaattattcgcaatgtgtttttattttattttattgtataaagtattatgtaaaatgtgtttcactattcaaattcaaaaatgcacatagattctacagttccatagtctatgtacctacacataataataataataataataataataataataataataataataagatataattccttacacaagttgagtaagaaaaaaacaattatagttcacgggctccatatagatccattgaattttaattattcattagggccatccaactcggaaatgacagggcacacaatcgtggcataccgtagtatagctagccattttagtagaatgaagtctcaatgattctttcttttttttttattaaaagaacaaaaaactatgtggagcagagacaccgactaaattattaatcggaccataaaaataaataatttggtttgacatcaaaactaagatattttaataaaatattatgcatagctcatagcctcatatttgatcggttcattcgattccaagtagtcagttagcttttttctagaccaaaacttatatagtaacctatcgtagtgtatttcacaacattacctgagagattaagattagaatccataactttttactttttttttatcaaactaatgaatcattcaaaattttcatcaattttctaaatgaattgtgatatcatgatagctttatatgtctaaatgcttaaacgatcgttaaatttaaatgctaaatttttagagctaagacatgttcttttatttttatttttgatcttctggttttacaaaaaaacgcctatataacttgttttatatgtaataaaagtgaagaattttatccaaaaataaaaaagaatgatgaatgaatatataattgtatagataaccaggtctcatgcatagatcaacaacattttaagtgaaaagatggctaatccgatcagcaaaataatacagttacttataaagacaaacacttttttcttaaattatttaccttataatatgataatgatagagccaaattaaaaaagtttatgtcatttgtatttttttttttagtagaaatcatcaggtttagacactatatatgtatttccacctataataatataatgtatgttctttgagactaaattttacgtggtcacatgtcatttcaactttattatatgctatgtatacttgtatctgtctttgggcttgttttgtcacacgatatatagtataccatgtaatgagttctagcaaaagtgaaatcttacttgaaaaaaaaaaaatattagaaaatcttacttacacgtaaatgtcccatttacacgtaaaacaaaatgtcccatttacttgaatgttcgtgtgtgtgtgtaagatgacatataaatcaatagacttatgaacaaaaaaaaaatatcaatagacatgatttgacaataaagacaacatttgtttttagtttgacaaaaaataagcacataacattttatcttttaaaggctaattgatttgtaccaaattaatttttttattattaattatattattataaataactgcttacatttctcttgtggacgaaatttttttttgattttattcttattttcttaccgagataattggtttctttttttttcttatcatttgtcaaatgaattcattagctggaaattaaatttgaaaagtatataggggtagggggaaacaccttaaaaacccttgtttttgttctataaagttgaccatctatctttaatgttcatacttgattattccatatattgacatttttataaatttatttcttcgaatccatatccatttgtcagtgtcactaaaatgataagaggttgacacagttttgtaaagatctaacctgatgcttgacatgttcatatctgtgtcgatccattttttttcccgtaaaattttggatgttaaaacgcatgggtattttttctcttaagtttccagtattggttaagaaaaacaaatctttcttattaaactttgatagacacacgcgcatgtagtaaattaggcttgaatcatgaattggttccgtaacttctgaagattatctctgcacgattttacggataactggactttatggttttcgccatgagcctagcttcttcttgtttggtttaatttacttcatatcaacgatctgctcattttcacatcttcttattttgagactttttgttgtgcctaaagtcgttcctcaattttgatggttaaaccttcggtttccacacaagggattgcagtcttcaaattaattattgtttaaaattcgatgtgcaacaataatatccatatataccttataatcttatatattgaaatgattgtgttttgtaactttggatgtattgtaagatgagatgttataaggatattatttattaattcatacaacaacaaatacacaccccaatgaaactatataagagaacagaaaaaaacacataactgtgaagtttagaagcaatcatacacacatacataagtaactagatgaacacacaaatacaagataacaaagacaataatatataatctttttttttttggtagaaatcatcttgtctgtccaaacaagaagattatattgatatgaagtgtgtgttgtataattaggttcttgattagcattggaagccacgaggaacttttttgctgcaaacattgagaagaagactgagagagagtgggatattcaggttgataccgaggatgttagccttgagcgcagtgcaaagacaagctgcagcctcaagatcagcgagtccttggatgagggtgcaacatggctcgaccggtggcttgccaagggttacgtttagtaggccgttgagtacgttggcgcaaactcctagcttaagggcgtctctagggcatttggctattgccgggctaggactagggtgtggtgttggcttgggtttagggttaggttttggcttgggagaggggctaggtttatgttttggcttgggagaagggcaaccgcagttaccgcaggcggatattgttgtgaagaaaaggaagttgaggatcaagaaaagagctaaagattttgtggttcttgaagccattgttaatctcacttttggttatagaggagaggtttcaaaaacaaacagtactgttttctttggtatgtgtgaattgggatgttggagaaagatggagggttcgaagttgcttttatagtagtttgaaggacatgccgagaatgtttatgacctcatatatgtgattatttaagaaaaacatcggtgaaattctgaatttttggtttataattatttttgattactgataaaaagaggttatttgatatatgaatgtcctgtgtaaacagagcatgttagtgctgattctagactgggttcgagaagattcttccaacaatttatatgattaaattcaagtgctagataactctgtggtggcaaattgacaaaagcaaaatttggaatatatattgtccattttgtatattatggtaaataagaagtttttttttttgttaaaaaggtaaataagaagttttgcacctttagtttcccacgactcttttctataagataaaacatataacacttggaatatatattgtccagttttcttaagaaaaaacatccagtaagttcagctataatttttaataaaattatgaatcttttttttttatcgcgagtgatttatctacataatctttattctttttagtcacatactctcattattatcttattattgaattatcattattttcttatagttagtattgaaatttgcaggaaaatgacaagattaaaaccatgtgtggtccttggacattgatctggcaaacaacagaaggtgaatatttggatttttgttaggttcttcagattatgatgaaactcttcttgaacttatcctcttggtagtattttttaatatataaagtcgcattattaatctagatatgacaaagtttcaatctaattgctctataacctaggcatatcgtcggaaagaagacattctgacatatagatatacttcatctgtatacttttaaagcaacttccttgtatcttctgcgttcgattatccaaaaatatgtagaagttgtttgaaacatttcaaatttttgttattaacctttggttgttttctaattaaatgttcaatgtgtttgttaaatgttgtaagattatatatactctagaaaaaagcaaaaaaaaagttaagccgtttggaatgtaaaagatgtcaagccgtaattttcaatctccatacatttacagttctcaaagaaactccaactgcgatgttctacttccatacaataatgttaacaaagagataaacatttctaaccatgatgttcaatctccatactttaatgtttcaaagaaatgaacattattcagaatatgtgatagtggagctgctgattctctttgtgcccttcacgaaacaattgaaggaggctggtttctcttttactttttcagtttatgtaacttaaaatcgatcaaatttccgttgagtaaacacattttttccgaataaattttacattttcttcaaaaaagaaaaaacaattgaaaacaatataagatgatatatgataatacataaaaggcctacttcacatagattactaaagatgtcttatttacaattcgtacacgtgtgcatggatgacaaaagatgatccattctatagattatgaacttgtgtgtcaaaacacattaatttctgtacacaaacattttgtgtggaaggtggaagtcattttattttaaacctataattatttacataatctacaattataggttttgaacctttttttttatgtttgtgtatttttcggatgttattgattttgagatttactttttaaaatgtttccgaagaattttcttaacctttcttgtcgtttgacattttttatatcaaatcacacaaaatgaaagatttgtaaattcagtagtgtaataatctaaaaattttacatgtaccatatattgttaaaatattttttgttcacattgtataacaaaaccattttttaattcatttgcacttcaatcaatactcgacagttgacactcttgagttttgggccttcatccataaaattggcccaatattttaaccattgcaaaatcacatggacatattgggccttcgcccatcaaatggcccaaaattcaagtattgcaaaaccgtaccagtatctatcaaccctaccaatatcgaattttgttatgaatctatcattgttttttcattaattgatttgcaggatatttgatcgcctatataggaaagagtgggatgctaattatagttatattgtacttctgtttaatagaaagagatggaagggaaattataactgtataagaggtgtgtgtatatgtgatatattgagattgtaatcatcaataaatatactttttttggtcaacctctgcataaacagcgtacgttcttgtcagcgtaagttctttgaattcttgaaatatggtgaaaaaatgtaattggtacattaaaagctctttagattggaatgcatcatgttgatagattctagcattgatagattttaattttgaaatccatttttcaaatgaaaccaaacctagctattgggagctcataatgaaataaaactgtatttattatttcatagatcaaaaaaattattgactgttatttctgaattcacacgttgtaaactccaaaacaacaagatctgaaccttattaattattgagctttgattctttttttttaaatgattacttttattctgattttaaatattttgttcatcaaaaataatcatattaatggtttatgttctataccatttgaaccaacctcttacaaacttgatagccagtagtttattagtaaaaataaaccgtcacgctttaaagccgtaatgtggaaaaatgataccatcatgatataatttagaaagacttggtttattcattaacataagaaaagtatttatacataatgagatttttttatacgatagaatcgtatcacatctcaatattttaaatttatcctaatatatcctaataccctccttcaacttggtgatctgaaatttcgagcaccaatttggacaataaattttcaaacatatgtgtagaaaatagaagagcgtcgacttgtaaaacgacaacaaagtaaaagaagtgaagcggcagcttgtggctttcatagaaaacaacgacaccaatggcttgtagaaacggtagaagatagacgtgcgacagcttgtgaagcagcggcaaagaagaagttaaacggctgcagcggtggcttttatggaaaacgaggcaatagtagctaggtttaatagataactggtaaaatcaaatatatttatagtttaaaaattgtagaaaatagaagataatggaagcaacactagttagtacatcggtggctaggttaatgattttagaacaaaggcggcggttgctgaagccaagcaacgacggccatttaaaaaacaaattaggtcactgctaccatgatagatttgggtttttaacatggtaccagcgacctaatctgggcaatagatggagtggttctaaccctttatatactacttaataatttctccaagtttcgatgtgggattttcttcattaacacccttcttacgttcagatattattggctctgaagcgtagatatatgttgaaacaacatccactggatgatccaacgattggatggttctaataccatgatataattaaaaagaacttgatttattcattaacataagaagagtatttatacataatgagatttccttatatggtagaatagtattacatctcattatttgaagtatatcctaatacagatcaactaatgaaaaatggggtgctgatattgaccatatagatgtatacccatttgaaaaaatatatcaaattaaatgtccaaccgtccaactatttttttcgagatattcaacttgtgtcactcgtaactagtaactagtgtcacattttatttttggttgagattatttcttccaggattatatacgtaaatcggttactgaggattaaaaaacaaaaaaggaggattaaaatttgaacaccgttcccggaggagaccaagaagattcttagggcaaagcgtgaagttaaaaggctgtcgaaaaaaaaaacattacaattacaaacttacatctttcacaaaaccctagtttctacccaaccaaacttcctccttggctctcctttttatttcaattccaaactagctccatccatatttgatttatttatttacttagtttggatcttataatcattacacactttataatatactattactattcatgcaatttgaatatgaaagtgaaaatggcaaactaagccctagagatacttagattgcacaaagtagtcactgaacttttccaagtaacaacgcaaccctaaactttggaatctaccagcttagtccatatatatacagtttacaatatatatgtattagttggtttagtatataccactttgaactttctaccaaattttattgatttgcttaattaatttaaaattaatatatatttgtacgtttaatttgtttagtatactacatatagtttgttgagtttaaagttttaacgactatctatagttacatttctttgtttaataatttaattatagagtatttcactagttatatatacttcttatgatattgaattaatcggaattttgataaaatggatctacttttccaatatagatagtgagagtcattttgaatagatttctaaaagttaaggatgcgtagtgatgtttagactttagtatttaaatactttgagtcaagtatggacatgaattcaaaccatttatgattacgtgcgggatgggagtatgtattattctattcttttgtttagtttttcgtaatagtttactagaattgctttaattatgtgtttacatatatcaacgttgtggcctcctcatgttactacacgacccactctcccaaaagtttcttactactaaaaaaatattttcaccataagatttcaagtatagtgtatatacggtttttaatgcacatgtctgatattttttttgggttctaacttctaatgtctgtttttttttttacatacacattttctcataaacacacttaatatctcatttttacgatttattatatactaatacaaccaaattaagctggtataactctggcatggttatatatatattcgataaattccggagctttgtgtatcaattcttataaatgcatatatattcatactgagctgtgaatcatatggttggtataaaatttaactaaagataataacaattattgtcacataaagtaaagcaatatttaagtagaagatcatatttaaaatatgtcttctacatatatatagacatatagtataacaaaacacttatcatctgtataaactaagcaattgcgtcaaatagaaactttaaaatataattagtggcaacctaaatctttataatatctaagatcaaacatgtagtatagtaatttgtgttagtatcgtcgatgcaccgtcactcgaatttaaactcgcatcatacatgatacatactgttgaagtgtataatcgttcatactaagaaactttctaaattgtcattgaaattgaaattttcacggtatgatagattatatattgagtgacacaaacggatttacaaaatatttgaacactattcagaaccaacaatgtcatatatacgcattaatcactaattagtcaaatgcttacttatgttagacaaggcaattgtaatatcatcagggtatagattattataattattaatttaagtgtgtaattaagaaaaaataagaggaagacgacagataagaaaatgggtgtcattatgtgagaatttcaaaattttcagtgcgatttgttttaatagtccgtcgttggcagcttccattctctttctattcttctattcttccattttgtttttgtaaatctcaaaattctaaagattcctcctatttttaaaagcaaacaattatttttatattagtagcatgacaagtgattaagatacgcatatcctagtgagtagtatacaattttctctatattatatttatattgtgtatatttcagagtgttagttgagttgattttatgaattaaattatgtgaactcctgaaccagaaagcagccaactatatctcgctgtagtgcagaaacatatattcagcattgacagacacaatttgtgaagttagatagcttttatcacttgctcactgatacaatgttttgtgaaaacacatcagctagtcagtagtcagattgcatcaaattttgggttccatgagaggacaaaataaattgaaatagactttcattttggttagtaacaaagttagtaattagttacagtaaactagcttatatatatacaatttcgatagttagaaatagtttttttttttttttttgtgtgcaatttttctctaattcatcttcgaatcttttattattttggtgttttacttttaaagttacaaacaagctaccattgaccactgattgattcaaagacgacaatgaatcgtgattcttacaaaattctatggtgtagaaaattagaaatacatatagttttgttttagctcactagctttaattaattatgacaagaagaaaacttataatttgtatgataaacaagatatacaaattaagtagaaatgcgtattctaagaaaaaggttgaaatgaaatcattattttgtattgaatattttttgtaagatagcgtaaaatttacgttgatttcgaaatatttttgtcatcgactaagagatccagatatcttaattgacttgaatagacattacatgtgaaattctattgttgagataaaaacaaatagagttacgaagttgacgtatttttaaaaaatgttattcgtgttcttttgtgatccatttatgataaaaaaaagacaagaatcacaagactgtaccaaaataaaaacaataaaatccggctgtcaatttttatcttacatttatttccgtcttgtttttctgcattaccttacataaaatcaaaaaacaaattttccattcttataatttttttgaaaaaacttaaaatcaataagacaaaagtgatatgaaggaatggggtcatatcgtagaatcatcttacataaatcaaaaaaataaatttatgttgtaaaaaattactatgttatattaaactaaagggtaataccgtaatttacactcccaagtttcgacgtacacttttaatattcatcatcatcatcgcgccatgttgctttcttcttctgcttctgtttcttttccaagtttttaaagagagagagagagactgaaagaaaaacaaaaaacagagagctttggttccggatcttgattatggcaaatgggtgggtcaaatcgttacaatgcaagtcgaaagctttcgatgatgtttacaatccgattaaaaacccgaacccgaatccgagcccgagtccgaaacatctcatgtcaagctacagttgcagaaaaagcacacagagtctaaaagatgtgatcgaaaccaaaaaacccaaacctaaaccgaagaaacccaatccaaaaccggataaacgagaaaccgacccggttttatcaccatcaacccggatccgatcaaccggagttcgtgatcgtgatccgtttttaccgacattgacggagctatcggaaggtcatcagtcacgtaatgtggtggagattatctttcagacgagctggggtccgaaaccgttttcgggtcgggtcgaaatgattttcaaagtgcaaaacgggtctaagactttgacccggttcgaagagtatcgtgaagccgtgaaagctaggagcgtggggaaagcgcgtgaagagaacgcgcgttcggttgccgacgggaatgaaacaatgaggttttactgtttgggtccaagttacggtggaggtggcagcgcgtggggtattttgggaggaaaaggcggtggcgcgtcgatatatacgtttgccggaagtagcacggcgaatgagaaagctggcggtgggaaagggaggaaggcaatgttggtttgtcgggtcatagcgggtcgggtcactaagcaaaacgagttaaagtatgactcggatttgaggtcacggtttgactcagtgagtggtgacgacggagagttgctcgtgttcgatacacgtgcggtgttgccttgttttctcataatctatcggttgtaaaaattcaaaaaaataaaagttattttagtttctaactttttgacattgtaatttcatttatcaacgcaattttcccctaatgtttagggatttgtttttatttccaatgtaaaattggtagaaaattgtgttgataaatggtaattaattttgttgacgacaagaaaaaatggcaattagtagattttctttctttctttctttcccaactagtagtaaaatattttcttattaaatgatgtcgtaaatagtgaatattttggtgcgttggcttttacaatgccattaatagattttattacacagtcaattgttattaatttttacagttgggttttgattctacattcaattttcttccatctatagtaaaatattttatccactaaaatatcttttacgttacttacacgactacttccttaaagcgaaaagctatagttggaaaatttcaaattttgtaacgtttctttaatataaaataaataatttcaaaattttaactgagagatgagagtagttcaaaagaaggaataatcagtgaaaagtgattcccactaaagagcatttgtaaaagatttaaagtcaaaaaaagaagaagagaaaaagagtaaaaattgaaaatgagaaatcatgaaagttacattggatccgcagggagaagaatatttagaatgcacaagtgatgaaaaattgaagaaataacagaagcgtaaaatttaggcctgttgatgtaaaaaaaaaaacaattaggcctgttgggcccattaggcccataaaataatttacggaatcagtcctagcgaatctttcaagaatttaaaagaaccaactaatctttgaagatcatagactcgaacaaagttccaacttcctcctctaactttcaatatagtgaatgattttgaaaactgctatatgttaaagctaaaccaatggagctagagcaaatgtctataagacctcaagcaccgtgaatttcatcatctccttcttttacctacatacgtttgagtcaaacctttggtgtttctcaggtttggtttgcattttccatctttagtcttcccctgcattttcttgtaatctctcgatctaaaaaccgtctctaagaggttaatatcttctcgaatctcatgtctagagagcgatacaagctccgggagtatctccttttggaaattcttcattctcctccctcttctcagcttgactccaaactctttcttcttactgaagtcatatatggcctttgatgatacacaacagagctcttcagggacagtttctcttatttctaaagtatgtagctcaaatgaatcgcaagaacgacccggttcttggacaccgtgactttgattatgagaaacagctgagatgtggactaaacattcagctgccatttgaattacttcacacgaatcttctccttcagtccttgaattgttttctgcggtgcaacatgaagctggagatgctgaacaatctttttcatgtacaccatctaaaccgcattgatgatcaattgaaaccggctcgtaagccgggggtttattaagatccagcaaacatgatccatctgaaatattcactttctcacttttcttgccacacaaatttgtgccatatgcttcaatcctcaaatctatgctatcttgggaagaaccaatgctgtggaattctcggtattcgacgctttcatgattttcaggaagttgaagatcacaatcttccatcagtggattaaggcagtttctattcacctgctcattacacgacacaaagctctcgtctcttgctgtatacacctgaaatgagagttgatgaacatgtatttttgctattttaattaagaacaaaggcaacaatgagaacaaaaagatttaaaatagtatactagcgacataacgttaaaaatctttacctgctgcccaaaaagagtgaccattctaatttgatttttcttagaactttcttcatacgattcaaaacgtttcttgcacaaaatttcgtccttggacaaaccgtggagatacattacaatgccttttgtcttattttctccataggacgtctctctatcaaatgcaatggatatataatgagacaatccatactcaaaacatcaactaaatcgttagaactgtgacattgccacaaaaattggaacagagaatcgagcttaaaccctagaatcaggcctttacagattccaaatgatttcatttacaaaagaaaactagctatgaaaatgtatacacataatctatggctgcataacttctaacatgacaaatataaataactattgaatattgctgtacagaaccattatcaagaactaaaatcgaataacaaatttgactaagatttttatcaggtactgatctaattagaagtaactaaaaccattaatcattgtttaaaagtaaatatattcagattttcaaaggttctgaatccaaaatcctttgaaaaaccttcctaatttgcagaaaatttcatgaaaaactgaacttgtattgatcattcacatacatagacagagagaatcaatttctcttcttatgcatctattctaaacatgcaaatttcgtgacactaacaaagaaatgattttgatcattaagtatgacttttaccggagatttcaatgatgactaaccaaaattatcgacaaaagaacaattaatatataatgaggaaaaatcaatatattcctactatgaataattcaaaaactaattcaaagacagtataattttaatagggaaaacaagagagaagaatcattacccagaaaataaaattgcagctttcaattgttagattgaccaacagacctatgagacaaatagaagtaatcttagtaagacaatattcatggttagagtctttgagatgtaatcaacagatatatatatatatatatgtcaggtctgtttgtatagggttataggaattacagaagaaatcttaccatgaggagcgagaagtgtttctctttattattttttatttttagagagattgagaattagtggttattattgtgttagtgggcacaattagcaaacatttttatgtttatatatatcaacttcgtttctatcctttttatttttttataactcaaagacatactttcaaaagaatatcaaaaaccatacaataatttttctatttccatcaatggcataagcaaaacactttcttatattaaaacaaaaatattttagattctaatatttttgtttccattttttctagttatcattgtatattcaattgttttctttgtgttcacaatgattgtatatttccttttgtaatttgactcagaggaaatttgaattgtttttatgttagatttggaaatttaggttgagcgagcaagactgccaaaaacaataaaagctgcccaaaataaaaataaaagagcgagcaaatggttatggtaacaaagaaatctaattaccaaaacaaatagtagatctatgtaatctatataaggcatgaagtcaggccggtttatgggctctgcccacggcacaaggccaaacttttttcgttttatcaacttcattagcttataagggccttcaatttatattttagttttgcaaaatagggtccaaggcccatttatattgcttggaaagagtgagaaactgttgctagttatcttttgagagtttgattttttaacgtcttttattatttctaaacaagttttcatacctagcgttgggtggtccggcttggttgcatgaacggatagcagtggaaagccgttcgagtcgatgacgtctaaagtacaactcttgcatgggatgagctttttccgttttgtctttggttctaatctattatgttttgcagtccgttttctctgtatttctgttttttttactctgtttctttattactctgtttcatttattaagacgttaaggagaaaaaacaagttttcaaaccaattatacaaacatatcatcaaaattatcaaaaataatatagaacgataaaagataaaaacaagttttgactctgctttttttcgaaaagccttcctcgctatcggtttatcaaatttgttatttttctttttcgtactcgaactcaagcatgcgttatcacatataaaaccgacattactttcgcggataactcttgtttttactgctcatgatgctttactcggtagtccaatctttgatctatatgctctagttattatacccaagggtaagggatgcttgatcgactaatgtatcttaaaaatgtttcctacatgatgacttttgaagaatccctacaagaccaaattattgatgtagattgatcacctacacaaagttaatgtataagacttttgtaggaaccatatatggttaagatctaagaccatgttattgatggtttttgtaccaaaaaacgtcaaaatcgtttatttttgtaattttatccttcacgtccaaaaaatacagaataattatatgaaatcaatatatgtaaagttgttaaaataggctatatacaataccgtattatttttttacttcatatgattttgcattttttcgacatgaatggtagttgaaaaattgttgattttaagattgtttttttttttgcataaaactctattattgatggataaagtcagaatttgatttttctggattagaaaaaatcaagaaatttactaaaaagaaaaaagaaatttacggatgtcaaaaaaaaataaaggaagaaatgtacaagctacaaacaaaaatcgggtagttgtgtcacgtttattcttcacttgattctacaatgattgagataaagttgccgattttgccgggtagcaaaacacgtgaattatgcaaagactgaaataacatgacttgacgatttaaatagtaagcttattaaatatttcactcaacccacaaaacgcaattaaccgaacggtccaagccttcgtacttttaggtggctattcgttgaagaagataaatgaaagagagggtacgtgtccatccatttgcggttaggtctgggtccatggcccgtccctttcaaaatgcaatcaaggtccgtaaatcggtaaatgtaattaagaaattgtaatatccaagctaaaacttactctttccgttttaaaacgggatataagttgttttagagtttttcttttgagtcaaaatatagatgttttcatatcttcatataaaagaaatattaattaaaaagttttatctaaaaggtttataaagaattaaatgactgtttttcttcattggctttcaccgagtatttcttattaaaaatatatatttgactaaaagcataaattttatcaatctctgtcctaacttccaaaacatcttacattttgaaatggatgaaatatttttcttccttctctttcttcatttgaggtatatatgaatttaatcacacattttaaataattaatgttaaaatgataaatcctatgtttttctattatgaattttaaaactagaactattgaagtattgattgtggaaaatattttaatatccagttattgaaaatatttttaacaatggtttttcaatatggtttcaaaattcaagatgatttgggaaaagttaagtttattgatcacatgcaccaatatatatatacactaatacacaattatatatattaatttaagcactaaacttactaatccttatcttaacataagatttatcccgtacccactctaattaataaacatatatctccgaaaattgtagaaccatataaaactttaacacttcctttcaagtttgagtatatatgtaaatcacaaacgctcaacttggacaagtagctaaaacaggaacttctcaaggctatgtggttcgaacattatatgtaataatattgaaccacatctcttatactaagataatccgctttgatatttttagttttctcatagaacattgggttaacagcaatgtgcaatgctgatttcctatcacaaaacatcaacatcggatcactatgcttcactactcctagatccgtcaaaagtctcttactattttagttcaagctggcagccatgcctatatactctattttgacgatttggtttacaccggtaacggttgttgaatgaagaaaatcagattttaaattcgatcatattcttttattaagttaaattagtttgtgtattgttctgacaacaaaacaatttcagctaattttataacaaaataaattgtgctttttcggatatttccccttccatttttacaatagaatgatcgaatatttttgtatgaagtatattgttcttacaacaaagatggttttttttttgtttttggttaaagtacgaaaatgatgatgattagccatcttgtttcagttctattatataagcccattaatagcacggaacgacctttaaccaaaacacagagatcatacgacagtctcctaccaaataaagaaaaatccaccataccataaagttcaaatatatggcaccagctcaaaacccgatcagttctcaacacgtggtagtcatcggagccggagcagccggtctcgtagcggctagggagctcagtcgtgaaggtcacactgttgtcgtattagagcgggagaaagaagtaggaggtctctggatctattcacccaaagccgaatccgacccgcttagccttgacccaacccgttccatagtccactcgagcgtgtacgagtctctccgaaccaacctcccacgagaatgtatgggtttcacggacttcccttttgtgcctcgtttcgatgacgagtcaagagactcgagacggtatccgagccacatggaagttcttgcgtaccttcaagactttgctagagagtttaacctagaggagatggttcggttcgagatcgaggtggttcgggttgaaccggttaacgggaaatggagggtctggtctaaaacctctggcggtgtttcccacgatgagatctttgacgccgttgttgtttgcagtggacactatacagaaccaaacgttgctcatattcctggtaaagatcattttctaactacttattttatttttaaaaaaataactttgttttctcacatatatttatgtaacattttttataaaactatggattgtaaaagaactaacaaaatagccatggtgtcagaccacactctctttcttcacttgcaattacttttttacccatttttcgtattttatatatattacatggtatttttcaaaatcaaataaaacacttagaatcatctcatctttctttctcccatcaccacaaccaccacatcttccaccatcacaaccacccgatctctttttcgataaatctaggctctcaaacgttatttatattgatagatcatctctccttcaatttgcagaagatttgtcattttttattcgattttgattctttcttggaatctccgtcgttatgttttctttttaaattgtatgttattttcttttatacgacgatacttttttgaattacacgtgataactagaaatctctctctcccaacatgctactttttcatataacacattatttatttaaatcacatgtaatttcttctaaaaacatgatttaaatgttaaaactttcttaaatctattattttatcttcgtataagcttgctcctggttcaacttttcaaataaaacgatatttgtttatataacatgctatttgtgtaaaatgtacgttataaaatgtcatattttttataaatatcgtgctattttaacatgtttcatgcgatttgctaaaaaacatcaaatatatctacataagtctgcttttggttcaacttgcaaggatagttttgtattttcttatgccgtcatatagttatttatccgtagaaaaactgacaattgttagttacttgattcttttcaattttatagttagtttctaatattacccttataaaaaccagttagtgattgaatcatttgccactgctggattttagattacaattttctagatacatcgtccgatcttgatgaataacttaagacttcaatctaacatataatctaaaactatcagaactatctatatctttaggtataaaatcgtggccaggaaagcagatccatagccacaactacagagttcctgggccattcgaaaacgaggtaattgtatttttttttaaagatagtagtccctttatactttctattatgagtttttttctactagttctaccaaaaaaagtctctttcaataattttttttttgggtagaaagtctcattcaataattaataagaataaataacatattgtagcaagaaacgtgttataaagacacgcatatatattttccaaaagttttgtaatttgtatactgaatttgaattctcgatttgatatctatgaatttagctggaaaaaagaagatcggaggaatttagctggaacatgcaagagatgttcataatcgtccatcaaacaacattttattattagaaatgttagagataattcatatcatatttaggttcatgtatgatccgattttttaacaaaaaaaaaaaaaaaagagaagcatttttgtgttggtgctttggcaggtggtggtggtcatcggaaattttgctagcggtgccgatattagtagggacatagctaaggtcgcgaaagaagttcacattgcatctagagcgagtgaatttgatacatacgaaaagcttcccgtgcctcggaacaatctatggattcattcggaagtaaaacagacaaattttattttatttaaccataattttgattttaatttatactcgtggaatttaattttaaaggtaattatcgaatgatagtattaaaatgttttcctttttgatatgttgaagatagacacggcatatgaagatgggtccattgttttcaaaaacgggaaggtggtatatgctgatagcattgtgtattgcactgggtatattcgtagttttcagtatttttatgctcatagttaccaaaattaataatgtgaaatgtactactgatttaccatatatttcggtctatgtgtgtagatataaatatcgcttcacattccttgaaaccaatggctatatgaacattgatgaaaaccgcgtagaacatctatacaagcatgtatttccacctgcgctttctcctggtctttcattcgttggtttaccatcgatggttagtctcaaacaatatcttggggttccgagttcaagtctcacttggtttttatctttatcttttttttatcagggcatacaatttgttatgtttgaaatccaaagcaaatgggtggcagcagtcttgtcaaggcgggttacacttcccacagaagataagatgatggaagatattagtgcgtggtatgcatcgcttgatgcggtaggcattcctaaaagatatacacataaattgggtaaaattcaggtgagtaccttatattctgaatatgattacatgcctatatctaaataaattcgattagttcaaaatcattttttcacgttttcttgtgaatttttttttttgaaacataattcacatgttttaattataaaacctctttttgttcaccataaaaagtttctgcaaagaaaaaatgcaaacgtaaggcttttaatttttagatttacaattaacaaagtatttttttttttttgcctaaaattgttgatgaactttttttaaaaaactgaactaatagaaattcaagtaaaatgtaaacaaacaatcaaagaaatattatcgactcaagaataaaatcatgtcaatgactttgtttgaaaaaaatatatttcatcttgcagagtgagtacctcaattgggtcgcagaagaatgtggttgtccgctcgttgaacattggagaaatcaacaaatcgtccgcggataccagagacttgtctcacacccagaaacttatcgcgatgaatgggacgacaatgaccttatggaagaagcttacgaggactttgctaggaagaaattaattagtttccatccttcccatatcctctaatcaagaaaatgatttttgtgtttttactttgggggtgggtgtattgtatttaagaagcataaggaaggatggattctttccttttcagggttgattgctaaactattgaaagctttgaataaataggagggtttatctctaaggcatgatgccctgattgttatttttctttgtgtgtgtttgtttttgtttgcatttgagtttttatttattttgtgcttatgtttgaattttacactgattatgttcaccacgtatagatgcaaatattacttccgtttcttgaaaccaatggatatatgagcattgatgaaagccgtgtagaacatctatacaagcatgtatttttccacccgcgctttcccttggtctttcgttcattggtttaccagcgatggttagtctcaaacaaaatttatatcttgggcatttgagttcaagtctcactaggtttttgatctctattttttttatcagggcatacaatttgttatgtttgaaatccacagcaaatgggtgggaacagtcttggcaggacgggttaaacttccttcacaagataacatgatagaagatatcagtgagtgccactcactgagtggtatgcatcgcttgatgtgttaggccttcctaaaagatatacacataaattttgtaaaatttaggttggtccgatattttttcacgtttctatatatgtagaaaaaaattcagaagataattcacatctaactataaaaccttcttaagtttatcatagaacatttaggctgaaaaaagcaaacggaacgctttgattccgtgtgcgtttaacttttagttacagtaacaatttttttatttatttttaaattgttaagtttgcttaaagttggtaagtacacgactataaaatcaaacaatcaaatgcatattatcgagctatgaataacatcatgtcaatgacttttttttgagaaaatatgttccctttttgcagtgtgagtacatgtattggatagcggaagaatgtaattgttgactcattgaacattggagaaatcaacaaatatccatggataccagagacttgtctccaaacttatcgcgataaatgggacgacaatgatcttagttttgttgcatttctcacctctaacctcattgaggttagttcactctttctttatgtctctccctttatcacactctgtttttgttcttgcttagagaggaacaaaagaaacttttttgtcttttaattgtctacatttttgtattggattagaagataattcttgcaacacctccttacacacacacacttatactagttggtacactcttgcactcacatttgcatacacttgcacccatgcttctacttagacctagaccttacttctagacatcatttacctaaggttcatttacacaagcaaccttaacaactacaacaactactatgcttagtccctagctatgctttagagtttagactaacaacaacactcttactcttttgggcctaacttaactaatagcccaatatttttttactgcaactctgtttcagccatttgggctgctctggctaaaggtttatggaagtctagatacacgacaagttgcccccagattctggctcatgtttcagccccagatcaagatcgtttggaaggtttccttctccgctatgtattccaagccacagtctacacagtctggagagaacgaatggacgacgacatatcgaaccaccgaacacatcggctcaattgatcagttggatagacaaacaagttaaaaatcaaatcacaaccatcagaagcatgggggattagagctcgctcttgattcatttcaaccttttcagcaattagcaagtttttttaatctatctttcgaaaacacgatgcaatagttgtaaaaacgttattttttctttgaatataatttaacattagaatcaaaaaaaaaaaaaaaaactaatacccaatattaacattattacaaaacacaccaagcccaactctttcttcttgttgaattgtgtccttcttatgtgtcgttgaccctttttacacgacacttcttctgcgacttcttcttcgtggagcttcttctcttttcttcatctcttctcactgaagcttccttttatttgtgcaggttcaattaaggaaatcaacttcaacaagttttcatccttcccatttcctcgaaccaagaagatggttttttgtgtttttattttgggggtgtgccggctgattttaagaagcatataaggaagtaaggatgtattctgttctttttaaaggttaattgcataattatatgggactttacatttacttcactgatgtacaaactgatttggtattttggtttgttttctggtcgagcaagtgcatgcaatacttttcttgtgccaagtgcaacaaccatcaaaattcaaagtttctctgccacaacttgaacttgctttaggtgcaactgtgcaagatctactaatctcacgtcacgcctctaccctcaaatctttgcaacttcggttttatagatctgcttctttttgtacgtttctttgattagctgatctccaaattaacgaaataaatggttcggatttgttactccatttacggattacttggcaagaaaatccttaatttttcttcgcttcttcctcctctcattttttttttcttcactttgacaagcaacttattacagagaagatatctacttgtaacatgaatttgactttgaagtgtttgctagctctgagcctctgaggtccgttagttcttagagtcagatcacatgattgatagattcggtgtctctttctgagatttcagcatatatgtttgattctgtctttttataggttgataaatcgattcatgacccactggaataatgagaaggcttttaggtatgattacgttgaaaaaatcccgctttcactctttgaaagatagctgagccgagatggccagattaaaggtcatgaagttcactgtttcagactatgaagggaggttaggagtttcacaagataactagagaaaattccaactgcaacttgtctcaagaaggaaatgtaattatagataaacgaaagaaagaacagaggaaaagaacagtgatgttgggtaggaaaacaggtgaatgactttcaacgtgcctgaactaaaatgaaaattttcccccataaaatacatagcatcgtaccaattaacgtaacgatcctttcaccctttgtatttctgtgtctagtagttgaagaaatgttggttgaattcagtttggtttctctatggtccatacgtagaacatcaactaaaatcataaagctaattaagaattgtgatatagtgtgatctagcctacgcatctcttgcatgttttgtgtaggacgatttaattgtctctaagaaaacacaactctccttttaaagacacccatatatttcttttaatttatatatatttgaatatatgctcatttaaaaacacttatataaataatcaatgtggatgctctcaaagttttcttgacagattttggtgctaaatttttaaggtacattcctggattttttttcattgttttctattttgtaaattgacttatagagaacttctattgatttttaaaaaaaaatcatagcgcgagtaaatgataacggtaacgatgaaatctaatgagtaatgagaatgaatatgtatacattgatttttgaatttattcgtagtgcgagtaagtgataacggtaagtctgtaacgatgaaatctagtaatgattaatgatttctctttcttatatatatatataaatgaaatcagcgatgtggaactttcgatggatgtaatagtagctttccaaggattgtcttttttttttcttgtccacgaaaatattaactgtagacaattatttgttgtcccatctccaccaagattcctgccttgcaaattccacacgtgttttcactttcttcaccaacctactggatttcactagtttgtctgtaaattaacttgcttgtctacgacagctaaataaataaggaatcgtaaaagactagatttatttaataaagaagttacgtttataacgaaaaaatatttcttagcaaaataagattatcttgtgatgaagtttcatttcaacaaacataagatgaacatgataaaaaaaaaatcataagaataagaacacaaaaagaaatgaaaaaggacctattattaaataaataaactttgacaaaagcaatgcccggagcttaaaaggtcacataaaaattgaaaaatttctaatcacttacacgtcgttcaccgaacacgtggattggaatgagtaataaaattccataaccattagatgaaatgtaacatctgtaatcttgccattaaaatatagtatttatatttggcctgaagctgatgcaacttatacacaaaacctactattattaagatttgacaaaatatggcaccagctcaaaaccaaatcacttctaaacacgtggcagtgatcggagccggaccagccggtctcataacgtctagggagctccgtcgtgaaggtcacagtgtagttgtgtttgaacgggagaaacaagtcggtggtctatgggtttacacacctaaatccgattccgatccacttagccttgaccccacccgatccaaagtccactcgagcatctacgagtctctccgaaccaatgtcccgagagaaagtatgggtgtcagggacttcccgtttttgccacgtttcgatgacgagtcaagagacgcgagacgttatccaaatcatagggaagttcttgcgtatattcaagactttgctagagagtttaaaatagaggagatgatccggttcgagaccgaggtggttcgcgttgaaccggttgacaacgggaactggagggtccagtcgaaaaactccggcgggttcttggaagatgagatctatgacgccgtcgtggtttgcaatggtcactatacagaaccaaatattgctcatattcctggtaaaaatattaatttataaatactcaccttttcttttaataacagtgtaaaagttagttgagaataaccaaaaaatgtgtatccataggtataaaatcgtggccaggaaagcagattcatagccacaactatagagttcctgatccattcgaaaacgaggtaatttttttttcctttgtaaaagaaggtaaagcatatggtctaggttaagaaaactttctacatcattgcgtctatatggaagaactccatctctcagttcttggaagtaaagcattgttcgtatgcatttagaaatttaaattagctctatcagacgcttgggtgataggaggtatgatgcagcttttcaagtttggcttgcagcccaagcttgattaactcgcatctaattgttcggactacaaaatttttgaaaaaatctttaaatttttctctcgataaaccgttccgtcagttgtaaaaatgctattttttctttgaatataatttaacattagattcaaaaaaaagataaaaaattagctctattaaattattaatacgtaaacgtaactgtaagttggtccacaaaattatatatcataattaatttcatttacgatctatattattgtattgatattttgctaggtggtggtggtgataggaaattttgcgagtggtgccgatattagtagggacatagctaaggtcgcaaaagaagtccacattgcgtctagagcaagggaaccccacacatacgagaagatttccgttccccaaaacaatctatggatgcattccgaagtaaaactaaaaactttatttaatcgaacaatgatttggattatatgaacattcacgccatttcatttaaaaccaattataatgttaaaagtctttgattttctcctttgatatgtcgtagatcgacaccacccatgaggatgggtcgattgttttcaaaaacgggaaggtgatatttgctgatagcattgtgtattgcaccgggtatatccatagttttcagtatttattggctcatatatagcaagatttttaatctattgactgacctaatgtttttggtttatgtgtgtaggtacaagtataacttcccatttcttgaaacaaatggctatttgcgcattgatgaaaaacgtgttgaacctctatacaagcatgtctttccaccagcgcttgcccctggacttgctttcgttggtttgccagcaatggttagtatcaattgaactttttctcttggactttcgagttcacgtctcactttattagttttgatctgtgattttctttttaaattcaggggatagtatttgttatgtttgaaatccaaagcaaatgggtggcagcagtcttgtcaggacgagttacacttccctcaacagataagatgatggaagatattaatgcgtggtatgcgtcgcttgatgccttaggtattcccaagagacatactcatacgataggtagaattcaggtaagttcgtcatattccgaataaaactacatgtcctataaatatgtcaaaatagtttcaaacgtagatttctaaaaaaaaaaaatcatgtgaaaaatattaaaacaaaattcacatgttttaataattaaaactttttcatatcatcataaaaaaaaccaagtgcgcttgaatttcggatttacaattactaaatataaatatttttaattaattgcttaaaatatggattttttaaatactttgaatataaaattaaaattacatgtaaacaaacaaccaaatgcatatacatattctttttgttaaagaatcatatgcatattatcgactcaagaagagcatcatgtcaataacttttttaagaaaacttaatctctctaacagagtgagtacctcaattgggtcgcgaaagaatctggttgtgaactcgtagaacgttggagaggtcaagaagttgacggcggatacctgagacttgtggcccatccagaaacttaccgtgatgaatgggacgacgatgaactcatagaagaagcgtacaatgatttttctaggaagaagttgattagtgttgatccttcttattacctcgaaaatggaagatgatctgcgccaatagtgccgacttgtttttcttttctggtaggtgggttgattccaagccttcaataaattgcaaaactattgtaagctttacaatttacaaaaaaaaaaaaaaaaaaaaaaattgtaagctttacagaggagggttaagctatattgtatgcccttgttgttttaaattattttttacatttctgtttggctttttgatcgtttagttttaaatatgtgcttccatttgtatgtgatttgcatttttgagattacgtttatttagtgttccgactagtcatctatcgtaggggaatttttttaatatgaacgcgaaaatcgagactgtagtaattaatttgccatattaatggaccctatacaacacaaaaattattggacacaaaaatctggttctatttatttatttttggaggtttttattttattttctcaactccctgctcttgatttctttttacacccttttttttttcaaacaatagtattgggttcattttagaaaagggaaaaactgatatcccattcacgactttaaagtttaaactcccactgaatccataccattcgactcacgataaaggaaggtgtggccaatatcggctttttagttattcttggtgcggttagtggtgtaacaaaccgtatatttgactttttggactattatatgtgacctttattttgactaatgtctcttttttggtcgaacactaatttcatatatatgtctctttttacaccgttttatagatctctattctaattaccaaatggttagaagatgcagatgtggattaaaagtgattctcttgtagtatgttgttataaacttatactcactcttcttatttttttttatttttttttctcaaacaacttatactcactctaaaaagtgttatttgtcgaacttgtaaaaattggagttctgggcctggctcagcaaatagagtatatgtagatcaatggcccatttcacaaaaacatgatcaaaatcaaggttaaactttaacatccattactagtcgatggatacattctattgcagcaacacattgtgcttagaattcctatttatgacatcacctaaaattattatagcttaatcgattcaaccgagtaaaaagaaatatcaaatagggtgaaattttgcatattacaacacttttaattgcttctgtctgtgaactccatccacatcttccgtctagagtcaacatttgcaatttaaaataagttcaaatatatcaaagaaagtcgacgatataaatgttttggtaaacgatgagccacaaggtttatttatacgactgtataggagcggagcaagtttcgtgtaagcaactttaatatctctatacaacgttatgaagagaattaataatgctatagccggccggtacaggcttacttgcttgttacggaaatagaagtaacgctggcacatttatgctcttgtgcggttgtcgatatttatgtaaattcgaagccatttttatacgtggcatgttgttcgggccttgtttgttgctgacaagatcacaagacaaaaaacgaccagcggcaataatcaggcgtttgattatttgtttcgttatagtcagccactagtgactgcgtttacaaatcttgctttcttttttagaattgatggtttagtgaaaattttgaagatatttttagtgactgaagacaaaagttttagttgttgagaaattttaatgtttaaatttaaattagcgatcagtcactaaaacctatctattgctttcaccagtagttaaaaaatgaagacgacttaaccgctgcaacatatgatgatagtcatgactatttgtgtttgttgcaatgattcacttccaatatggtgacaagtggtaatgggacaatagggttatttatctagtgaattgctactgtactctgttttttttcctttgtaaaagtggtaatgtactatgttaggattcgaatcttcttaatctcagaactaattattagtttagtgacgaaaaaagaaaaattatatagtacattttagaactcttcaacatacaaatgagaattatgaattgacaaataatcggagctatagttttctttgaaggatatatgcatgatcgttcatcgtcaacattgtttgatttatcagattgtcatcttatgatatgccatttgattgtatcaggctatcagcctaaccctcgtttgagagttctattatgtaaatgctaatcaacttttctactaaaaatcaacagttcctcataagattaagagtattagcccatatttttatataatgtcaagatctttgtccaatttccgatgtaagattttgttatttttaatacgctccctcgaaatgatggttttctaactattaatctttgtatttcggccaaagaacaacgaataaaattgggtcgagtcgattgaagatccgactggacaacttataaatcaggctctgatactatattagaatatgagcttccaactcaaaactaattagcaatgaatgaattggatttcatatcttttatattctatgaaagcttattctacaccttgttcagccggatccataatcggtctgacccaatttggtcaaccgatctttgttccaatatcaaaatcaatggctaaaaaaccatcatcttaatggaacatataaagataacaatattccacatcaaaaattggacaaaaagttatgatagtatataatagatatagaccaatacactccttgtgttgctctccaacaaaaatgccacaccatcggtatggtgcaagtaattattggtttatctttcgttagtctaggcctgagtcacggcgtatattcggggattgttcttatcaaagtgataacaaaacttttgttgattttgaggaaataaatagaaacatttatggacctcgaccgtttggttaattgatagatgaaatggtttacattaaattatcaatgttttatttttccaacataacatcataatatatatacacatacatatatatatggtcaaaattgtaataaaatatttatagtatatttttttgcaagtttaatttaatctaccatcatcatccacactaaaaagaggaaaaacaatctctcttgggtgcataatagtttgctgtatgttaatattaaagatatcctttggtttaaaagtaattacaaaaaagaaaaacatacatatccatcttgtaagaatttttttgatgtacaactaaccaaagatttaatgatgcaatctaatatagtgattaagaagtaaaaggaaataaattaactgaaaaaatctaatttatatagaaatgtggccctaaatttattaagttttacgaggcctttaacgtagaacacatgaagcattactttaattttggatagtcatgcaactacgttgattactttggataacacatgaagcacggtaacacatgaagcacggttcttgttgtatttctattaactattaaaaaaaaaaatctgaaagtatataaatattgcccttaatttattaaaactttaagaggcctaggaaaattgcccttatgataacacatgaaacacgagttacttggttcattttcataactactctttcaaatttgttattggtgaaaatactagaatcgtaaaacgtatggattattttacattagttgtgttgaaacaacaaccaaaactcacattttgaagattccctcgttgtcgcctaatatattttgggcaaaatatccattccatgtcggcaacgtgtgccctactagttaacaacacttggcgtttgatccattccatgtcggcgtgagagatggtgagatggcgaaagctgatacgttgatcaatagtattattttaaagtacgtatacagatatactgttttaaagagttagtttcgtggtgatacagactgacaggtacgttaagttcgacttaacgtaataacaaataaaaagaataacaggttgttttgtttggtctacaagactacaagactacaagactacaagtctacaacgaacaagactttttataacataagtaagactttaaagtaatcaacatagatgcctaagatgatttgatttacttggccgtcttactagtcactggttagtggttacccagtttcttaaaaaaaatgttattattctgattaattaagcagatattttttttttcttttttaatagatatacagataaacgcatttatcatatttcataataaagtaaaaacgattatgatcggacatacaagcgaagtaagtaagtgtgattattaacaaacaaagagttgattgaaaattcaattgtggctgtaaataatatgtcagtataaaacatatcaatttttaactcattatttttaagggttaatatgttaagtgatcaaaacaaataatttaatatttcttattgatcgataaattaacccttactatttttagaattttttactttttattttcaaatctaataatcataggaaaaaaaaataacacacaaaacaacaaaaaatttccaaacatagatcgactaaagaaatttccccctcataaatttcttccgcatgtacttgataattacagcttttattctttaaaaccattttggcatttttgaatggctacttaagtgtggtatcttccgttccaccttatataactgtcttgcttcgtgctccattcatttcatagtgtacttattccataaagatgactttacacttaattcttatcatagttaataagcacttaattctttttctaatgtgtcatgaacacatgtgcacggtaattcgataaagccagtatgctaaagtgtaaaggcacttgtctattcttaagcaataaatcactgaaaacaatatttatcggacaaaaaatcagatgtaatagatcatttatgtttaaatcagtcaaattcaagcatattaaagggtgaagttttatgaagaaaaaattcaactaaaaaaacaaaatgacacttacacagttacactgacataactaaccaaatctaaaatttataaatttgtcacatcgtttaatcgttatctgtagctttattgccttttatctatgtcatctacatagatggagtagtaagctgagaagagaaggagaaatttaaggtcaaagttacccatcttccgacatgcacgtggacggccgaaagttcacgagaatcttagattattccacagtgacacatgtcggcctttgcgtgaggaagttttttggtctctaatttttttttttttgaaatataaaaggagataaaaataaatacgtaattaattatacattttaatattaccgttaaattattcgttataatctcctatattgaaatttgaaaacaaaactttattaactataagcatgataaatatataaccgtttatgataattctgatagtatacgtagtttttttttttttttttggtgagattgtttatgaaattagcaaggtttgacctatcatcaaaccttttacctcatgcaactaattaatgggtgatttcttttttcaaaattgtttttaataataataactaattagtaattagtgggtattttaaataccattatgccatttagctaaggtaaaaaatcaattgttaattataacacccaccaccaacatagattcgtctatggttcattcatcgtgtttaagagttgaaagaaataaattcgcccatcgtgaataatagatatttattcatctcaaacttataactcaaatatatttcaactatatatcgatcaaatagtatagcttttggttaatgacgaatttttattcttttgatccataattcttcttcttcttttttttctgtccggatacatgaaattgatgatacacatttaaaacaacaattcgaatcagggaacaaattacagccacaaccagtgatgatagaccatatatatgatttagtttatttaataaataatgtgtaagcaaatttggctttgctgtaaaaaaagaacacgaattttggcaaaagtttctgttaggaatctggttctattctcctctgcaacctccagtctctcatgaatctggttcggattctctttttccttgtttctatataatttagatacatggttttataattctatcatatgtctattttggatatagtattttaaaaatatatatatttttcataaatggttatggtctattctatgttaatgataatcattagtctttttgtcaactatgtttttttttccaacaaatttagtatgtaaacttttttttactaccgttttattaaatcgacggttgatcagatcaactccggtataacacaacataagtttcgttatcaaaacaaaaacaaaaacagatttttttttgtcaactaccagtgaagattagtcttacgtgtcaagaaaccggataaaaatatataacgtatttgggcaatcagctaagatattaactaacgcggagttcattattaaaatggagtaatgatgttttcagttttctatataaatcacgtcgagaccgtagagtcttacacaacaatccttcttacatttctaccaacaaaacacaaaacacaaacatagcattcaaaactttgaaaaatggcaccagctcctagtccaatcaattctcaacacgtggcggtgatcggagccggagcagccggtttagtagcagccagagagcttcgtcgtgaaggtcacaccgtcgttgtccttgaccgagagaaacaagtaggtggtctttgggtttacacacctgaaaccgagtccgacgagcttggtcttgacccgacccgacccatagtccactcgagcgtctacaagtctctccgaaccaatctccctagagaatgtatgggttacaaggatttccctttcgtgccacgtggcgatgatccgtcaagagactctagaaggtatccgagtcacagggaagttcttgcgtaccttcaagactttgctacagagtttaacatagaggagatgatccggttcgagactgaggttcttcgtgttgaaccggttaatggtaaatggagggtccagtctaaaaccggcggcggtttttccaacgatgagatctatgacgccgttgtaatgtgttgtggacatttcgcagaaccaaacatcgctcaaattcctggtaaaatatcaaaattttcttatactttatttcaaaaaaaactattggtaattttttttcgaaattcgtaataattttgtgtgtgtatatgtggttttgacatgtgaataattgtataggaattgagtcatggccggggaggcaaacacacagccacagttatcgagttcctgatccattcaaagatgaggtattttcataatctacgatacttttttaatactaaaattgactttattattgacagctataatctttcactacattaacctaacgtacggaccaagtctcaattttatagaaaacaaaacgatgatacaacacgtaacttttactcattttattaaatcaacattttagacttttaagttaattaaaatatagttaacgttgggatacgtgttgagagaagaaacgtatacatctatgaaaaaaaattaatgaaagatgagttaatgatggtgacgaaattcttgttagttgttacgctttctagtttatgttctcttttctttattcgattcctaatgctttttttcagtgaataaaaaactccatttcattgtggaccgcagaaaataatatctcaaaatttgatatagtataaactatgtcggtatagtcagatcttctagagagttgtggtatccacaaacaaagaatacaatcgcagattcgcaaaacacttttcattaaatagtaattaataatcacatatagtactctttaaaatgtataaaagtcacttttggtttaacccatgtgggagggattaaatggaatagattaatttgctttgatacatctttaactgtataataataaaccaaacgttgactaaaccatacattaatttgcaggtggtggtagtaatcgggaattttgcgagtggagccgatatcagtagagacatatctaaagtcgcaaaagaagttcatatcgcatctagagcaagtaaatccaacactttcgaaaaacgtcctgtacctaataacaatctctggatgcactctgaggtaaaaactattttcttataatggttaatcttgataagaaaaaattcgaaacaaattataaaattcttgcttctattaattattttatttttttgatatcttgcagatagacaccgcccacgaggatggtaccattgtttttaaaaatgggaaggtggtacatgctgataccattgtccattgtaccgggtatttaacaattctcaatttttttattttccgttacacaacggaaattaacatactaaaatgttcggtttactaatttttttttttaatatgtgaaggtacaagtattactttccatttcttgagaccaataattatatgagagttgatgacaatcgcgttgaacctctctacaagcatatttttccacctgcgctagctcccggactttctttcattggtttacctgcaatggttagttagtttcaatcgattaaaattttccgaagttttgagtgattcaactcttcttgatttttagaaaactcatcaatttcttggtttgatattgttataaccagggtctacaattctatatgtttgaagtccaaagcaaatgggttgctgcagtcttgtctggacgagttacacttccttcggtagatgaaatgatggacgatcttaagttgtcgtatgaaacacaagaagcgttaggtattcccaaaagatatacacataagttgggtaaatctcaggtacgacattttttagttacgaatatgctatggtaatatatatcaacttgaaaaagaatatagtttcaataataaattttgtgtcttttagtgtgagtacctcgattggatcgcagacctgtgtggattcccacatgttgaacattggagagatcaagaagtaactcgcggttaccagagacttggtaatcaaccagaaactttccgtgatgaatgggatgatgatgatctcatggaagaagcatacgaagattttgctagactaaatctgatcaattttcatccttctcgttttctcgaatccggaagatgaagtttgactacgattgtaattgtgtctacttgtttggatttaaagtacattgcattataaaaataatgtgtgagtaaatagtttataagagtgtgaaggtcttcttggctagggttacatgttgttcgatctccggaattagcttcatggtgtctagaaacttttgttttttagaccaatatgttaagaataaaagtatgtagttaattcccgtaagtttttatgaatccctggttcattgtgcaaatgtttttttttttgttattgttctgttaatatcaaagagtgtccttaaatgtatgcataattccctctttttggctttttgattcttttattggaagcatataagttagccaattgactttttcttacaataagaatttgaccgttcctcacatggttctgcatcaagtagattatactagagatcaggccccgcttagagggagtgctcgtccacatttttttccaaatgattttaagctcctaagtttttgatatttttgtaataaaggtcctaaattttaatattctgatgatgagactgtaattagatcaagtatagtgataaaggccacgattgttcaaatgaaaattttgcatttaacgtttgtgtagaattataaaataatctcagttttctttatacaattttcaggatgctaacgtaaatgaaaaaataataataaggaaaaaaatgtaaaggccacgactgctttttttttttttttttttgcttaaaattttacaagttcttatagaattgtatggtttttatctaccttatactccaatatatgggtcaattttgggttgttcacatattgccaaatctagctgcaaagctcgttatctcgaaattcacgaagcagaaatattgtgattggtcccaatcggcgaaagtgaagataagagtacttcgacaattgaaacaccggaaaaaagagcaaaatcatgtacgtaacttcaggattttgtctcttttgttatttattttttttggtttttccttttgtgggcaaacaagatattgtcttatattacaaccatggttcaatttgagacgtcagattgcagtgatcaaagtgaacttgctaacttcaatagagattctttctttttccatgattggcgactgcgtctcatatcatttatcactcttgtcatgtgagactgacacactcattgttcacttttgctgcgtcataaatcttttaattattaacttacaaaatatctcttaacaatttgaaatcattcaaaaacaagagtgatttgaatcaaactcttaatccaataaacgctaaaactctataacactgctgtatttattacaggacaaattttccttgaaaataagtaggacaatgattacgcagtagttaagtgaaaatgaacacgacaggtacgttgtgtttctccttatataattaacacatcgacatcatctccacaaagtctatatgaccaaaagatttgaaaacacttaaaaaatcacatattaattaacatgacacaaaaatcccattacatatcctaactaattatggtaccagcagtaaatcctcctaccacatccaaccacgtggcagtaatcggtgctggagcagccggactcgtggctgctcgagagctccgccgtgagggccactctgtcgttgttttcgaacgtgggaaccacatcggaggcgtgtgggcttacacgccaaacgttgaacccgacccccttagcatcgacccgacccgacccgtaatccattcgagcctctacagttctctccgaaccatcatcccacaagaatgcatgggtttcactgatttcccgttttcgaccagactcgaaaacgggtctagagatccgagaagacatccaggtcatagtgaggttcttgcttacctgagagactttgtgagggagttcaagattgaggagatgattcgtttcgagacggaggttgtgagggttgagcaggcgggggaaaatcccaaaaagtggagagtcaagtctagaaatttcggtgatatctccgacgagatttatgacgccgtagttgtttgtaacggtcactatacagagcctcgtcatgctctaatacctggtaataaaattaaccactcattttccatcggtcttggtttttttttttttcttatttttttcattaaaatcctactatattatttgagaagtatattttaaatataatcttattttttgtaagtaattacatagctatgccattagaaataaaattttaaaaagtaaattaattcatttctttaaaaattaaaaagtcaaatactaatttaattaattaaatttaactcaaaaacgaaatacattattaaattttttttactgagtattgtgtcataatttgaatatttatattcaatttcatacatattattttaaaatttataatcttatatactacaataattaataacatattagattttttaatgtgtatgatgtgattcaatttttaatacaagatagaaaatcctagaattgacgggtttaaatcaatattaatacaagatggtatactacaggtgaaactctaaaattaacaatcaaaatacaagtatataattttaaacactaaacaatataaataatatcaacaaaacatatacaactcgcagtttactatacatttaaaatcaaataaaattatatcatatatttataatcaactttacaataaaagtttttagtttaactaaaatataagcctacctgctgtataatgcaagttaaaattataaataagcagattaccatcacgatggatgtaccttctcacatacacacctatcaaaaacttaaaacttttcaaaacctcttggtatattcaaattaggattcttcattcatggaatcattattccaagggttttgggatgtcttatgaaatgattttggcagaagaagatgtaaatttttttgaataaaaagtagtcagcaaaacatatgttttattgggattttttagataattaaatcagagaatagggctgggcatatgagtaacccattggagttcgggtagaacccgttcgggtttgggattaatgggtatatgatttactacctaatagaataattctaaatattcggttcgggtcgggtccagttgggtttgggtcagtttggataaaaaattttaggccctaaaaatactcaaaaaaatagaaacgggtattttgtatgtagatagtgcgtctccaaacaaaaaaaacttttaaatttattaagttttaataaatttaattatatttgaatatattttactaaattttgacaaatataacaaataattttgacaaacatagcaaacataacaaagtatacaatttaatttatacaaaatattaatgcccgtgctgtatagcacgggttatgatctagttgcttcataaaccagaaaccattaaattgtaaaacagagtaattttaatgttatttaaacataacagataattagttcctaattaacctgctaataattttttaaaaaaacaaaccacttcatttttatccctgtaataacataatctcttaattgttattaaaacagagtaattttattgttatgtaatctgattttttattttaatcctaagtaaccaacttactccccaaaatattctaaaggtttataaatctgaattatagtttaaatatttctgttcaagataacacctatgaatattttctctgcatgacatactctgttcgttggaaacttgtaatgcaaaatatgaaaaagatcgttaaaaataaaataaagtataaataaggcaaggtgagtttccatgtaaataagttcaagaatcctctcctctgaaacaaaactaatgtaaaatactttaatttgttccttttaggcatagatacatggccaggaaagcaaatccacagccacaattatcgagttccagaacaagttaaagatcaggtaaacacaaaaaaacaaaaatcagatctcatgatcattatatgaatctgtaatgaagtttgattttattaggtggtggtggtgattggaagctcagtgagcggagtcgatataagcagagacatagcaaatgttacaaaagaagtccatatatcttcaagatcaactaaaccggaaacatacgaaaaacttcccggttacgacaacttatggcttcactctaatgtaagaatcaaattcatcatcaaccttatttatttgatcaaatcaaatccagaagattacttcttatctacatgcattgcagattgaaactgtccgagaagatggttcggtggtgtttaagaacggaaagacggtttacgcggataccattatgcattgcaccgggtgattgttcaactcataatacataatgattctgtatttgaaacatattagtgagactttttatatgattaggtacaaatattacttcccatttctcgacacgaaaggcgaagtgaccgttgaggataaccgtgttggaccattatataagcatgttttcccaccagctctttctcccggactttcattcattggattaccatggcaggttaatgatttttacaattgtgattagaatatgaagttacaaactcttgatgtcaatgaacttattggtcaatgtttcggatatttattggtcattccttttccaatgtttgaactccaaagcaaatgggtagccgcggttttggcaggtagggtttcactcccctcacaagaagagatggaagatactaagatgttttatttgaagctcgaagcctcatgtattcccaaaagatacacacatcttatggcagaattagattctcaggttcgtactgtatttctttccataacatgtatgaaaacattatccaaatagaaagcatacattaatttgaatgagtttttttggttacagtttgtatacaataactggcttgctgatcaatgtgactatcctcggatcgagaaatggagagagcaaatgttttacaaggtgttcaagagaatacaatcccaagccagtacatataaggacgattgggacgatgatcacctcatcgcagaagcatatgaagatttcgtcaaattcccatctaactatcccagttctttaatcgaaagagaatatacaagctgaaaaacatcacttgaagtctctgaaatgagggtatgtgggtttattacatgcgaaataatgcatattgtattgtaaacatcacttaaggtctctgaaatgttggaaacttacatgtaacaacattacttgaagtctgaaatgttcatgataggagcgagcttcttgtctttgaaggctattcttgtctcaacaagacaacaagtgattgcatcaacttctgtaacctagcaagaaaataacaaatagaattagtcatacagtattttatagtgaccagacattaccacaacgcgtcattagagtaaaagcaaaaaacgttaattcaactcacagcttttaccctcaaggatgatgcaagtgttttaagaaagcatatcgaggaagcttttgtctaatctcccatcatgcaacatattagcgaccaagccaatggttgaagcatctccaacaaacctgcaactcctcatttctctgatgagttcagctgatgctgctttgtcaccatctctcagatgtgccctgataagtgtattatatgtaccactatttggaagaggcccgtcttctttcattttttttagcaaggcataagcttcctgtaataggcgtttactacacaagcctgagatcatggtattgtaggttacaacattaggcttcactcctttaaggctgaggctacaaaatagatcccacccatcatccaccttcccagccttgcacatcccttcaatcatagtagtatatatgtaaatatcaagttttatctcactcttttgcatatagtcgaaaacctccaatgctttctctagcttcccgttattacagagtccatctaacaaaatgctgtatgtcattatatcaggaggtacaccatcagaaaccatctgtttgaaaaccttttgggcattatcacagtcgccatcatgaaaaagcccttggataagagtggtgtaagtgactgtatcgccaaccaatcctctatgagacatctcgcggaagagttccgtaccatcttctactctcttagacttgcaaaatccctttatgagagtattatatgtaactacatctgggaaacagtccttgctaaccatgaactcaaacatctgcttggccttgtctagacgatcatgcatacagaacccgttgaccaatgaattgtaagtgaaaatatcaggatctatagaccttttgatcatgtcatcgtacaatttctcagcctctacaaactttccttctttcacaaacgcatcgatcaatgcattgaacgtgactaaattagggttgattttcttctcaatcatatcactcagtagttgagaggcatcactccatcttccataactacaaaggcaacttatgagggagctgtaggtaacaacatttggtctaattcctttggtttccatttctttgaataggttgagcgcatcatccacatgtctatatttgcagagactatcaatgattgtgttgaagataacaacatccgcctctattttcgcagcttccatcttgttgagcagatttaaagccaaatcagtatcacctctcttacataatccatttactaccactccataagtaaccagatttggttgacagcctctttgaaccattcgatcaactaacgccacagcttcagaagctttgttgtggagaaaaagcccatgaatcaaagttgtaaatgtgattgtgtcaggtctataccccatttccaccatttgatcaaccaaagctacagcatctgaaatcctcttaccgtgacagtatccattgagaagagaagaaagcgtgacaatgctgggctcatagccgagtttcatcatcttgccaagaagagctaaagcaagagagatttgagagcgtcggcagaaacagttgatcaaaatattgtaagtatatagaccatgtacaatttctaacctctgcatcttctcacctagagagatgacaacatcaaactttttcatcttagcaatggcactcaacagtttattgaactcaacaatggaaggtaaaggacgagacttgaccatgccaccgaacaaaccaattgcatcatctaacttcatatcatgtaacccatttctcaatatctctctgtaatcaccactgccactagaaaaagctcgtccccagtaacacatcccgcaaagatcaatggaagaaggagcaattcgaggattacctttcccctgaagattccgatgaacaattctactcgtcgtcgatgaaactacactcgaaatcgagatcctcatcttctcgatttggcttcagctgattctcaatctcactctcactcctctctgcaaatcgcaaaccctacacggagagatagatatgtaaaccggtagaattctggtttagaactgattaccaaaccggtttactaacgattgaatttcgaagcgggccaaaactgttttgggacttccactaccctctagataaaacgcagcgtttaaacaatttctcaggaatttgtttttgtttttttaacattgtgtcgtggtgtgtgtggttcatgagtttttgggccacatatttataaagaggccgtagtatattcaccatcgttaacgaatctcgtaaaaaaacccaatggcgccttccttatcaccaatcagatcacaccacgtggcagttatcggcgccggagccgccggattagtcgcggcgcgagagcttcgtcgggaaggtcactcggtggtcgtcttcgagagacaaaaacaagtcggaggaacctggatttacaccgatcatattgaacccgatccattaagcgttgacccgacccgatccgttgttcattcgagcgtctatggatctctccgaactaatctcccccgtgagtgtatgggatacagggacttcccgttcgtgattcgttccgatgtatcggaatctagagatccgaggaggtttccgagtcatggtgaagttttggcgtatttgcaagatttcgctaaggagtttgcgattgaggagatgattcggtttgatacggcggttgtgaaggttgctccggcggcggaagaaggaagcgggaaatggagaattgaatctacggagaaagagaagaaagttcttcgtgatgagatttatgatgctgttgttgtttgtaatggacattacattgaacctcgtcacgctgaaattcctggtaatctccgttgattcatcgagtttccataggaacagtgagaagtgtgattgtgattttgttattggaaacttttaggtataagttcttggccagggaaggagatgcatagtcataattatcgtatacctgaaccgtttagagatcaggtactcatttcgaaagatgataatgttacctgctttggtgtgatgttatgtggaaagatcatgttgcattggtttaggttgttgtgcttatagggaactctgcaagtgctgatgatataagtagggatattgctagagttgccaaagaggttcatgtggcttgtaggtccaatgctgctgatacgtatattgagcggcctggttacagtaatctatggatgcattcgatggtgagttagccagctcctaaatagtacttaccgcaattcgttgatcaggaggagaaccaattttatgttttcttcgatgtcacgcagattgagagtgtccatgaggatggttctgtagtttttcagaatgggaaaacgatttcggttgatgttattatgcattgcactgggtattcattctctctttcgttttcgttttgagttttctggttttctgtttaaaagtgtgcttgtttaacaaagctctgtacttatcgtaggtataagtatcacttcccgtttcttgaaaccaatggaaatgttactgtagacgataaccgtgtcgggccattgtacaaagacgtattctctccagcctttgcgccgtggctctccttcgttgggataccatggaaggtatacagctctaaattgctctgaatcagtttcatatgtttcctttagctttttaagctgttgaaataatctgtaacaaattcatttttcaggttgtaccttttcctatgtttgaactgcaaagcaagtggatcgctggtgttttgtcgggtcggataccgctgccttcaaaggaagatatgatgatggaaatcaaaaccttatactcaacacttgatgcccaagggattgcaaagcgatatactcaccaaatgggcatttctcaagtatgaattctctttaacttatgtttccacttctgataaaccaagagcaaacagaaacatattatcaacatttttgttgtttcgcagtttgagtacaatagttggttggcttcacaatgcggttgctcagaaacagaggaatggaggaaagagatgtattttgcaacgggcgtgaagaagagagcccatccagagacgtatagagacgaatgggatgatcatcacttagtttctcaagcttatcaagatttctctttgtacacataaacaaaaaaacatatctgagaaagtaaattcaatgttaatgccagtactgccatttattggaaaagacatcattcttatcacggtgtatgtacaagcacagaagattttgactaagattttcaaagagaagaaaaaatgggcacaccggggagtgtagctccggaatcgactatgtatgtattcccggtgacatattgggaagaatcgtgaatgagatagcgaacgagagatgtaagccccggatccacagtctgttgcatctttaatggtacaatcttttccgttaccttctcgagccactctttctggaaaagaccttgtgtgatctctgacctgaaaatcccaggtgcgatcgagttcactctgatcttataaacagctaactcaatagccatcatcctcgtcatggtgtcaacaccacctttggaacaagcatacgctagtccaccgcgcaacaaaccgcgatgaagcccagagatcgacgagacgttaatcaccgagcccccacgcttagcgtcacgcatcaaaaggcagacgtatttggatattaaccaagatccggtcaagttggttctaaagactttgtcccattcttcttttgataaatccaaactagacttgacattgcctctgattccagcattgttaatcaaaacatcgatcgttccaaagatttcccaagcttctttaaccgcttttcgaatagtgtctgcgtctgatgaaacgtctagctcaagagctgcggcttggactccgattgcaccaaagctgttgatttcagaacagagagagttgagacgatcaacacgacgagctgctgctacaatcttacaaccagctttgcatagatcaagacagatctctctccctataccagatgaagcacctgtcacaagaaccactttatctttaagttcacaccatggctccaattgcttcaatacctgcttctgtccacaaaaaaaacaaacaatcatcaagaaagtggaagggcaaaatggtaaatgagagaaaagaaatctcacagtttgatgattgctcatattgattgatgtttcactgtctcggtggagaagaaatacaatgacacaagttatataataaaagcatttctctctatcaaccaaaacgtggcaatctacgtctgtaataacagattcgtgtaagtttctaacacaccaaattgattattaaaaacattgtaatcataaattgtaacaactgtgtgtgattgtgattcatagattctaatcaaagaacacacaaatggcacctgcattatcaccaaccagatcacaccacgtggcggttatcggtgctggacctgcaggtctagtagcggcacgagagcttcgacgagaaggtcactcggtggtcgttttcgagaaacaaaaacaagtcggaggaacctggatctacaccgatgaagtcgaatcggatccgttaagtgttgacccgacccgatccgttgttcattcaagcgtctatagatctctacgaatcaacggtacacgagagtgtaccggatacagagatttcccgttcgtggttcgttccggtgtgtctagagatccgaggaggtttccgagtcatggcgaagttttggcgtatttgaaagatttcgctaaggagtttgggattgaggagatggttaggtttgagacggaggttgtgaaggtttctccggcggcggaggaaggaatcgggaagtggaggattgaatcgacggagaaagagaagaaagttcgtcgtgatgagatttatgatgctgttgttgtttgtaatggacattatgttgaacctcgtctcgctcaaattcctggtaatatagtactagtagattagtagtaaattaatattttttgaaagtatgaaataaattaaaacatttctattttatgttaaaaatttatttttagctattctcaaaatttgttagatatttatatttttgttgttgttttttagtagatatttctttttgattcaaattgaaaattcgtatacattaaaagaaatttgaatggtcaaattatcttatttaccaaaaggttgttgaatattaaacaattaaaaaaaaaaacattttcgttgcatattattaataatttcaaatgataaaatttaatattttggttaaaaagattgagtaaaaaaaattttgaaaaaaaagagaggaatttggtattggaatttcatgaaagtcaagactaataaatgagaagtgtgactgtgttttaatcttggaaacttttaggtataagttcttggccagggaaagaaatgcatagccataattaccgtattcccgaaccattcagagataaggtacttgttttcattgatgataatgtttaatataattccttgcataattggattgtgctggcaacgattaggttgttgtgcttattgggaactcttcaagtgctgaggatataagtagggacattgctagagttgcaaaagaggttcatgtggcttgtaggtcaaatccagctgatacgtttatcaaacaaaccggttataataatctatggacgcattcaatggtgggttaactttagctcctaagtaatactcgacgtaaagaaacaattttatgttttcttaaatgtcatgcagattgagagtgttcatgaggatggctctgttgtttatcagaacgggaagacgatttcggttgatattattatgcattgcactgggtatacattctttctttagtttagtttctgtttagtttctcatatatcatgcatggtgtggttatttgacaaagcgctttacttttcgtaggtataagtatcattttccgtttcttgataccaatggaattgtcactgtagatgataaccgtgttgggccattgtacaaagacgtcttccctccagcatttgcaccttggctttccttcatcggtataccatggcaggttacatacctataaatagctctttttcacgtttcccctcaacattttaagtcataacaaatcggatttcaggtgttaccgttccctatgtttgagctgcaaagcaagtggatcgcgggtgttttatcgggtcggatcccgcttccttccaaggaagatatgatgatagaaatcaaaaccttttactccacacttgaagtccaagggattccaaagcgatatactcatcgtatgggcaatactcaggtttaaaatcccaagtttccgcacataaaaataaaataaaataaaccaaagctaaacagaaacacatcaatgacattttttgttgtttgcagtttgagtattataattggttggcttcacaatgcggatgctcagaaacagaggaatggaggaaagagatgtgtttggcgaatggtgttaggaaggaagcccatccagagacgtatagagacgaatgggatgatcatcacttagtttctgaagcttatcaagatttctctttgtactcataaacaaaacattttatacatgaaagtaaatttaccgaatttgtaaatgccaatactgccattcaatgtaaaagacatattgtaaaacattaggcgcaccaggcaatgtagctctggcgtctacaatgtatgtatcccacggtctattacatcttcagaaactacaatggtctgcttctcgctgtcggtggtgttatatcatcgtcgctggcactggcaaatactatgactctcatagcgaagattacaaaacaaaatttaagaaaaattttcaatgttcgagatcaagacgacaatagactcgtattttaggtctcagaagaactgctctgatgaatgataccatttgaaacttgactcgattataaagaatgttgaatgttctgtgtttttgatagatggttttacaacgtatacacaaaggtaaactactcaaaggcctagacaagacttgccgaacaagtataacgtacaacacaatccaatgcagcctactaatgataatccattgatttgactgtttgagagataagagatactgtactgtagttcttttcttaataaggctttcaccaccaaagtaactaaattttttgatgattttgcaatttcagtatccgacgttttcgaagctaaaagatttttctcttttacttttcgaaacaatcgaaaacaaagctatcagtggttttactttgctttttttccaatgaaattctattccgacttttgatatttaagttttttacaaatgtaagaggaaaattaatttaacgtcaggtcattcggccactaagccaatggagacttagtaaatagtgtggcccagcagaggtcaatagccgctacgatttaccaaattgagaaggtcgttatgcttctcaaccatgcaaagtatctcatattttggactcactcgaacgagagaatttgatcttatttcgagtggactaaaacgtaagtcttatcttcaataattatttgcatcgtctctagtacgtttgctcagattactaaatttcaaatttcagatctctcactttctgtaaaatgggtatttctttctcgataccctttgatccgtgtgtaaataaagtctctcaatggctagacatgaaaggaagttatactcacaatctcgagaagaatcttgtggctctcgagacaaccatggaagagctcaaggccaagcgggatgatttattaagaaggctcaaaagagaggaggatagaggtctacaaaggctttccgaattccaggtatggcttaatagagttgcaactgtcgaagacataattattactcttcttagagatagagatgttgaaattcaaaggctgtgtctttgccggttttgctctaagaatttaacgacgagctatcgttatgggaaaagtgttttcttgaggttgagggaggttgagaaactcaaaggtgaagtttttggagtgataaccgagcaagcttcaacatctgcgtttgaggaacgacctcttcagccgacaattgttggtcaaaagaaaatgcttgataaggcatggaaacatctcatggaagatggaactggtattatgggtatgtacggtatgggcggtgtagggaagacaacacttctcactcagctcttcaatatgttcaataaggataagtgtggatttgatattggcatttgggttgtcgtgtctcaagaggttaatgtggagaagattcaagatgaaatcgctcaaaagcttggtcttggtggacatgagtggacacagagagatataagtcaaaagggcgttcatttattcaatttcttgaagaacaagaaatttgtgttgtttttagatgacttatgggataaggtggagttagctaatatcggtgttccggatccaagaacacaaaaaggatgtaaattggcattcaccagtcggtccctaaatgtatgcacaagcatgggggatgaagaaccaatggaagttcaatgcttggaagagaatgtggcatttgatttgttccaaaagaaggttggacaaaaaacacttggaagcgatccggggatcccccaacttgcaagaatagttgcgaaaaaatgttgtggcctaccattggccctcaacgtcataggcgagaccatgtcatgcaaaaggacgatacaagaatggcgtaacgctatacatgttttgaattcatacgctgcagagtttataggcatggaggataagattcttccgcttttgaagtatagctacgataaccttaagggggagcatgtcaaatcgagtttgttgtattgtgctttatatccagaagatgctaaaattcggaaagaagatttgatagagcattggatatgcgaggaaattatagatggaagtgaaggtatagaaaaggctgaggacaagggttatgacatcattggtagtcttgttcgtgcatcactgttgatggagtgtgttgatttgaaaggaaaatctagtgtgattatgcatgatgttgttcgtgaaatggcattatggatcgcttccgaactgggaatacaaaaagaagcctttattgtgcgtgcaggtgttggcgtacgtgaaattccaaaggttaagaattggaatgttgtgagaaggatgtcattgatggggaacaagattcatcatctcgttggtagttatgaatgtatggaactcacaactttgctcctgggagagggagaatatggaagtatttggagatggagtgaaataaaaacgatctcgagtgaattcttcaattgcatgccaaagctagctgttttggatctatcgcataatcaaagtctctttgaattgccggaagaaatatcaaatctagtttctttgaaatatctcaacttgtcacatactgggatacgtcatttgtctaagggtatacaagagttgaagaaaataattcacttgaatttggagcatacaagtaagcttgagagtattgatgggatatcaagtctgcataacttgaaagttctgaaattatatggttctagattaccatgggatctcaacacagtgaaggagctggaaactttggaacatttagaaattttaaccacaactatcgatccaagagcgaagcagtttttgagctcccataggttgatgagtcgttcacgattgctacagatctttggatctaatatattctcaccggatagacaactagaatcactttcagtatctacggacaagcttcgtgaatttgaaattatgtgctgcagtatctctgagataaagatgggagggatatgcaacttcttgagcctcgtagatgtgactatatacaattgtgaaggcttgagggaattgacgtttctgatctttgctccaaagcttagatctctttctgttgtggatgcaaaagacctagaagatataataaacgaagagaaagcttgtgaaggtgaagattcagggattgttccttttccagagctgaagtatcttaatttagatgatctaccgaagctgaagaatatctatcggagacctctaccctttctatgtctagaaaaaatcactataggggaatgtccaaatctgagaaagcttccactcgattccagaagtggcaagcaaggcgaaaatggatgcatcatacattacaaagattcacgttggttgaaaggtgtgaaatgggcagacgaagctacgaaaaaacgcttcttaccttcatgcgaacaccgattagaaaggtgtgaaacaatctttgaagactagttagtgatgaatgtctgcaaattgattgggatgtggatcaacaattctgagtcttgtgatttctaatgacgatcttgcaaaaactagttgatactaataattcgatagctattggcatgagaaagaaaataaagttgtaggagtactcaatccccgaaaaggcaagtttggatcttaaagtattgagacagtgaggttctgatgtttcattggacctcaacacagtggaggagttgctagttttggaaagattagaatttttaaccataagaattggttatgattcaggtttggttcaatttgtaatttctcatcttaaacttatgagctgtacacaagttctctgttgcgcaatccaataatttcttgagtctttctgatgtgtatgtacaaggttgtaataaatgcctaggggagttgacatggctgatctttgctcacgtcttacatatattgacgttgaatgttccgaatcagggatttttcttacgcttacaaatacctgctaatgaagtgtttacagtttcattactcagttttgtttgtttaataggtctcattcgagtcagattgggtaaaatgtttgttacaaacagtatatgcttcggcattttttcttttaaacagatatgtgtgtctactctgttacaactatatatcatcatataaaattgaccttcgaatcttgggttacaagtaaacgtaactgtcgtcgctaatggaagacaaagatttccctcaaaactaattccccagcttaattaggtcttctatacaatccacaacaagttcagaaagacgatgatgtgatggcataatgggaaatgaagattggtaactcatagtgtgatcatattgtttcactacaacgtgtgcgttccgtggagaaggagaagactatctaacacagttttgattataaaaaaaaacaaaacgaaggcatgccaattttagtctgtaattaaaagttttgatgacaaagttttgttctctttttttatttggaaacaattgaaagcaaaactatcagttgttttagcttttttcccaaggaagttatatttcgacaattgagtttacaaatgtaatagaggaaagttaatttagcgtcaactattcagataaacttgaagatataatttgcaaagagaaagcttgtgaagttgaaaattcagggattgttccttttccaaggttgatttatcttcgtttaatgaacctactgaagttgaagagtatctactggagtcctctttccatgtctagagacaatcactatacacgaatgtcctaatctgaaaaggcttccactcgattccaacagtggcaagcatggtgaaaatgcatgcatgatacgctacagatatccagaatggattaaaggtgtggaatgggaggacgaagctaccgaaacccgattcttatcttcatgcgaacaggtctaacatttctcctcttctcttagttgattttgaaggagtctaactgcttccatctttaatgcctcttgtctctttttatgtgtgaacttttgttataggtggaagaaccataaaccccaagttgagaacatatattgggctctctacttataccgctctaatgtgtttataatggaagttttagtgttttcagtttctttaataggtttgattctagtcggcttgagttcaatggctcacatggttgcaaatttgtagctcctacttacattatatttgcagtatagacagatttgtgtttcgaatattgtttgtggctactctgttcctatccatggtctttatatataaatgtttactactactaagtctaacctcaaagcctttatgtgtctctgtctcatccaccaaactatgaagcctcttttgttattaagaagacggtgcacaaaccaactacatatgacaacatttgcatcttctttcacgtttgtttttttaggcaagaaatattttttcctttgaatttagtcacttcgattattattattattttattttatttttttattttgttaaagcacttcaataaaattttgaaagtggatttggttaatctcttattcttctttaagttgttcaccaaacccctactgatatatgatcaatactcaaccaccttttgtttttgtcccaattatttgcattatggccttgaatgttttgtagattttgtaagagtttttggattttgtttttcaaaaacttattttcataccaatcaaaattttaaaattttggttttcctacaatttagaaaaactatttttgttgtagttttccattcatgattttagttttttagttttcctaaagttagaaatctagtttttactccatcaacgttatttttaaaacaaaaatatattaacaaaaatctaaaactaaaatctaaaatctagaaactaaaatctaaatccaaaaactgaatcgaaaatcagcatccattcagggcctaagttactaaccacgttaaaaacgaaatttaaacccatgaaacttgaaatagcgtatcaccgaaattgttggtgttggggatgaaaattctcacatttgaaaccaaattttatatttaaactattaaatattgtatcactgaaattgtgtttatacaaggggaacgcatgtttcacttggaatgtcttcaagccaaaagacaggaaagcggacttatatttcccaccaccattcggaaattaaagtcaataagcgacgaggcgcaattgtcaagacattataaatgccatcgttgtattgactcatcatatgcatacttgctctaataaagcgtcgtaaggggttctctatgctgagcttacgagtcatgcaggtcttgcgaaaggtcgaaaaaatggttggtccacctaaaactaaaagtatcataatctagtcttataaaaaaaattatataagaagagaaaaattctaatatctacatttttaaaaaataaaattcctaaatactaaatttataaattaactaacaactatcctcaaattcaaataaatatattttgatttgagcattggaagaataccctatcatcccacatcacctcccatgaatttacgggtatttttgtggtacatatatttttcttatatgattctactgttcccactaataacacgcataattttggaatgacgttttctaatatataatggtaaaagtttactaatcaagaaaatatgcataatgtataacaaaacaccggatttacgtattttctaaaataatacaaaaaaaaatatgttatataagtaagtgggtatatacttgtttatttcatgataaaatgttaaacaaatatttttaattttaaacaaaatattaacaattaaaatatcacccttgtgaataatatttaaaacttgtgactatctaatttcaatcaaatatcaatcatatttgaaattcattaaaaaaattatttaacttacttttcctaatcattgagaaaaaaaaaagttttccttatcataaaaaaaaagagacctaagattatatgtgttagatgtttctatttaccatatgaattggttgggtgtagtaagtaaactattcatctatcataaattaatttcgatattttgtaagaataactaatcactgaacaaaacggtagtttacacttttcagtggcattggaatctcctcaaaatcgagctgtcacactcacctcccctgtctcctcttcgcttcggtacttccgaagatttcattttctagacactccatcctctctcacacacaccttaatttcgaatttttgtcaattggtgatgcagttactctgaactcgagctgagagagaggcatagagatccttgcgattcgttgtatccgtaacatttaacaatctcgttttgtttttcttctgttcctctattatcaacaatcaaatggctaatgcatctgggttcttcactcatccttcaattcctaacttgcgaagcagaatccatgttccggttagagtttctggatctgggttttgcgtttccaatcgattctctaagagggttttgtgctctagcgtcagctccgtcgataaggatgcttcgtcttctccttctcaatatcaacgacccaggtgaataaaaatcacatttttatgtctctcttcacttatccattgatttgagattctgagattaggaagattgattattgttttaagtctttagccttaactctgtgaaagatcttaaatttgcttttggaatgcatttgattactctttagcttagctttaagatgatctttaagccaaagttatcacaagtttagcttttgaagaatgtgtctttgatttatgattcctttggttctgtttacttaaaggctagtgccgagtggctgcaaattgattggatgtggatcagcagttccaagtcttctgatttctaatgatgatctcgctaaaatagttgatactaatgatgaatggattgctactcgtactggtattcgcaaccgtcgagttgtctcaggtaacatataacatttgattagttccgctatgttaagctaagagtatcaggtagagagattaatttgtaaaactataattgaaggcaaagatagcttggttggcttagcagtagaagcagcaaccaaagctcttgaaatggctgaggttgttcctgaagatattgacttagtcttgatgtgtacttccactcctgatgatctatttggtgctgctccacaggtatttattgacccttaattctaaaatttctcttcggtggagtaagatttcccgttgtttgattcgcgataactgtctattgatggcagattcaaaaggcacttggttgcacaaagaacccattggcttatgatatcacagctgcttgtagtggatttgttttgggtctagtttcagctgcttgtcatataaggggtaaaagtcaaataagattcaaattcgaataagtaatgaataagttaagtgtatagttcttgtccctttctgttttttcaggaggcggttttaagaacgttttagtgatcggagctgattctttgtctcggtttgttgattggacggatagagggacttgcattctatttggagatgctgctggtgctgtggttgttcaggtactgtgccttatgaagcttttgagcaatttcgtgcacttatatccaaagtttgtatacataagcttcattgaaagagtataacctttagtaaattattacaagtaacacaatcataagacgagtgcttgccacagtgcatatcaaaagatcaatctttgtttattaacgaaatgtcctttcatttcgtgcaggcttgtgatattgaagatgatggtttgttcagttttgatgtgcacagcgatggggatggtcgaaggtatttgattcacatttcagttttttggcctcttaagatccatcttctcatttctttccctcaagaacccacagtaagagtctgtttttgcagacatttgaatgcttctgttaaagaatcccaaaacgatggtgaatcaagctccaatggctcggtgtttggagactttccaccaaaacaatcttcatattcttgtattcagatgaatggaaaagaggtctttcgctttgctgtcaaatgtgttcctcaatctattgaatctgctttacaaaaagctggtcttcctgcttctgccatcgactggctcctcctccaccaggttattttcttatcagaattttatcgttaattcaagttgcgttgatagtagatatgaattcaagcttaaatgggggaaagtttagagctttcgtatgtcgataagtatactcatcatttcttcagtttccattgataatggacttgaaattcgagttgaaatggcgaaagttttaaacttttgtactggaaaaatggttaaacggatagtttttgaaatatatttgcaggcgaaccagagaataatagactctgtggctacaaggctgcatttcccaccagagagagtcatatcgaatttggctaattatggtaacacgagcgctgcttcgattccgctggctcttgatgaggcagtgagaagcggaaaagttaaaccaggacataccatagcgacatccggttttggagccggtttaacgtggggatcagcaattatgcgatggaggtgaatggctaagtccaacaatgtaagttaacttcagagccaaagcttttttctccctcgaggaacactggaaattggtttaaccggtcttgtttagtccggttaaactaaaggtaaagcacattttgtctgaattcagtctctctttttttgaaggttcattgttgttacttgtttaactttgttagttatttcgaatgctaataaccaaaaagaagaaagaaaagggagcattctttcatcatttcttgtttgtaatgttaagacaacatttctccatttgcttaaatcttttcttcttctgtttttgagaactattagaatcaaaatgttttatatttctgttcaattttctatacgaattagaatcagtcaaagtatgtctcaaggctacaccaatataactaagaatatgtctagccacactaacaaaagactactcttgtataattgcaagctacattctcattaatcgtttgtctaacaataatagagccaaaccaaaactcaaataataccttaactctcattaaggtattttagattcatatcaattttatgataatcccttaaagctaaacagaaactcgtgtctcatgtgggaaatcaagatcccaagcatgtggaacatgtcctgagctactggagagttagcttagaaaatcccaagcatgtccttttcatgagatacgaggaaatgaaagaagagcctcaagaaacttgcggacttcttggggtgtccttttactaaggacgaataagagagcggatccgtggacgagatcttagatgtatctttgctctttacgtaaccaaagtggtttggactttggaggttattaaaacccgaaaatatataaataacgtggatcacaaggattatttccgaaaaggggaagtcagtgactggaagaattatcatgaaatggagtacaagatagacatcatcatccaagagcaactccaaggttctggtttgaaattctagtgttatttatagggggtttgtgttttctttgatgcagcataagaagagtaccttacgttgttgttatgttccttaaaatgtattttgattgttaatttgatgtgttttactatttctattatcgggtttaaacctgtatatacgtgtctagagattattgacatgtttaatacaaaataaaccatagggaataaagtgtgttcgcctaaaagatgtctctttcttctttgttatggtttcttgagactaattcaagaccggattcgcaaccgtcgtagactatactaatttcagtattttttcaataaaatcacaaaatgataaaaaaaaaatatattaaaaaaaaaaatggaagttgttgttcggggtgaacctaatgacaaataccttgaagacaagacaggatgaatataaacttgttcatctgagtcagatccatgtctaatcttaggtcactattctaccaagatatattgacatttaatgttaaataataatatacggccacgtatgagtttttgaatataatatgatacagtatcggtggtatcgatttaaatctcaaatagatattggatttaggtgattaaatttatgttcttgcaagtgtcgtgtgaaacaccaccaatgatcaaaacgccataatataaaactacaagttcaagtcatccataaaaaccaaatcttctatatattttctgaaatatattggatatttggatgagaaaagttttacacaaattaatgtctcagataatatgatacaaattcaagtcctgagcaaatatgtatgagaatctattaactatgaactgtatatatctgtatataaatataattagatgtgtgtgcataggactttttgagacattctcacttttttttgcttgacacaaccagatgattggtgaaaccaaaacggaactaacctatatacgatatgtgttgaattattttattttatatttgcagaaaaaatgtgttagtatattggataattttccaggagagcacgtctcattctgtgagaccgaatgggtcttttacatgtggatctagtttacacacatctaacaatttatatattttgtcgttttttgattatttgagatcttgtctttctattttaaatcaattaaaaagtacatatacaatccaccaaaacaaaaaactaaaaatctaacaaagaatatatgaagaatgaactgaagacatgctgcggtaacaaaagttacaagtgaaagaaatcagtaattttttatttattttagaagtgaatttggtttgagacaaacacgaacaataaacttataaatctacttaattaattttctgcttagctgaatgagtttctaaaaaaatttggttgcttattaaagattaaacaaaatgccgattgcagatctttcacgtggttaatcaatttataaatttttaaaacaaaacaatcgaagttcaattttatttttgtcgtaatcgaagttcaattgttggatacaggtctgacgcgatcgtgataagattttatatgctatttaaaagaaatcatgtggcctggccaaacacacaagtgttattagtaaaaaactatcttcagacttgttttatataaatacatttatttgtatcacctattatgaattgttttttctccatatatatacgttgggttatatcttatttcaagtgggtagcttatactctctctgttcctttttgtttgattgtttagaaaaaacacacatattaagaaaatatattaaatgttgattataaatgtattatttttagtgttttacagttttctataactctaaaccaatgatagttaactatttttcttgaaaattacaattcaccaatactaaccaataaatattacatagaaaacttaaaaaattaatcttttagaaacaatttttttttctaaacaatcaaacaaaaaggaacagagggagtatttaattgcatcagttacaattttgagaaactctcttactaaaaataatataaacaattaataaataagtagagagaatgacaaaaataaaaaatagtttctctgcagagaaactttggagtaatgatggaaaaactatatgtataggtatgtgtttataattggacagaaactaaattatattaaatatatattttttttttttttgaaaaacttttaaagtatatgtaaatctattggtgagatggctaagtttctcttcttctattttttccttctggatattaagatctattatctcattattatatgtttaatccaagataatcacttacctgccggaattgattctcgttatatgtaaatcatcatgttaaacagttaaaaaaattgtgatatgatcaagtcctataaaagtttgaaatgatgatcaaacccaaacaaaattaagcttacaaaaagagaaaaaaataatatataagccttatgtttaacaaaatgtttagttgatataagtcgtttttaggatctgattggtgcacattttagctgaagaaaatgactcttaacgtcagctcaaaacataccaatcaagtaaaaagacaagagaaaataactatgctagctctactcttcatataactgtaaaaagaaagagatgttttcaccaatacaataggatgaaaatacttttcttttttgtttactccatttaaaagagttacttttactctatatttattatttataccaatgaaatcagacatttatatcagtttataagaggaaataaaactttaaagaaaagagagaaacatagcttttcgccaattttcactgtgtatctgtattcaaataattagagtaaaacaaaaaaaaattatacccaatcttaacataattattttcagcctttatttttcagctaagatgatttaccaatcaatttttaggtgagatagttatgatgcctaataaattggaggtgcaaagttcaacaaaaattttacttttatgtttaattgaaaaagactgcttctcagtttaagaactatggcccatttatagatactgattaaaacgtggattgtaaaatgtgggcaatcaatattattttaaaaatgtggagccatagttattaactgtgattaaatttccccctcctccactttcacgcaaactaatatttaaaacagtcttaactgtgattcaagtaataagatttttcttttattattatttgacagtacttcctccgtatcattttaagtgatattttaggaaatgtttttagaatgtagagttgtagaggaaaaactagcagaaaaacaaaaatgcaatttatatatagtacagaaggttagtttaattgtgtttcgagttaaatctcttttttgatatggaaaattattctttaaattaaaatatttaacatttgactttggataggagaagattaaaagctgaaaagctggaacttcaacacttttgagaaaagtgagctacaatagtattaatcttaccatttactgataaataaatatatactttctgttcaattttaatagttttcaaatttattcttgttgcacataaacaacataggatatataatttttttagttaggaaatatatgcttttacgtttctatgaaaattctagatatgattataatttactcttaaaatatgaaatagaaaaatggagtggaatattattatttagaaagatatatatatatatatatatatatatatatttgtttgtatgcagaatgttagaccaatataattagtggacatttctataaaaaaacaaaaaattgtggaatggatgggataaaaaaaaaagagagatcaaagataacattttaagatgtttttctttctttaattttcaacaattttaggcaatttagtagtagggggaaatgtatttctatgaaaatccaaatatatgctaatgtatgcaacaaggaaagatatagtaaccaaaactccacttcatattacaaacaataattatttttataaaagtattgacttgtcgtctgcaaacgtgattacgtgaaccttactggtaataatacaaaaatcacagctctaatttgccaacccaatccagatctctctagttctcaacttctcatataattattcattaatatatttattttgagattttggttgattttttgatatataaatattggacttgccattttctattacaaccatcaaatctcaataaagcaaaacgaacaagaaaatggcgagcacggaagctctcttacccgtcacgtccctacaagatccattatctgagtcaagatccgaccagatcccggagacccgtcggagacgacccatcaaagttcatcttgcagtctattccggtttgctcttgatcgctttgtacgtcactctcatcgtcacacacgacggctccaaggctgaaatagcgacggagtcacgtcctcgtatggccggcgtgtcggagaagagcaacgacggggtttggatatcatccgatgatgggaaagttgaagcgttcccgtggaacaatactattttgtcgtggcaacgcacggcgtttcatttccagcctgagaaaaattggatgaacggtacgaacataaaatgttcttctaaaagattattttattaggtatgaataattgattaattaatcattattgatttttatattgttaaaatagctaaacaaaagtgtttcatctttacaaagaatgttcatttttcctttttctatagatttgaatttcgtaaccatttatgagaccataacttgaggaacaagatttaagtaaacacgcaagagtgaatttcaataattttgttattgtatattactgtatcatttgtaattaatttgttgatgttgttttgttgtctatcgaatggcgtcgtgaatggcaaatttctggcttcttcgtctgcagatcctaatggtaagctctagatcctacactgaagtcttctatttttgtgcttctaaagatttcctttgaccattatttattttatataaaataaaatatggattataaaaattttgattggctacacaattgatagatatatttcaaacccgtaaaatagtattggtagatagatatatgacaacaaggcacgtcctttgcggactacaattaatgtcattggataaaattgaaaaagaaatattggcaaaaacatttattaatttacacgtaaaaagtttttttgtttataatgtaaagtaaacagacaaaatctgaacagaaagagtcattaaagccaatcagtttactttgtttttgcctgttttgtatatacaccacgtgagtcatgtgcatattgtacaaatcattgctcacctattattgtgtttggacagtccccatttgactcattctattaacccaattgtaactgaaacgtcatattttatttattttcttccttaaaagtcacaaatatacagtaataacagcttattgaagttatgaaacgtcgtactttattgtggtgttttattaagtaaacgtgtttcttctattgttttttattgtttttaaaccactatctcagcatttcagaacagaggatgaatatattatgctatcatttcgaatttatattagtaaatttgaagtcataattatactttttgaatgctaatactcaatttgtgattattttaccagtgaaatgttaatccgaacaaatgaaatgttaaacgtgtccaggtccattgttctataagggatggtaccatttcttctatcaatacaacccaaatgcagctgtgtggggtgacattgtttggggtcacgccgtgtcaaaagaccttatccactggctttatctcccaatagccatggttcctgaccaatggtacgatgcaaacggtgtctggaccggttcagccacttttctagatgatggctccattgtcatgctctacaccggttccactgacgaattcgtacaggtactgagtttcttaaaatctttgttcgttttgttaactaatttttaatattgaattttccatcagtttttgaaagtgcttttgatggatttacagtaataagtaactatataataagtattgtattgttgccgaattcgtatctagcacactaaaaaacatcataattggttacaaatcttttcaatctaaggttggtctgacaaatcaatggctgatatcattttgattattttaggttcaaaaccttgcctatcctgaagacccaagcgacccacttttgttgaaatgggtcaagttctccggtaaccctgtcctcgtaccgcctccaggtattggtgcaaaggacttccgtgacccaacaacagcctggaagacatcttctggaaaatggcgaatcaccatcggttccaaaatcaatagaaccggaatatctctcatttatgacactaccgatttcaaaacctacgagaaacacgaaaccttgttgcaccaagtccccaacaccggaatgtgggagtgcgttgatttttacccggtgtcgaagactcagctcaatgggctcgatacttcggtcaacggaccagatgtcaagcatgtcatcaaggctagcatggacgatactagaattgaccattatgccattgggacgtacgatgattcaaacgctacatgggtccccgataatccttctatcgatgtcggaatcagtaccggtttgagatacgattacgggaaatattatgcgtcaaagacgttttacgatcaaaataagggacgaagaatcttatggggttggatcggtgaatctgacagtgaagctgctgatgtacaaaagggttggtcttctgttcaggtaccttttcttcacgtagcgtgctatgaacgttaggtctttgagttacttgttacccgagttagggcttaacttttttttgtaaccatgatcagggcatcccaagaactgttgtattggacacaaggacgcataaaaacttagtccagtggccagttgaggaaatcaaatcattgagactaagcagcaagaaatttgacatgactattggaccagggactgtggttccggtcgatgtgggttccgccactcagctagacatagaggctgagttcgagatcaagaccgatgatctcaagttattctttgatgatgactctgtggaggccgacaataaattcagctgcgaaacaaacggaggctccacagcgcgtggtgctttagggccttttggattctcggttctcgctgacgagggcttgtcagaacaaactccggtttacttctatgtgactaagggaaaacattcaaaactcaatactgtcttctgcactgacacctcaaggttatcaatctatacccatatattaatagattcttctattatacaaatcaagtaattattaattaatcaaaatcattttttataggtcgactttggcaaacgatgtggtgaaaccaatctatggaagcttcgtaccggtcttaaaaggagagaaattgacaatgagaatcttggtattacattaataaccttattcattagttttcgtaaaataatttaatatctttccgttgttattaatttaaatgtttattattaggttgatcattcgatcgtagaaggattcgcacaaggtggaagatcatgtattacctcaagagtatatcccacaaaagctatctatggagctaccaagctcttcttgttcaataacgccattgatgcgaccgttacggcgtcgtttacggtctggcaaatgaacaatgcttttattcatccttactcttcagacgatctcggtgttccttccagcacctgatgagttttctcatcctttcttgttagtcttttgattgttgttaaataatatgggtttgattttatctgtgtttgattcatcatgtgagtgaagagaagaaaataacatttattttctccttttttgaaagagtaaattattttcttcgtacaacatcaataaatatgaaagaacaacgtcaccgattatctttgtaaccttttccacactttcaccgatcaattgcgtgatgcatgatgttgaatcatccgtttgcatgacatgacgttaagaagaaagtttgaatatgtaaaacattcttcattttttctagagaggtcaaattctgtctctaacttaccttcgtacacaaagccgtgcgagttctaatgctggtacagacttcaatttccttgaccaatttttgaatgtccaagagcaagttgtaaaatggccaagaactccacttttcttggcaatttcgtgttaaatggaatccacaaccaaacaatagaaataacaaaagagctgttctcaactgtaataatgatttgcatcttgcgaacatcactgtaatgtcatttttcgtctcatgtgaaatcatatatcaagtgttctgaatgatcatatgagcaaagaatgtgatatggagactataactttcttatagacggttgtatccaataaaatgggaagttttagctgccttcattacctcgaaataaaggagataggcagaaatttacctttgttaatgcgggttctggtaatgagctttttatacagaattccacaattttttcgagatatcaaattgtaatttgtgagctttttattttatctcctacaagaccactaaaacagttgtaaccatgactcaatatgagttaaaaagcttagcagttcacaagacaatcaccaaacaaaaatcattgagctttgtgaaaaagaaggaaggggagaaacaaaagcaaagtcaccctcgagcccgaaaaatctcaattcgaaatctgaaatctgcttgaagagtgctccttatcaacccttgtttgcagcctaacagtagtaacagataaataacaaagattagtatcagtcatgttcaagaagcttacacaaaaccgtaaccaaaatatacacatatttatctgcctgtaacatgagaacatccgttaagaaataagcaacgtaaaaaggttaattcacctcgcagatgctgctttcaaggggatatggtttgctcgactattctctcgactcaaggatgatgaaactgttttaagaaagcatatcgaggaagcttttgtccaatctcccatcatgtaacatattagtgaccaagccaatggttgaagcatctccagcaaacccgcaactcctcatttctttgatgagttcagctgatgcttctctgtcaccatctctaaggcgtgccctaatcagcgtattatagcaaccgctgtttggaagagtcccatcttctttcatttctttaaataaggcatctgcttcctcctttgaacctttcctacaaaatcctgatatcattgtattgtacgctacaacatccggcttcactcctttaaggctgagattacaaaatagatcccacccatcttccaccttccctgccttgcacatcccttcaatcataatattatatgtgtaaatagtaggttccattttactcctttgcagatactcgaatacaaccattgctttctctagcttcccatttttacaaagtccatctaacaaagtgttgtatgtcataatattgggaggcacgccatcagataccatctctttgaatatttcttgagccatatcacaatctccagcttgaaataacccttggataagaatgttgtaagtgacagtgttgccaaccaatcctctttgagacatctcacggaagacttccataccctcttctacccttttatacttgcaaaatccctttataagcgtattataagtcactacatctggaaaacaatgcttgctaaccatgaactcaaacatctgcttggcctcgtctagacgatcgtgcatacaaaacccgttgatcaatgaactgtatgtgacaatactaggatctatggaccttttgaccatctcgtcgtacaatttctcagcctctacaagcttgccctccttcacaaacgcatcgatcaatgcgctgaaagtgaatacatcagggttgattttcctctcaatcatatcactaaggaggcgagaggcatcactccatcttccgtaattacaaaggcaacttatgagggagctgtaggtaacaacatttggtctaatgccttttgtttccatttctttaaataggttgagcgcatcatccatatgtttgtatttgcaaagaccatcaatgattgtgttgtagatcaaaacaccaggttctaatttcccttgttccatcttgttgagcagattaaaagccaaatcagtatcacctctcttacataatccatttactaccactccataagtaaccagatctggttgacaaccttttgcaaccattcgatcaattaaagccattgcttctgaagctt

SEQ ID NO: 110 - DNA, 86801 bp, Arabidopsis thaliana
gaattcatacgctgcagagtttataggcatggaggataagattcttccgcttttgaagtatagctacgataaccttaagggggagcatgtcaaatcgagtttgttgtattgtgctttatatccagaagatgctaaaattcggaaagaagatttgatagagcattggatatgcgaggaaattatagatggaagtgaaggtatagaaaaggctgaggacaagggttatgacatcattggtagtcttgttcgtgcatcactgttgatggagtgtgttgatttgaaaggaaaatctagtgtgattatgcatgatgttgttcgtgaaatggcattatggatcgcttccgaactgggaatacaaaaagaagcctttattgtgtgtgcaggtgttggcgtacgtgaaattccaaaggttaagaattggaatgttgtgagaaggatgtcattgatggggaacaagattcatcatctcgttggtagttatgaatgtatggaactcacaactttgctcctgggagagggagaatatggaagtatttggagatggagtgaaataaaaacgatctcgagtgaattcttcaattgcatgccaaagctagctgttttggatctatcgcataatcaaagtctctttgaattgccggaagaaatatcaaatctagtttctttgaaatatctcaacttgtcacatactgggatacgtcatttgtctaagggtatacaagagttgaagaaaataattcacttgaatttggagcatacaagtaagcttgagagtattgatgggatatcaagtctgcataacttgaaagttctgaaattatatggttctagattaccatgggatctcaacacagtgaaggagctggaaactttggaacatttagaaattttaaccacaactatcgatccaagagcgaagcagtttttgagctcccataggttgatgagtcgttcacgattgctacagatctttggatctaatatattctcaccggatagacaactagaatcactttcagtatctacggacaagcttcgtgaatttgaaattatgtgctgcagtatctctgagataaagatgggagggatatgcaacttcttgagcctcgtagatgtgactatatacaattgtgaaggcttgagggaattgacgtttctgatctttgctccaaagcttagatctctttctgttgtggatgcaaaagacctagaagatataataaacgaagagaaagcttgtgaaggtgaagattcagggattgttccttttccagagctgaagtatcttaatttagatgatctaccgaagctgaagaatatctatcggagacctctaccctttctatgtctagaaaaaatcactataggggaatgtccaaatctgagaaagcttccactcgattccagaagtggcaagcaaggcgaaaatggatgcatcatacattacaaagattcacgttggttgaaaggtgtgaaatgggcagacgaagctacgaaaaaacgcttcttaccttcatgcgaacaccgattagaaaggtgtgaaacaatctttgaagactagttagtgatgaatgtctgcaaattgattgggatgtggatcaacaattctgagtcttgtgatttctaatgacgatcttgcaaaaactagttgatactaataattcgatagctattggcatgagaaagaaaataaagttgtaggagtactcaatccccgaaaaggcaagtttggatcttaaagtattgagacagtgaggttctgatgtttcattggacctcaacacagtggaggagttgctagttttggaaagattagaatttttaaccataagaattggttatgattcaggtttggttcaatttgtaatttctcatcttaaacttatgagctgtacacaagttctctgttgcgcaatccaataatttcttgagtctttctgatgtgtatgtacaaggttgtaataaatgcctaggggagttgacatggctgatctttgctcacgtcttacatatattgacgttgaatgttccgaatcagggatttttcttacgcttacaaatacctgctaatgaagtgtttacagtttcattactcagttttgtttgtttaataggtctcattcgagtcagattgggtaaaatgtttgttacaaacagtatatgcttcggcattttttcttttaaacagatatgtgtgtctactctgttacaactatatatcatcatataaaattgaccttcgaatcttgggttacaagtaaacgtaactgtcgtcgctaatggaagacaaagatttccctcaaaactaattccccagcttaattaggtcttctatacaatccacaacaagttcagaaagacgatgatgtgatggcataatgggaaatgaagattggtaactcatagtgtgatcatattgtttcactacaacgtgtgcgttccgtggagaaggagaagactatctaacacagttttgattataaaaaaaaacaaaacgaaggcatgccaattttagtctgtaattaaaagttttgatgacaaagttttgttctctttttttatttggaaacaattgaaagcaaaactatcagttgttttagcttttttcccaaggaagttatatttcgacaattgagtttacaaatgtaatagaggaaagttaatttagcgtcaactattcagataaacttgaagatataatttgcaaagagaaagcttgtgaagttgaaaattcagggattgttccttttccaaggttgatttatcttcgtttaatgaacctactgaagttgaagagtatctactggagtcctctttccatgtctagagacaatcactatacacgaatgtcctaatctgaaaaggcttccactcgattccaacagtggcaagcatggtgaaaatgcatgcatgatacgctacagatatccagaatggattaaaggtgtggaatgggaggacgaagctaccgaaacccgattcttatcttcatgcgaacaggtctaacatttctcctcttctcttagttgattttgaaggagtctaactgcttccatctttaatgcctcttgtctctttttatgtgtgaacttttgttataggtggaagaaccataaaccccaagttgagaacatatattgggctctctacttataccgctctaatgtgtttataatggaagttttagtgttttcagtttctttaataggtttgattctagtcggcttgagttcaatggctcacatggttgcaaatttgtagctcctacttacattatatttgcagtatagacagatttgtgtttcgaatattgtttgtggctactctgttcctatccatggtctttatatataaatgtttactactactaagtctaacctcaaagcctttatgtgtctctgtctcatccaccaaactatgaagcctcttttgttattaagaagacggtgcacaaaccaactacatatgacaacatttgcatcttctttcacgtttgtttttttaggcaagaaatattttttcctttgaatttagtcacttcgattattattattattttattttatttttttattttgttaaagcacttcaataaaattttgaaagtggatttggttaatctcttattcttctttaagttgttcaccaaacccctactgatatatgatcaatactcaaccaccttttgtttttgtcccaattatttgcattatggccttgaatgttttgtagattttgtaagagtttttggattttgtttttcaaaaacttattttcataccaatcaaaattttaaaattttggttttcctacaatttagaaaaactatttttgttgtagttttccattcatgattttagttttttagttttcctaaagttagaaatctagtttttactccatcaacgttatttttaaaacaaaaatatattaacaaaaatctaaaactaaaatctaaaatctagaaactaaaatctaaatccaaaaactgaatcgaaaatcagcatccattcagggcctaagttactaaccacgttaaaaacgaaatttaaacccatgaaacttgaaatagcgtatcaccgaaattgttggtgttggggatgaaaattctcacatttgaaaccaaattttatatttaaactattaaatattgtatcactgaaattgtgtttatacaaggggaacgcatgtttcacttggaatgtcttcaagccaaaagacaggaaagcggacttatatttcccaccaccattcggaaattaaagtcaataagcgacgaggcgcaattgtcaagacattataaatgccatcgttgtattgactcatcatatgcatacttgctctaataaagcgtcgtaaggggttctctatgctgagcttacgagtcatgcaggtcttgcgaaaggtcgaaaaaatggttggtccacctaaaactaaaagtatcataatctagtcttataaaaaaaattatataagaagagaaaaattctaatatctacatttttaaaaaataaaattcctaaatactaaatttataaattaactaacaactatcctcaaattcaaataaatatattttgatttgagcattggaagaataccctatcatcccacatcacctcccatgaatttacgggtatttttgtggtacatatatttttcttatatgattctactgttcccactaataacacgcataattttggaatgacgttttctaatatataatggtaaaagtttactaatcaagaaaatatgcataatgtataacaaaacaccggatttacgtattttctaaaataatacaaaaaaaaatatgttatataagtaagtgggtatatacttgtttatttcatgataaaatgttaaacaaatatttttaattttaaacaaaatattaacaattaaaatatcacccttgtgaataatatttaaaacttgtgactatctaatttcaatcaaatatcaatcatatttgaaattcattaaaaaaattatttaacttacttttcctaatcattgagaaaaaaaaaagttttccttatcataaaaaaaaagagacctaagattatatgtgttagatgtttctatttaccatatgaattggttgggtgtagtaagtaaactattcatctatcataaattaatttcgatattttgtaagaataactaatcactgaacaaaacggtagtttacacttttcagtggcattggaatctcctcaaaatcgagctgtcacactcacctcccctgtctcctcttcgcttcggtacttccgaagatttcattttctagacactccatcctctctcacacacaccttaatttcgaatttttgtcaattggtgatgcagttactctgaactcgagctgagagagaggcatagagatccttgcgattcgttgtatccgtaacatttaacaatctcgttttgtttttcttctgttcctctattatcaacaatcaaatggctaatgcatctgggttcttcactcatccttcaattcctaacttgcgaagcagaatccatgttccggttagagtttctggatctgggttttgcgtttccaatcgattctctaagagggttttgtgctctagcgtcagctccgtcgataaggatgcttcgtcttctccttctcaatatcaacgacccaggtgaataaaaatcacatttttatgtctctcttcacttatccattgatttgagattctgagattaggaagattgattattgttttaagtctttagccttaactctgtgaaagatcttaaatttgcttttggaatgcatttgattactctttagcttagctttaagatgatctttaagccaaagttatcacaagtttagcttttgaagaatgtgtctttgatttatgattcctttggttctgtttacttaaaggctagtgccgagtggctgcaaattgattggatgtggatcagcagttccaagtcttctgatttctaatgatgatctcgctaaaatagttgatactaatgatgaatggattgctactcgtactggtattcgcaaccgtcgagttgtctcaggtaacatataacatttgattagttccgctatgttaagctaagagtatcaggtagagagattaatttgtaaaactataattgaaggcaaagatagcttggttggcttagcagtagaagcagcaaccaaagctcttgaaatggctgaggttgttcctgaagatattgacttagtcttgatgtgtacttccactcctgatgatctatttggtgctgctccacaggtatttattgacccttaattctaaaatttctcttcggtggagtaagatttcccgttgtttgattcgcgataactgtctattgatggcagattcaaaaggcacttggttgcacaaagaacccattggcttatgatatcacagctgcttgtagtggatttgttttgggtctagtttcagctgcttgtcatataaggggtaaaagtcaaataagattcaaattcgaataagtaatgaataagttaagtgtatagttcttgtccctttctgttttttcaggaggcggttttaagaacgttttagtgatcggagctgattctttgtctcggtttgttgattggacggatagagggacttgcattctatttggagatgctgctggtgctgtggttgttcaggtactgtgccttatgaagcttttgagcaatttcgtgcacttatatccaaagtttgtatacataagcttcattgaaagagtataacctttagtaaattattacaagtaacacaatcataagacgagtgcttgccacagtgcatatcaaaagatcaatctttgtttattaacgaaatgtcctttcatttcgtgcaggcttgtgatattgaagatgatggtttgttcagttttgatgtgcacagcgatggggatggtcgaaggtatttgattcacatttcagttttttggcctcttaagatccatcttctcatttctttccctcaagaacccacagtaagagtctgtttttgcagacatttgaatgcttctgttaaagaatcccaaaacgatggtgaatcaagctccaatggctcggtgtttggagactttccaccaaaacaatcttcatattcttgtattcagatgaatggaaaagaggtctttcgctttgctgtcaaatgtgttcctcaatctattgaatctgctttacaaaaagctggtcttcctgcttctgccatcgactggctcctcctccaccaggttattttcttatcagaattttatcgttaattcaagttgcgttgatagtagatatgaattcaagcttaaatgggggaaagtttagagctttcgtatgtcgataagtatactcatcatttcttcagtttccattgataatggacttgaaattcgagttgaaatggcgaaagttttaaacttttgtactggaaaaatggttaaacggatagtttttgaaatatatttgcaggcgaaccagagaataatagactctgtggctacaaggctgcatttcccaccagagagagtcatatcgaatttggctaattatggtaacacgagcgctgcttcgattccgctggctcttgatgaggcagtgagaagcggaaaagttaaaccaggacataccatagcgacatccggttttggagccggtttaacgtggggatcagcaattatgcgatggaggtgaatggctaagtccaacaatgtaagttaacttcagagccaaagcttttttctccctcgaggaacactggaaattggtttaaccggtcttgtttagtccggttaaactaaaggtaaagcacattttgtctgaattcagtctctctttttttgaaggttcattgttgttacttgtttaactttgttagttatttcgaatgctaataaccaaaaagaagaaagaaaagggagcattctttcatcatttcttgtttgtaatgttaagacaacatttctccatttgcttaaatcttttcttcttctgtttttgagaactattagaatcaaaatgttttatatttctgttcaattttctatacgaattagaatcagtcaaagtatgtctcaaggctacaccaatataactaagaatatgtctagccacactaacaaaagactactcttgtataattgcaagctacattctcattaatcgtttgtctaacaataatagagccaaaccaaaactcaaataataccttaactctcattaaggtattttagattcatatcaattttatgataatcccttaaagctaaacagaaactcgtgtctcatgtgggaaatcaagatcccaagcatgtggaacatgtcctgagctactggagagttagcttagaaaatcccaagcatgtccttttcatgagatacgaggaaatgaaagaagagcctcaagaaacttgcggacttcttggggtgtccttttactaaggacgaataagagagcggatccgtggacgagatcttagatgtatctttgctctttacgtaaccaaagtggtttggactttggaggttattaaaacccgaaaatatataaataacgtggatcacaaggattatttccgaaaaggggaagtcagtgactggaagaattatcatgaaatggagtacaagatagacatcatcatccaagagcaactccaaggttctggtttgaaattctagtgttatttatagggggtttgtgttttctttgatgcagcataagaagagtaccttacgttgttgttatgttccttaaaatgtattttgattgttaatttgatgtgttttactatttctattatcgggtttaaacctgtatatacgtgtctagagattattgacatgtttaatacaaaataaaccatagggaataaagtgtgttcgcctaaaagatgtctctttcttctttgttatggtttcttgagactaattcaagaccggattcgcaaccgtcgtagactatactaatttcagtattttttcaataaaatcacaaaatgataaaaaaaaaatatattaaaaaaaaaaatggaagttgttgttcggggtgaacctaatgacaaataccttgaagacaagacaggatgaatataaacttgttcatctgagtcagatccatgtctaatcttaggtcactattctaccaagatatattgacatttaatgttaaataataatatacggccacgtatgagtttttgaatataatatgatacagtatcggtggtatcgatttaaatctcaaatagatattggatttaggtgattaaatttatgttcttgcaagtgtcgtgtgaaacaccaccaatgatcaaaacgccataatataaaactacaagttcaagtcatccataaaaaccaaatcttctatatattttctgaaatatattggatatttggatgagaaaagttttacacaaattaatgtctcagataatatgatacaaattcaagtcctgagcaaatatgtatgagaatctattaactatgaactgtatatatctgtatataaatataattagatgtgtgtgcataggactttttgagacattctcacttttttttgcttgacacaaccagatgattggtgaaaccaaaacggaactaacctatatacgatatgtgttgaattattttattttatatttgcagaaaaaatgtgttagtatattggataattttccaggagagcacgtctcattctgtgagaccgaatgggtcttttacatgtggatctagtttacacacatctaacaatttatatattttgtcgttttttgattatttgagatcttgtctttctattttaaatcaattaaaaagtacatatacaatccaccaaaacaaaaaactaaaaatctaacaaagaatatatgaagaatgaactgaagacatgctgcggtaacaaaagttacaagtgaaagaaatcagtaattttttatttattttagaagtgaatttggtttgagacaaacacgaacaataaacttataaatctacttaattaattttctgcttagctgaatgagtttctaaaaaaatttggttgcttattaaagattaaacaaaatgccgattgcagatctttcacgtggttaatcaatttataaatttttaaaacaaaacaatcgaagttcaattttatttttgtcgtaatcgaagttcaattgttggatacaggtctgacgcgatcgtgataagattttatatgctatttaaaagaaatcatgtggcctggccaaacacacaagtgttattagtaaaaaactatcttcagacttgttttatataaatacatttatttgtatcacctattatgaattgttttttctccatatatatacgttgggttatatcttatttcaagtgggtagcttatactctctctgttcctttttgtttgattgtttagaaaaaacacacatattaagaaaatatattaaatgttgattataaatgtattatttttagtgttttacagttttctataactctaaaccaatgatagttaactatttttcttgaaaattacaattcaccaatactaaccaataaatattacatagaaaacttaaaaaattaatcttttagaaacaatttttttttctaaacaatcaaacaaaaaggaacagagggagtatttaattgcatcagttacaattttgagaaactctcttactaaaaataatataaacaattaataaataagtagagagaatgacaaaaataaaaaatagtttctctgcagagaaactttggagtaatgatggaaaaactatatgtataggtatgtgtttataattggacagaaactaaattatattaaatatatattttttttttttttgaaaaacttttaaagtatatgtaaatctattggtgagatggctaagtttctcttcttctattttttccttctggatattaagatctattatctcattattatatgtttaatccaagataatcacttacctgccggaattgattctcgttatatgtaaatcatcatgttaaacagttaaaaaaattgtgatatgatcaagtcctataaaagtttgaaatgatgatcaaacccaaacaaaattaagcttacaaaaagagaaaaaaataatatataagccttatgtttaacaaaatgtttagttgatataagtcgtttttaggatctgattggtgcacattttagctgaagaaaatgactcttaacgtcagctcaaaacataccaatcaagtaaaaagacaagagaaaataactatgctagctctactcttcatataactgtaaaaagaaagagatgttttcaccaatacaataggatgaaaatacttttcttttttgtttactccatttaaaagagttacttttactctatatttattatttataccaatgaaatcagacatttatatcagtttataagaggaaataaaactttaaagaaaagagagaaacatagcttttcgccaattttcactgtgtatctgtattcaaataattagagtaaaacaaaaaaaaattatacccaatcttaacataattattttcagcctttatttttcagctaagatgatttaccaatcaatttttaggtgagatagttatgatgcctaataaattggaggtgcaaagttcaacaaaaattttacttttatgtttaattgaaaaagactgcttctcagtttaagaactatggcccatttatagatactgattaaaacgtggattgtaaaatgtgggcaatcaatattattttaaaaatgtggagccatagttattaactgtgattaaatttccccctcctccactttcacgcaaactaatatttaaaacagtcttaactgtgattcaagtaataagatttttcttttattattatttgacagtacttcctccgtatcattttaagtgatattttaggaaatgtttttagaatgtagagttgtagaggaaaaactagcagaaaaacaaaaatgcaatttatatatagtacagaaggttagtttaattgtgtttcgagttaaatctcttttttgatatggaaaattattctttaaattaaaatatttaacatttgactttggataggagaagattaaaagctgaaaagctggaacttcaacacttttgagaaaagtgagctacaatagtattaatcttaccatttactgataaataaatatatactttctgttcaattttaatagttttcaaatttattcttgttgcacataaacaacataggatatataatttttttagttaggaaatatatgcttttacgtttctatgaaaattctagatatgattataatttactcttaaaatatgaaatagaaaaatggagtggaatattattatttagaaagatatatatatatatatatatatatatatttgtttgtatgcagaatgttagaccaatataattagtggacatttctataaaaaaacaaaaaattgtggaatggatgggataaaaaaaaaagagagatcaaagataacattttaagatgtttttctttctttaattttcaacaattttaggcaatttagtagtagggggaaatgtatttctatgaaaatccaaatatatgctaatgtatgcaacaaggaaagatatagtaaccaaaactccacttcatattacaaacaataattatttttataaaagtattgacttgtcgtctgcaaacgtgattacgtgaaccttactggtaataatacaaaaatcacagctctaatttgccaacccaatccagatctctctagttctcaacttctcatataattattcattaatatatttattttgagattttggttgattttttgatatataaatattggacttgccattttctattacaaccatcaaatctcaataaagcaaaacgaacaagaaaatggcgagcacggaagctctcttacccgtcacgtccctacaagatccattatctgagtcaagatccgaccagatcccggagacccgtcggagacgacccatcaaagttcatcttgcagtctattccggtttgctcttgatcgctttgtacgtcactctcatcgtcacacacgacggctccaaggctgaaatagcgacggagtcacgtcctcgtatggccggcgtgtcggagaagagcaacgacggggtttggatatcatccgatgatgggaaagttgaagcgttcccgtggaacaatactattttgtcgtggcaacgcacggcgtttcatttccagcctgagaaaaattggatgaacggtacgaacataaaatgttcttctaaaagattattttattaggtatgaataattgattaattaatcattattgatttttatattgttaaaatagctaaacaaaagtgtttcatctttacaaagaatgttcatttttcctttttctatagatttgaatttcgtaaccatttatgagaccataacttgaggaacaagatttaagtaaacacgcaagagtgaatttcaataattttgttattgtatattactgtatcatttgtaattaatttgttgatgttgttttgttgtctatcgaatggcgtcgtgaatggcaaatttctggcttcttcgtctgcagatcctaatggtaagctctagatcctacactgaagtcttctatttttgtgcttctaaagatttcctttgaccattatttattttatataaaataaaatatggattataaaaattttgattggctacacaattgatagatatatttcaaacccgtaaaatagtattggtagatagatatatgacaacaaggcacgtcctttgcggactacaattaatgtcattggataaaattgaaaaagaaatattggcaaaaacatttattaatttacacgtaaaaagtttttttgtttataatgtaaagtaaacagacaaaatctgaacagaaagagtcattaaagccaatcagtttactttgtttttgcctgttttgtatatacaccacgtgagtcatgtgcatattgtacaaatcattgctcacctattattgtgtttggacagtccccatttgactcattctattaacccaattgtaactgaaacgtcatattttatttattttcttccttaaaagtcacaaatatacagtaataacagcttattgaagttatgaaacgtcgtactttattgtggtgttttattaagtaaacgtgtttcttctattgttttttattgtttttaaaccactatctcagcatttcagaacagaggatgaatatattatgctatcatttcgaatttatattagtaaatttgaagtcataattatactttttgaatgctaatactcaatttgtgattattttaccagtgaaatgttaatccgaacaaatgaaatgttaaacgtgtccaggtccattgttctataagggatggtaccatttcttctatcaatacaacccaaatgcagctgtgtggggtgacattgtttggggtcacgccgtgtcaaaagaccttatccactggctttatctcccaatagccatggttcctgaccaatggtacgatgcaaacggtgtctggaccggttcagccacttttctagatgatggctccattgtcatgctctacaccggttccactgacgaattcgtacaggtactgagtttcttaaaatctttgttcgttttgttaactaatttttaatattgaattttccatcagtttttgaaagtgcttttgatggatttacagtaataagtaactatataataagtattgtattgttgccgaattcgtatctagcacactaaaaaacatcataattggttacaaatcttttcaatctaaggttggtctgacaaatcaatggctgatatcattttgattattttaggttcaaaaccttgcctatcctgaagacccaagcgacccacttttgttgaaatgggtcaagttctccggtaaccctgtcctcgtaccgcctccaggtattggtgcaaaggacttccgtgacccaacaacagcctggaagacatcttctggaaaatggcgaatcaccatcggttccaaaatcaatagaaccggaatatctctcatttatgacactaccgatttcaaaacctacgagaaacacgaaaccttgttgcaccaagtccccaacaccggaatgtgggagtgcgttgatttttacccggtgtcgaagactcagctcaatgggctcgatacttcggtcaacggaccagatgtcaagcatgtcatcaaggctagcatggacgatactagaattgaccattatgccattgggacgtacgatgattcaaacgctacatgggtccccgataatccttctatcgatgtcggaatcagtaccggtttgagatacgattacgggaaatattatgcgtcaaagacgttttacgatcaaaataagggacgaagaatcttatggggttggatcggtgaatctgacagtgaagctgctgatgtacaaaagggttggtcttctgttcaggtaccttttcttcacgtagcgtgctatgaacgttaggtctttgagttacttgttacccgagttagggcttaacttttttttgtaaccatgatcagggcatcccaagaactgttgtattggacacaaggacgcataaaaacttagtccagtggccagttgaggaaatcaaatcattgagactaagcagcaagaaatttgacatgactattggaccagggactgtggttccggtcgatgtgggttccgccactcagctagacatagaggctgagttcgagatcaagaccgatgatctcaagttattctttgatgatgactctgtggaggccgacaataaattcagctgcgaaacaaacggaggctccacagcgcgtggtgctttagggccttttggattctcggttctcgctgacgagggcttgtcagaacaaactccggtttacttctatgtgactaagggaaaacattcaaaactcaatactgtcttctgcactgacacctcaaggttatcaatctatacccatatattaatagattcttctattatacaaatcaagtaattattaattaatcaaaatcattttttataggtcgactttggcaaacgatgtggtgaaaccaatctatggaagcttcgtaccggtcttaaaaggagagaaattgacaatgagaatcttggtattacattaataaccttattcattagttttcgtaaaataatttaatatctttccgttgttattaatttaaatgtttattattaggttgatcattcgatcgtagaaggattcgcacaaggtggaagatcatgtattacctcaagagtatatcccacaaaagctatctatggagctaccaagctcttcttgttcaataacgccattgatgcgaccgttacggcgtcgtttacggtctggcaaatgaacaatgcttttattcatccttactcttcagacgatctcggtgttccttccagcacctgatgagttttctcatcctttcttgttagtcttttgattgttgttaaataatatgggtttgattttatctgtgtttgattcatcatgtgagtgaagagaagaaaataacatttattttctccttttttgaaagagtaaattattttcttcgtacaacatcaataaatatgaaagaacaacgtcaccgattatctttgtaaccttttccacactttcaccgatcaattgcgtgatgcatgatgttgaatcatccgtttgcatgacatgacgttaagaagaaagtttgaatatgtaaaacattcttcattttttctagagaggtcaaattctgtctctaacttaccttcgtacacaaagccgtgcgagttctaatgctggtacagacttcaatttccttgaccaatttttgaatgtccaagagcaagttgtaaaatggccaagaactccacttttcttggcaatttcgtgttaaatggaatccacaaccaaacaatagaaataacaaaagagctgttctcaactgtaataatgatttgcatcttgcgaacatcactgtaatgtcatttttcgtctcatgtgaaatcatatatcaagtgttctgaatgatcatatgagcaaagaatgtgatatggagactataactttcttatagacggttgtatccaataaaatgggaagttttagctgccttcattacctcgaaataaaggagataggcagaaatttacctttgttaatgcgggttctggtaatgagctttttatacagaattccacaattttttcgagatatcaaattgtaatttgtgagctttttattttatctcctacaagaccactaaaacagttgtaaccatgactcaatatgagttaaaaagcttagcagttcacaagacaatcaccaaacaaaaatcattgagctttgtgaaaaagaaggaaggggagaaacaaaagcaaagtcaccctcgagcccgaaaaatctcaattcgaaatctgaaatctgcttgaagagtgctccttatcaacccttgtttgcagcctaacagtagtaacagataaataacaaagattagtatcagtcatgttcaagaagcttacacaaaaccgtaaccaaaatatacacatatttatctgcctgtaacatgagaacatccgttaagaaataagcaacgtaaaaaggttaattcacctcgcagatgctgctttcaaggggatatggtttgctcgactattctctcgactcaaggatgatgaaactgttttaagaaagcatatcgaggaagcttttgtccaatctcccatcatgtaacatattagtgaccaagccaatggttgaagcatctccagcaaacccgcaactcctcatttctttgatgagttcagctgatgcttctctgtcaccatctctaaggcgtgccctaatcagcgtattatagcaaccgctgtttggaagagtcccatcttctttcatttctttaaataaggcatctgcttcctcctttgaacctttcctacaaaatcctgatatcattgtattgtacgctacaacatccggcttcactcctttaaggctgagattacaaaatagatcccacccatcttccaccttccctgccttgcacatcccttcaatcataatattatatgtgtaaatagtaggttccattttactcctttgcagatactcgaatacaaccattgctttctctagcttcccatttttacaaagtccatctaacaaagtgttgtatgtcataatattgggaggcacgccatcagataccatctctttgaatatttcttgagccatatcacaatctccagcttgaaataacccttggataagaatgttgtaagtgacagtgttgccaaccaatcctctttgagacatctcacggaagacttccataccctcttctacccttttatacttgcaaaatccctttataagcgtattataagtcactacatctggaaaacaatgcttgctaaccatgaactcaaacatctgcttggcctcgtctagacgatcgtgcatacaaaacccgttgatcaatgaactgtatgtgacaatactaggatctatggaccttttgaccatctcgtcgtacaatttctcagcctctacaagcttgccctccttcacaaacgcatcgatcaatgcgctgaaagtgaatacatcagggttgattttcctctcaatcatatcactaaggaggcgagaggcatcactccatcttccgtaattacaaaggcaacttatgagggagctgtaggtaacaacatttggtctaatgccttttgtttccatttctttaaataggttgagcgcatcatccatatgtttgtatttgcaaagaccatcaatgattgtgttgtagatcaaaacaccaggttctaatttcccttgttccatcttgttgagcagattaaaagccaaatcagtatcacctctcttacataatccatttactaccactccataagtaaccagatctggttgacaaccttttgcaaccattcgatcaattaaagccattgcttctgaagctttgttgtgaagaaaaagtccatggattagagtgttaaatgtgacggtattgggttgataccccgttacgaacatctgatcaaccaaagctacagcctcggatatcctcttactgtggcaatacccattgagcagcgaagaaagcgtgacaatattgggctcatagccaagtttcatcatcttgccaagaacagctaaagcaagagggagttgagagcgtcgacaaaaacagttaatcaaaatactgtaagtatagtgattatgaggaattcccaagttttgcatctgctcgccgagagagatgacaacatcgaacttgttcatcttagcaattgcactcaacagtttgctgaactcaatgatggaagggaagggacgagacttgaccatttcaccgaacagagcaacagcgtcatctaactttaattcactcagcccatttctactcagtttctctctgtaatcataactagtcttaccagagaaagctcgtctccagaaaaaggaaaaagagggagaaacagttgcagcattacctctcaccacaagactccgatgaacaaatctcttcgcagttgatgcaatcgcaaacgatatcctcattctcgatttgatttcttctcaagctctctgattcggaagctctgtaaaattcaaccaaaccctaaacgaaccaccactgtgagagactgtgagagtaataaggcagagagagagagagtgaatgttgaaaccggtttagtaattatgttgtagtctgggcattatcggtttgcgtttttaaaccgaatcaagaagcttgagagagaatgattgtaaatttgtaattccaccaagcgagaatagaagagtagaaactagtctacaacaactagatgcatcaaggtcagaaacgtgcttcggtagcttcgtcctcccattcaacaccgtctaacaatatagaatacctttagccttttcaatgattgctttgttcccgaaattagaatattctgattaaaacttacacaacagtttggtttttcttacgaaaattttacaacttcattgcttacaaattagttgtcagttattaggaagaacacaagataagatttacaaagggaaatagatttctcttacaagtgagaaagcttttgactttattacaacatcatggcttttcctaacctctggcagcatttctttccatacatttcttatgcctatgttcatacagagaaatcatgattagcttgccagaaaccaaatgatgctcattcttcctcaagccgagccaaacacatctctttctcgtgctttcatctgtttatgagcacctgcatttcgaagcaagagcagttttagtacgcagattgtgacatagaatgcacccaaaacagcgcaatgaacctgcaaagattattcatgtacttccgttcatctacagtaacattttcattggttttgagaaaggacaagtgatacttatgtattcataactagaaagagcttcgtagttaccattagataccagaagaatttggactgatatataagctaagataagttaaagaaagcatgaaacagagaccagttgcattgaagaaagcttaataataagaatgccttttcaagggatactaaaatctgtattaaaggtcgatttgaaatctttctaaagtcaatcttctagctttgcatcccagtttcagacataacagaatacccagaacaacttcaatccggtggttataaaccgatctcaaaccaatggattttgaaagaacaaaaccattaacaattaatccagtacgagcagagcatgaaatgtgatttgactaacgaagacagaaatttcacctcaagcatcgagatcagaaggagatgatgaagcaatgcttatccgcgccaccaatagagctgccgatgatgatgatgatgatgatgatgatgatgacgatgatggagcagaaaacacttttagtgaatccctttgagttgcaaaacccatatccagaatctcctatcgggggtgacggatgcgtggagaatccagttgcattcaccattcgatattacatgattggcaaccattactcaatgtttggatgaagcaattgaggatttctctgcttgaattagagaaacactgagttccagtgattcaatcaccgctggggaaatgcacaaacacagtaacaattacaagagagacagagcttttttgcataccccagattttatatctttaagcaaggacggtgcatagccacagctcaacattttcttgataagttcagctgataaagttatgtcaccatcgctaagcgtgcagtcatttttcataagcccctcttgtttcatttttgtatacagtgcttcaacttcatgtagtaggcctttcgtacacaaccctgacatcattgtagtgtatgttacaatatctggcttcaatcctttgaggctgaggctacaaaataaactccaagcttcttcaaccttaccagtcttgcacattcctcggataacagtagtatatgtgacaatatcaagatccatttccctcttttgcatatcttcaaatatcaccagtgctttctctagctccccgttgtcacaaagaccacctaacaaaatgttataggtccaaatatcaggagagataccaaaaaaatccatctgactaaaaaattcctgagctttatcaacatcgcctgcttgaaaaaacccttggataagagtgttgtaagtaaccgtattgctaactaatcctctctgagacatctcacgaaacagtttcatcccatcctctactctcttcgccttacaaaatccatttataagagtgttgtaactcactacatctgctaaacaacccttgctaaccatcaaatcaaacatttgattagcctcatctatccgatcatgcaaacaaagcccattgatcaacgaactgtaagtcacgatatcaggatcaatagacattcgtaccatctcctcgaaaagctctttagcctccaaaacctttccgtttttcacaaacgcatcaagcaacgcactgtaagtaatcacattaggagtgattttcttcttgatcatatcactcaaaagtcgagcagcatcgctccatctactcgaattacaaagaccgttaacaagcgcagtgtaggtaacaacattcggtctaatccctttcctttcaatttccttgaaaaaatcgaaagcatcattcacacgtttggttttgcaaagactatcaataatcgcgttgtaagcaacaatatcaggtttatatccaatctccaccatcttatcaaccaaagatacagcatcagaaactctattcctacgacaaaatccgttaacaagagatccaatcgtgactctatctggctcataaccaagtttcaacatcttgccaagaatagataaagctagagagacttgaaaacagcaacagaaacaattaatcacaatgttaaatgtataaagatcatttcgaatccccaaaacttccatcttcttccccaaagagataacaacatcatacttcttcaatttaacaatggcactcagcaatctattgaaatcgacaatggaaggaaagggacgagacttgaccatgtcactgaatagatcaatcgcatcgtttagctttatatcacgaagccgagttttgcttaatctctctcgcaaatcaccaccactgacgcttgaagaagctcgtacccagcaacgacaggaactgcaatggctaaacgaaggagaagaagcagttctgggtttaccattctcgagaagattgcgatgaagaaatctcttcgccgtcatcgcaatcgatctctgcatttcgatgttcgatttttgtctccgattgagaatcctcctacaacgaagtgtttattgaaagagacgggaatgaaaaccggtttagttccggttaaattcagtataaatatttttgctatatcagtcaaaccgaatcgaatcgaatcgaatccaaacgcaagtaattgcattaactcaagtgattaccgaataggaccaataggttttgcttcgaaatttcagtttattttctcaatttggataaagaacaagtacaatatggtttatgttttaacatcggttcggttcggttccgtttctggttaagtaggttttggatttttcaggttttttattttgggaaaatagttaccactgaccacactaaaactaaaatagtagggactggttttggtcaatttatgtttggttaggtttcaaatccgattttgtccgttagtttgttttggttatccaaattgatcaccccttcattgagtgtcagtgttaacaaaaattaagatgaaagaaaagtaccaaagtactgacaaaataagtcgtcaagtttgctaaattatgagattactttacttacttctaataaacctagtgactataataaccaagcaaagagtcttgttctcagagttaccagaacaaacttctcaaacaagaaaccaatacacataaactcagactcaatttgactcagttcaaatcattcacctgtcttgaacctcggatcttcggttgtctccaagggcatttcgccttagctgcaagtcccaaaactatacctatcctctctgtctcaacttcacttgttaagttatgtgaactcaaacatctcttcttcaccgagctcatctctctttctctgtcctcttgacaatcagtaacacttccattagaatcaagaaccgatccttcatccaacaaatcttcagttctagaattctcggtctccgaatgattcgatgactcctttgttatctttgagaagtcttcatgagcctgcaagacaattccatccttgaacatatgcaaacaaattctaattaatcactcagcatacaaaacattacaaagtctgaatacaaatctgatgatgactcttcttaccttattgaacttagattgcataaaactttcatcagcattggatataggttttgaaggaacaccacaaccttctggaaaatctctgtaaactgtcacaaatcttctcttgtaccgcattctttttgtccaaaccaaaacctataaaacaccatcaatttcacaaaattagaaactcttctaagcaatttcaacaattttctaggttaatcgaattaatggtttaatgaaaatctaaacaatcaacgaaatttgcttcaggaacacggaaacgctacacaacacaagattatgattcgaagaaaagaagaaaacgttaccaatggagaaaagtcgtacaggaggaacagagagaaccaatttacctcagatttgctctatgagggtttcgttctgataaagcggggcaagtgaagctgaagcatgaattaagataaaatcgttacttttatacgctttttctaagcccaattgtttagcaataaggcccatcagagaatatttatttagggatactgtacgtagtacattatgaaaatgatttatacgattatatccatgatatcatgcgccaaattatatgatcaaacaaatgacttgcattgttgagtccttgattatttgtcatatacattaaataaatttgttagtcttgctaatatcaaactaacgtttttctataacccgtgacttaatttatgtaagtagtactgatgattaataaactttactataaaaaaaccctgaagagattttgggttttatcatttgtggcgtaaacgtacgccctaaacactgatgtcttttttgttaaaaagaaaaacactaatgataaaaggtcactaatgtataaaatttgttagtcttgcgcagaaacgtcgggattttttcttgaaaccgttattggagtggctctttgagaatcttcaagatggttttgtatggaatggtatctcgtgggcaactacttttgctatagcttgttggtggggctggaaatggagatgcgggaatgtgtttggagagaatagaaagtgtagggaccgtgtgaagcttgtgaaagacatcgcacaggaggtggcaaaggcaaataattgtggcagcggtagtaacaattccaggagtcggatggaaagacaagtccggtggagtaagcctagcttgggatggtgtaaactcaacacggatggtgcttctcatggcaatccgggtttagccacagcggggggagcgttgagaaacgagtatggtgagtggtgttttggttttgcgctgaatattggtcgttgcttggcgcctttagcggagttatggggagtgtattacgggttgttcatggcgtgggatcgtgggattacgcggctggaacttgaggtagactccgagatggtggttgggtttttaaggacaggaattggttcttcccacccgctgtcattcttggtacgtatgtgccatggcttcttatcaagggactggatagtccggattgggcacgtgtatagggaggccaaccgtcttgcggacgggttggctaactatgcgttcgatttacctttagggtatcatgcttttgcttctcccccgaatagtttagactcgattttgagggatgatgagttaggaatttcggttccaagactagtgcggatgtaattttaatttcataaataaattcagggaggtgtttacctcccggtgcctaccaaaaaaaaaaaaggtcacatggttttgtctcacataataatgctccctaagttattgagatcaatgtcttattataatggtcaatttttattaattgttctatgcaataaaaagtcgatattatcgaaggggttcgcttagaccggaatcttgtaggatgtcaatcccaaagagcacgcccgaataatgatgttccttcacagaatcaaatgaactgatgttattcatagctaatggagtatagattatttaaaaaacattggaaaaaaaaatccaaaaacgtagaaaattttatataagttagatagaatctaaatactccatttaataagtgaaaaaagaaagaaacaaaaaaaacattcgatgcatgcatctttctatttttggaaccagatttttattctgacccaaaaaaatctacaatttcgatatatgataatgctaacaaatttataaattatatagcaattcagccatctccaaacatagtatcatattcgaatatagttaaaagattttgtctctactactacattgagctaatgacttcgaggaaacattattgtaactttaacgtcgtacagtatagtttcttctgcctcccttgatagaaaacattatgattataaatatatgataataccaaaagacaaagcacgcttttgttatcttcctttttcaacacggcttgtctctctatatatgtatgttctcgagccaaacatggcatgagactttctttttcttcaaatgcactaatcgtctccggtctctccatgacatctttacttctcattcacactcctttctctgggtatcacttcataactcttcaagcttcttgcaagttgttcttgttaattctcatcaagacaactaaaaatgtgtaagtcaatccaaattaaagtcaattggtaattttttatataaaaaatttgaacaaattggaaatttatttatgacgactatcctactatattatttgggaagtacattttaaatataaccttaatttttgtaagtaattacatatgtatgccattagaaataaaattttaaagagtaaattaatttatctctttaaagattaaaaagtcaaatactaatttaattaattaaatttaattaaaaaacgaaatacattattaattttcaaaaataataaccaatcaaaatcaacatataagatttgatatctaaattttaattaatttaatttaattagaaaaacgaaatacattattaatttccaaaaaagtaacctattaaaatcaacaaattagatttgatatctaaattatcatattaattttttattaattattatagttcatttctcatctttatatgattctatttttgcgaaaaataatatcatcattataaaaaataattaaagttttttcgcatatgccataatttgaatttttgaaaattgtgaatataaactgttcaatacatgaaaaaatattataacgggtgaaaaatagatttaagaaaactttctactgagtaagggtcatatttaaaatatttatattcaatttcatacatattatattgaaaatttataatcttatatagtacaataattaataacatattagatttttttatgtgtatgatgtgattcaatttttaatacaagctggaaaatcctagaattgacgggtttagatcgatattaatacaagatggtatactacaggtgaactcttaaattaacaatcaaactacaagtgtataatcttaaacactaaacaatatagataatatcaacaaaacatatacaactcacagtttacttttaatattttatatacaaaattaattaaatcttaattaaatcttaatcacataaaaattagcacaaaaaagtattcaacaattaaaaatttatcaaatctctgtgttatataagttttgatactatattcgaataaagtgtaatatacatttttaatttgtattctttaactaatttaagctaactaatatatttgctaatcttatacctatcaaaaccgactatcgtttcttatctttatagtatttttgcaagacttttttggtggatttgggtaaaagtgcattcgggtcatatggtacattcccctattaaataaaaatggtatactcctacgttattagctaaaatgtttagattataattcagagtcatatcattaataaagttaatattaatataataaatggctttttggcaagacggatttggagtgacgggtttttgaatcaacattaataaaaaagtaaaatataattaatacaccgtttcaatacgggttaaatctttaatttattattttttaagaccactaatattaaacatatcaaatcatcctaatttagaaaagattagataaaaccaaaaatgttatgtggtatgtataatgttactatatataaaatataaatgtattagagaatgatataatttgcaaaacttttatctataaaaaataatttttaaattttaaaaattactactttaaaaaaaaaaatcacgggacgggtaaagaaattatagaacgggttttattttggaattgggttatatggtggatgtatttgaatcaatatttataaaattttaaataatattaatatgctgttttaataggggttacaacttcagttttttaacaattgtctcatacattcgtggtatagctttagttaataacaattataaactgtaaaatataaatattttataaaaataaaatttacaaattttaatatatattacttttaaaaaataaatcgtaccgcggtatatcgcgggttaaaatctagtttatgttgtataagttaaacatttgttgttctactatgttcttgtttttttctctatatggtgatgtctaataaaagtagtaagcagattataatgttatctctttaaattcggggtttgtacaaatgtaagtagtaagcggatttttaatacatattttaggagtatccaattttggtgatgctatctttaatttggatatttgaaaatctacatacaaataatcatgagggaagaaccacaaaaaatgagggacatgaattaagtgagtatacaacaataacaaataaatatatactacaagtataattttttttagaagtaattgtcccttcattcaagaattggtcacatataatcatcattcatatggtttatatatatatatatatatatatatatatatatatatatatatatataattagggatgcatatacatacatacatccatacatacatacatacacacatacacacatacatgcgtgcgtataacatatagttccataatgtaacaagaataatcaaaagaaaataccatatggttgtaggtttttattatgtacaaaacctccataaatccaggaaataactccttgtttttccccttccatctttaagtataaataacactagtgtgcatgtattttcatatatattcaccttgcatctttttcatctctctatcactatttctagagatcaatctgacaacttgaagaagtagaagcagcatgagcatttgaatactcttctcccatttcaacaaccctttcagaatcattctccggcaaatttattccctcatctatcacatgataacccgtgtttctcgtgtcaatcttgacgttgttttgatgagaagaagaagaaaccacggctgcagcctcttcatcattgctaagctgtgaagcaacaaatttatcgagaactctccagtcagtagtcatttgctctactccttgatcgtaatacagagagctgaaactttgattcccttgttgcaattgttcctcatgagatatatttgatgatttctgcaagttactaatatttcttgtgttattgttgttgtcagaattgcaattactggtagggctttcgagctgaggaagctggagaaacatagattcacgaagatgatggttttgttgttgatgttgtaccatttgattgtaatgtaactcgagctcttgcttgcattgcaagttaggattgttgttgttgaatgcattgaggccacaaggcaatgtctgctggtgatggtggcggttataatgatgattgggaagaaactgtcgtggagaactagaaatgatctcggaggccataaaagagagctgatcatcgtaccaatgctgcgatggtgatgaatggtaatctcccattttcctcactgtcgctgccaatttcttcttgaataccctacatactacccatccttcttcctacacacatcacataaaaatatcacatttacaacatcgcaaatgcacaacacttgtccatcacagatgagttcttgtgtgtagtgagtagtgaccaatgaatttcgaatttggatatagtgacaagtttagtaaacttgtaataacattttaaagttatgaatgatatgtatataacatgtgtttatgaaattttatagtgagttgaataatgcacttttgtatatattggaattagaagttgtgtcgtatggtgaacaactccaatgcatttttaatgtaaattgatttctcaaatgcattcattctaagagacatacttaagaaagatcgtatatacagggaagctcaactccttatgcaaatagagtatgagttaagatgtatgagcgccttagatcaatgtatatatacctgaggggttccattttcacttgtttctaagcgatattcgtgcatgatccaatcggatttctgaccatttggggctcttcctttgtaaaacacaagtgttttcctcataccgataagactatgtcttatatatatagccttgtctcttccagtggctttccaaaatcctgctttcgtggctctattggttcgagttcccgtgggatacttcttgtctttatgactaaagaagtaccattcgctctgctcttcgtttcctatcttgcataactctaaattatcacaaagaaaaaacaacaatcgtaagccttaatttataccaaaacaaggatatcactactaaagagagatgataggattttcctgctaaaccttgaagatcacatggctcaatcttgtaaagatcaacatccttgatgatatcgatttctattctctttgatgcaacttttttcctcaagtagtagtctacaagttcttcatcagtaggatgaaatctgaagccaggaggtacttgtgaaaacgaattcattctttattctttgtttttccgagattagcctgtttataatatgaaataacgactgttaattatattatggatcatgaaagtaattgttatacaaactcatttcatttatcaacttaagaaaaaaaaaaatctgtgcatcggcaaactaataagaaagaaaaatgtcaatgaaactaagaaaaacagtttttcgttttcaagattttgttttatatatgatctagcattgatttgcatcgtttcttttacttagccagacacaagttagggttatctttccgacttatttatacacacatatgtatcatttaagacattcatgtgtgtagtattttgtgggaataagaaacctataaatatctatacatctttagaaaaaaagaaagatagttgatttaagccgattaaatgagtttagattcaaaggactctggaagatggaataaggatacataaaataaaatatcactactagtttccaattaaccatttcccgtataactaatcataaattaatatgttagattaactgataattgcattttaagtatccgtaaatagagtcaaaggaaaatatgagaaatatctataggatcattctataatcaccaatcgaaaaaaaacaaatcttaaggaaaaacctagaccacgatcgagtctattaaggattatactttgcttagcttgtaccatcagcaacattgagtaggataatgatgttaattataattttaaaaaatcaacaattatcaagaaaataaaaatagtaaatatatccaaaaacatagagatacagaagaggatcaaagatggagtagaatcttcaaaggaagttagggtctatacctcaaaaaaaaaaactcaaaaacaggctgattcaactcaaccccttcaaaaagctccggaattgagttattgtatgtgactagctaggttctattgaatctttcccttgtacttggaaagatcgaatacttcacgatatgcactataaagtacgatcagaactaaagaaagagatagatagaaccctaaaaggagatgttatgcatatggaaaagatttgacagttatcatcgggatgtatagccaccggaaagagatcggatcccaagagtcagagatattgagagagaggatgggagaagagaaagagagtagggttaataaagaagatcagacggtgatgatgatgaataagaataagaaaaagagagaagaagacacatgaaaaagtgtacaaccgtgtcctaataatctatactactttgtctctctctctctctgtccttctcaatcatagtctatgtcttttaataaccccgagtgagatagagagacttaaattgttgcaaaagcttcgggagaaaagagaggcgaataaggttttggtactaaagcaagattttgatagagaaagagagcggcaacctccgatccattaccacccaccagcccttgatggagacggtccaaagtttaaaatatcttcttttttcttttttaaataccgttatatatatgggacacatattctctttgaacattttgtcctttggcatcttcaaaagtaagttcatagatttctgtaagacttaactcagtcatgttctacggtccaaattcgtagtctaaatgttaacatgagtgtctaagaatcctcgataaacatcgcataactatattgagactttcgtatgttctttttactttgcatgagacttaattaccatccagtttagccaaattattataaaacaaaacaaaacaaaacataaaaacacgaaacaaaataatatatatagatgaaaaaatcagatgtggaattggagccactattaatggaatcaagggcccgccaacaattggaatgtgttgacgtggcggctgatggtctggcgtgagataggcttcgatcattaatctcacaatttgctgttcggtcatgtgggtctcatcccgttttcccgttcttatttgtgaaatttatgacccatatataacaacattaacaacacacattttatttgaaagtttaaatcatcaatattagatgttaacaaaaaaaaatcattaatattaattgtcttctgttaaaagagtagagtaggtttcaatttattttcataggtgaaagcaaattttgcatacgcttaaattttcaactttaattcaccccatactctattgcaactcaatactccctctgtttctatataaatgtagcttaagggtttttattttttttcaatttaagtgttgttttcaactttctatgcaaataataaatatatttagtattctttaaccaattatatttaatcatctatttttttattggttgaattggttataataaatgatgtttttatataaaagaggtagattaaatgagatttttatgacttcttaatttgtgtgaaaaaaaccttaaactacaactaatatgaaacagagggagtataaatctttatcgaaattctttcatccaatgttctagggaaattaacaacaacaacaaaaataaaaaaatctaactaatatcagcttcatctagacatttgtgacagaatttcagttgttttctaaaactcaacctattatagtattatatatgatgaactgataatacaaataaaaaggttcatgagttaatggcgctaaatcaaaaatgaaaataaatataaaacatgtattcgtttttacacttttagtcttttagaagaaaacagcatacatttgtcattagaaattcattttgtgagatttgaggtaacattgaaggtagtgatgttgatcgtagctagtttccgtttcatgaacatagtttgaatgccatgtaaaatatgccttctgttagttttttttcaatcttacattttttttgtctatgactacaaaacacatattgcttaacgaagtgttaatatttttcattactgtatgttattttcttgttacgattggatgacattagcttaaaaaagtaatttgcatggttatcatataagaaacatttcaaatttcataaatgaaactgattttgagttgactttctctagatattggttgacagctaaactttaactttctcactggataattagttttgtaactaattaccaaaataagatttttagatctaatttaggtaagttaggtaatattgaaattacaatacaactttaggtaagttcatcaaaatctggattagtctgcggctgaggtttgggactttagggcaaagttgtttttcagcgaaatttattaattaataaaatttggaaaatgggcattgagttattttagtttttttctttatttcgtgttgttgaaacgaagtacagaagtaaagcaaaagtaaagtgcgtgatcctaaaaagtgtcacttttttttgttaaagaaaaaattgtattatttttttcgcaccttgcctcttggcgcaaaaattgttttactgtgtattgtatacatgaattggagcttatatattttgatctaaatttcttttaataattggccacaaacgaccatttatgtctcgattttatttatctttatgctgaattttttgagtaatctactattacaacggaaatgaatacaattgttagtaaagtttgatatgacaattttatgttctttttgtgaaaagaaaaacatatgtctaagttttatgttgagttcctattggccacctaacgtaagtggaacatataaaactttagaacaataagactttattttgtcttattttaaagtaagcgcttatttcgtaaataaccaaaggcatagttgaaattggcaaaaccaaaattgtttcaaatatcattctaaattatgaaatattgtgtttgtgtttcattcatacaacatattgtgtatattctattaaaattcatagctgaataacatcatagattattttctcagatacatgtttgttcttcccattttctctttcacttataatttataattatgcattatagttaaaagaaaatgttaaaaatcatttcatactgaaattgcacgttaccattatgaatatgatagtataatagatatacctaaacagatacactgatattctatagtgtattctagaagaagaatttccagatatacctaaaggaaacttttgtactgccacacttcttgagtcatgccctatttcatatgtttttttaaagactagctaaaaatatatagagttaataattttgtaatatacaatgtataaaatggactagacaaccacttatactattctacatacgcatgacaaaggtggcagaagtttggcgaattcatctatatagatttaaattctgaatacccaactagtatttgttaaacatacattattcgatgcaccaaccgtaattaagctaatgaataacatgaatataaatcttcttatatttattcgtcggctatgtatcaaatgtttaaaacactaataattggtccagtcgtgtaaacaagacaagagttcttcatttcgtccaaaaaagaacaaaaaagacagagttcttcaaagttagaagtctcttaacactaatcattacgaaaaatttctagaaattaaaccacgtggagaagtttgtttctcttgtcagtttcttgtccatgagaacataatttattacgtttgaaaagttggaaagcccattaaagaaaatatactccatctatcatgcttgtcttgaaatgagcttagttatatatagttcgttgggtaaaactaaaccgaacctttaacaaaaaactaaaccgaatcaattacgaaaaagaacttcttttgatggtatttatagactttagcattttggataaaatatttcaaatttgccatttacttatatctcaaaacataaatctacacatgaaaattggaaaaaaactaaagaaatcagcggttaaaaatttgccatttcttacatctcaaatataagcttattagtttaaccgctaatttcttaagggttttttttttggttttattcttgagttttgccttattaattatagttccctttatcgtgaaaattgcataatttctccatgaagaatcacttaacaagtataatggttatggtagcttatatatagactcagactttcgacaatatttaaggaggccctattaggtttgtgtcaccatgaagatatcactttaatgttttgtctatacaattaatgtcatatatatagtttacgctcatgctaattagaaagctcattatcgttaattatgatacttaaacaaacaaaaagaaaataaattattattaatagtatactatactatgcagtatgcaccaacttctaattatttcatgaatgactgaacacgaaaattttacagcatattattgaatagaaactcaacacgttcaggaaataattcagattattataatttcatgcatcaccaactttttcaaagtaacacgtaaattgcttttgtttaagctgactcgctgactattaagtcaactatctagcgcacaaagaaaaacatatacaccaccaatcttcatgattcactgttgggcagctcaaggcgtgataacacataattacacgttcaggtatttttttaaaatcttcatttaactacaatatatttctacttgaagtgaaaatggatgttaggaatggaataatgattgcattggtttgtatgtcttcttcggatcaatgatggcagtaattataagacaaaaaagaaaagaaacgaacgataaatttagggtatttgtagaatttggaaccatcattatctgctacttaaagacaatagtgatagtctgataatctgtagatttatgtactcttacgaaataaaattgttacaaatggttcgtatcaatacattttacagaaaacataactgcgaaattgagagcgagattgtagcactaataattctgatgctgacacacttagctgatcactaaagattttagatgtaaatggtaacaacaatatttagcaaagttttattaaaaagataacaatcgataaaaaaaagttagacgaccttattgctacgtacgtatttacatactaaacatttcttttattttgacatctttaacgttataattcgaaacacttgaaaatcagaaaagcctcaaaatctctcaggcgctatagcctaagattgatggatgcaccgtgtagcgagcctcactataaccaccgcatgccgcagtagaagcttcctccatcagctctttggacacaccgttgttacaaacgtttgcaaacgctcgcatatgtttcatcccatattgcgttagtgatccacaatgctcttcaaatacacgtacctaagaaatttcaataacattacatccaaccctttttacttaatgtgaataaaattgagatttaagggttgcgtaacttttaccatcgatttaagacattcccaatcgtcaaccaaaggcaaaccgggttctctaaccaagttaagaacattcatcgtcggaccaaacaaaattgtggctatcaattcgacgcttgcatctaaatgtttcctatgccttgttgtctcagttaattccttcaatgtgtcatccttcttccttgacccatcttccgatgtccgatactgtaaaaccaaagccaatattgtttttaagtaaactaaaaccttctagtcaatttagataaccaaaaacataactcaataaacaaaacagtatagttacagtaccatatgccaaaggaagagaaggtccgcgtcgcgttggttaacgactcctatttttgacttgaccggtaattcgtttagtgggagattaacggtggctggatcaaacccttggtaaagataaagcttctccgacttaatactattgttaccgtattccatcacatgagagccacctgagtaggtattgtagtttgatgtcctcatcttcacctactcaccggaataaaagatccgatatatattccacattctcaaaccaacaatcgagtaaacacgtaaaataaaatttcacagtaccgtgtggtattgttgctttatggtctctttctttaaattgtgagtctcactgcaaatagatcgatcacacaaaataaaccaatgcataatcacaaagaaaaacttaatcataagataattatgtacctatcttccatccaagcaacactatataaatcccctaagcaagtgatatattcagatgggggtgacggattcatgccaggacaatatgttccataactactctcttgtgcatttgaagccgttgttacgtaaatgttcaagtcctttggcattatcccttcgaaaatactcccactttcacacgcttctacgtatataacctgcattacattatcacaagtatactgatagtaacattccttttaacaaaataaaacactaaaacaaattaaactgttaaactaaattttaccatctctttgtatgttccggaagcatgcttcttcttaagcgtttcaataaaatcagctgcatatatgtgaggcgtatttggcatccctgaccaatgaaaacaaaaattacaccgttgtaagaaatcgattacaagcattacattggaagaagttatctaatcggaaacaacacaaatgatcgatgaaattaccaagaactccgggaccaccatgatccgcataatatacgaaaatgtgatcgttgggcttgctagcgatgaccttaccgcttccacctttaacagccttctggtcgcctaggagtacagcgtagaagtttgcagccgtaacgctactaccagtatagtcctgaaaaagatatttcaaaacgtaaataaccgaacaaactattaaaaagggaaaacaactagtggctataagaaatctaggagcgataccaatgaaaggtccacacataaagtttggtttaccatagcaaatgtctctacagtcgctatcactataattgttgtgtagtgcctaaagtcaccatctcttacacgatagatccaataatatataattttttaataaattaacaacctaagtgccattgacaaagaagaaaatatcatttaaatgagatactatagagaaaaatttctcgttataacaatttaaaataaagctctaaaacctggttagacgctatttggaccaaaacataggtcacatctagaactattgatattacttaagagaagaatccaaacctagatacagacttattggtcggattaagggtaaattagttcatgcataattatgaggaaagctagataaataaatataccttagggactccggcgtaaacatcgtcaccgtcaggatggttgatgagagtacccggacgaggattaagtgggtggtttgcgatatcatcatacatcaaaacgactatgttttcttcctttaaacctccttttcttagtatttgatatgcgtgacacacgtcagcctttaacacaaagcaacaaaacacttttaatagatatcgaatttataaaaacttttgaactttttcttaaatgacaactagattgagaaatggagaaattcaccatacataggatcttagtcttgaattaatttcatattttgaagaaaataattaaacaaaattttgcatgtcacattaatatctaagccaaaaaaaaagaatcttaaggcaaagtatatatttacaataacggattgctattaaatttgaatcacgaataatataatcaattcgttggacactatgtgtacctggtgtctgtagtttccatatccagaagaaccagcgacgagaaccgcccatcttgtaccgacaccatcttcgtcttggtcagccgggttagcttcctctgtcggcataagaatctttggctcgaaccgaccgcgtgactcggcatgaaccaaaagaactaacagaagaagaagagctggtctgaaatagcaagacttagccatggcagcgagaaacaaaagagagagaaagagaggctttttgagagaataaagagaactataaaagcaaaggatggttagacaatggtgttaataatttatttgtcaccaaaatataatcaaacaaatcaattgtctaattatatttaatgccacctgattattaaaaagaaagcacttaattaaagttagcatatgcttttatgataaatttaattttataaactcctatacatattataccgatgtaattttaacgtgttaattatttaattttgatatgtttcctctaaaactaagttatattacattaaataaatataaaaaatacgaattaaaatggttgtgatgtcgacgattgaatattttggaatattactctgctgatctcataaaatcaacgaattggtctgcttcgcgacacaacagagaacatgcaaattatagtccgaacacgtgtacacttaatggacccacaaccgatattatttcaccgttacaacggcactaattaattaacccagagctctaaaataattttgaaattagactattaacccagtttaattagaaaatagtaaaccggaattgaaccggtcttcatatctcgctctcatcatcgtctctctcccatggaggagataagagggtttatgctagggttttagcccccatttacagatacatagattacgaataaaacgaggttaataattcaaatgcggagatcgaccacgatctcaattgcatcaaaagcaaataaatttctcaatctgtgtcttctccagaaaggtaatcctgtaattgttcctttcattagccgtttctggggaagaactttttctactaagagatcgagtatgaatttagaagaagaaattgatttgttctgtaaaatgattcaatctcgtcctcttccttcaatagttgatttcagtaaagtattgagtaaaatcgccaaatcgaagaattacgatcttgtgatctctctgtttcaccatatggaagtttgtggaattggtcatgatctttatagttacaacattgtgattaattgtttatgtcgatgctctcgatttgttattgctttatctgttgttgggaagatgatgaagtttggttacgagcctgatgttgtcacggttagttctttgattaatggattttgtcaagggaatagagtttttgatgctatagatttggttagtaaaatggaggaaatgggatttagaccagatgttgttatctacaacacgatcatcgacggttcttgtaagatcgggttggtgaatgacgcggtggagctgtttgatcggatggaaagagatggggttagagctgatgctgttacttataactctcttgtggccggtctttgttgttctggtagatggagtgatgcagctcggctaatgagagatatggtaatgagggatattgttcctaatgtcattactttcactgcggtgatcgatgtgtttgtgaaagaagggaagttttcggaggcgatgaagttgtacgaggagatgacacgaaggtgtgtagatccggatgttttcacttacaattcgttgatcaacggtctttgtatgcacggtcgggtagatgaggccaaacaaatgcttgatttgatggtaactaagggttgtctccccgatgtagtgacttataatactctcattaacgggttttgcaagtctaagagggttgatgaaggaacgaaactcttccgcgagatggctcaaagaggattagttggtgacactatcacatacaacactataatccagggctattttcaagcgggtagaccagatgcggcgcaagaaattttcagtcggatggattctcgtcccaatattaggacgtacagcattttgttgtatgggctttgtatgaactggagggtagagaaagcattggtgttattcgagaatatgcaaaagagtgaaatagaacttgatattactacttataatatcgtcattcacgggatgtgcaagattggtaatgttgaagatgcgtgggacttgtttcgtagcctttcttgcaaaggacttaagcctgatgttgtgtcctacactacgatgatctcaggcttttgtaggaaacgccaatgggataaatcagatttgttgtacagaaaaatgcaagaagatgggcttcttccattataacatatgaaaactgtatattatttgtaagtaaaaaacaaattctttattttgtattcatcaccatttgtaattttgtattattacaaaagaaatacaagtaagctggagtttaatgtaaagtctttgaaaccagaaataaaagaggcaagaaaagggagataaagacaagttttcaaaacattgctctccatgaataccacttgagtttaaactgaaacaagagtggaggaacaccaagaactcctctttgaatcctgggatcaaacacatcgaattgtactttatttaacgaatccagaagaacttgtaccggcacagaatgaagcagtaccggtttagcttctgcaggaacctttcccgccagttcacgggctttcaggagatgtgcattggcaacagatgcaatctcaaacacgacattgcttagtccttctcttgaatcgttatccagaagaatttctaatcgtccaccttgtttcacgagcaacccgtgcttctcagcgagatctgcagggatgtaactctggtgacggtttctggtacagtggtacggtaatgatttaagcagcaagacaagaccactggctttaccaatgtgtgaagctgcatgatcagctgttgttgaactaattccgcctgcttggagtgtattgtacagaagagtggaaactgtgtcttctgcgtatttctctagctccgcaatgctctctggtatatcgtctacttctctttgggcatctcggattctagcgtcaactgagcgttttagccaaggtttactgatgttatgttctgatattgcccaagacagagcttgtgcagctggatggtttatgggctttttggtgtagagtttgtcaattgcttcttgccaccaaagtaaccgcatcaagccgattttgggatcagatgcaacatccatggctcttgcggtttctacattaaaagcccggagagcaaatgctgctttacgcatctcagttgggagttcaaggagacagaggtagtgatgatagtcatagtttcgtacttgctgcacacaataggacaatgctgaacgcaaactactcgagcctcctccattcatcagtataactccaactgtgtttctttctcttatcctacaaccatataaaccacaaacaagatcagttcataaaaacaatgaaaaactctggtttcttctatcactccattataaaacagtaacacagaattcatctacaaacacaagagaaaatcctccaattatcaccacttcaaataaatatactgaataattctcactaatccagaggttttgtgaaccgttaaactcattcaggaattaacacaaacacttggtggacaaagcactggaattggtatttaacaaacaaaatgagaacttttcaacattgcttaacacacaatcataaacccaataatcacacatggataacaaatgagatcactaaagttcacagaaactttccaattagtaatgtaaaatcgctggaaaccattaatgtcgtccaacaataacgaaacgagcaaaaaacaccttaccctaactcgaaaaactctgagattcaagtttcctatgtttaggaactgaatctaccatccaaaatccaaataaaatcaacctttcgacccgaaaatggaaatcgaactctgaacaatcgtgccggagaagaagcgttgggtcaatgtagagaaatacgtcgtcgattaatataaaaccactaatgttattacacgacgtcggttctgctacagtgtaacaggaagtcggttttgttataaaatgacacgacgacgtttttatgtaaagaactgtttaatgaataaacgtgattaggatagtattaacccgaaaccaaacactcttatatcgaacaaatatatatacactcgtatttattcgcctaaagccaaaaacccattagcccctcaaggtatcttccagaagcaacgagaagacctgcaagagaaaattttcagattcaactatggcggacgaagcaaaagctaaaggaaacgcagctttctcctccggtgacttcaattccgccgttaatcacttcaccgacgcaatcaacctaacaccaaccaatcacgttctcttctcaaaccgttccgctgctcacgcatcgcttaatcactacgacgaagctctctcagacgcgaagaagactgttgaacttaaaccagattggggaaaaggttatagccgtctcggtgctgctcacttaggtctaaatcagttcgatgaagccgtggaggcgtattcgaaagggcttgagattgatccaagtaacgaaggtttgaaatcaggtttagctgatgcgaaagcttctgcgtctaggtcacgcgcttccgcgcccaatccgtttggtgatgcttttcagggaccggagatgtggtcgaaattgacggcggatccttctactagagggttattgaaacagcctgattttgttaatatgatgaaggagattcagaggaaccctagtaatcttaatctttatttgcaagatcagagagttatgcaagctcttggagttttgttgaatattcaaatcaggactcaacaggctggtgatgatatggagattggtgaggaagagatggctgtgccttctaggaaggagcctgaggtagagaagaaacgaaaacctgagcctgagcctgagcctgagccggagtttggagaagagaagcagaagaagcttaaagctcagaaggagaaagagttggggaatgctgcgtataagaagaaggacttcgaaactgcaatccagcattactctacagctatggagattgatgatgaagatatctcttatatcactaatcgtgctgctgttcatctagagatgggaaaggtatagttttcaaagtgttcttttttttttgtgtgctagtctaaagtgatttgctttggttaggttatgagtcttaatgtctatgtgttttgttttagtatgatgagtgtatcaaggattgtgataaggctgttgaaaggggtagagagcttaggtctgattacaagatggtggctaaagctttgactaggaaaggaactgctttagggaagatggctaaagtctcgaaagactatgaacctgtgattcagacttaccagaaagctcttacggagcatcgtaaccctgaaacattgaagagactgaatgaggcagagagagcaaagaaagagttggagcagcaagagtactatgatcctaatatcggtgatgaggagcgtgagaaaggtatatactttgcaattgtatgtgctgtttgtgcgaggaagaatctcttagaattcagtaaatgtagctgaactaacatctttgtaacacaggtaatgacttttttaaggagcaaaagtatcctgatgctgtgagacattacactgaagcgatcaagaggaatccaaaagacccgagagtaaggcggattcatcatcatatatccttcaatgttgtgctcaaaaagagttccgtatttgactgttttaataacttgtttacttttttgctcgtcacataggcatatagcaaccgggctgcatgttacactaaactgggggcaatgcccgaaggattaaaagatgcagagaaatgtatcgagctcgatccaacattcttaaagggatacagtagaaaaggtgcagtccagttcttcatgaaggagtatgacaatgcaatggaaacgtaccagaagggtctcgaacatgatcctaataaccaggaacttcttgatggtgttaaaaggtatttatataaataggtgttaagtcacggggagattattcgcttctgttatctagtaatgtcaatatgcttatgtaacatgttttaaaccatgcagatgtgtacaacagataaacaaggcaaaccgtggcgaccttactcctgaggaattgaaagaaagacaggttagattctattactgctttgaaactgctttgttacgggtttaagagaaacctgtgatcttaaactaaaacttttgggatttgctttcgtccttattgcaggctaagggaatgcaagacccagaaattcagaacattctcacagatcctgtaatgagacaggtaaagaacacacttctatagatgatgttagaattcacaaatctctctatgtttagatcaaacatctcggagcaatcctggaaactgaaattgagctatctccatgttgatatgtctcaccaaaatctaacacttgttctttggacaggtactgtctgatctccaggagaatccagcagcagcacaaaagcacatgcagaacccaatgatcatgaacaaaatccaaaagcttatcagctcaggaatcgtccagatgaaataaacgaagccaagacattgatttcgattttgctgagtcattactcttttataactccaaacactaagatcgaattcttctcatttttcagacttttctgatatatcaatttttctttctttctcatatccatgcgttttaagacaataacaaccttgtcttcacaaatttgattagcttacatgtctatatagaccaaacaaaatcacaataagtttttatgtctaggcaaaacaaaatctgtttaagcagcaacttcttgatccttggatgaaagttggttctgaatatgttgaggaacaacgtcgaacttagccagttgcattgtgtaagaagctcgaccttttgtcatccctctcaatgtactcacgtactgaaacatctctgccaatggaaccagagagtcgaccacctaacaataataagaacaacaatgtcaaaatcagatttcatcatctaacaatttaggggttttttcgatcattttgaataaaacataccttgagaccaccgggtttgtctccgaagctgttaatttgacctcttcgtgagttaagatcaccaatgacatcaccaagatgttcttctggtgtaacaacttcaactctcatgataggttcaagcattctcggacccgctttcctcatcccttcacggaaagctcctcttgcagcaagctggaaagctagcacgcttgagtctacgtcatggtaagatccgtcaactagacaagcacggacatcaacaaccgggaaaccagcaagcacaccggtgctcatacactcctcaagtcctttcatgacaccaggaatatactctcttggcacagctcctcctttgatctcactcttgaattcgtatcctgaccctgcttccaatggctcaaaccggactgtaatatcagcaaactgaccttgtccacctgattgcttcttgtgtgtgtatttcacttcagctattttggagatactctcacggtagttgacttgcggtgcaccaacgttagcctccacctgaaagatgaaaaggaattagaagcttggaagcttgaagtagagaattagatttataggttatgttttaccttgaactctcttttaagtctgtcaacgataatctcgagatgaagttctcccattccttcaatgacggtttggttcatctcttcatcacgagaaaaatggaaagacgggtcttcttgagcgagcttgatcaaccctgtcgccattttgtcgatgtctgcttttgtttttggctcaatcgctaccttgatgacgggatcagggaagtccattcgttcaagaacaacggggttttctggatcactcaaggtttcaccagtgattgtatctttgagacccgcaagagcgataatgtcacctgtcaaagccactttaacatcttctctgctgtttgcgtgcatttccaagagtcttccgattctctccttctttcctttgttagcattcaacacgtaagaaccagctgagattttccctgagtaaaccctcacaaatgtaagagaacccacaaaaggatcactcatgatcttgaatgctagcccagcaaatggctcgtcatcatctggtttccgtataatggtaatttccgggttctcaggatctgttccattcatcggcgggacttcaacgggcgaaggcagataatcgaccacagcgtcgagcaatggctgcactcctttgttcttaaaggctgaaccacatagaattggcacaaacttgcccgtgatggttccttttctaaccaatctctttaccgtggcctcgtcaggctcaactccttctaaatagttctccatgacctcatcatccaaatcaacaatcaattccatcatcgccgcccgatactcttgagccaaatcttcaagatcttctggaatatcctcgtaactgaactttgcaccaagctcttctcctgaccaaactatagctttcatcctcacaagatcaacaacacctttaaagacatcttcagcaccaattggtatctgaagcaccagcggcttagcacccaaattggtcacaatcatgtccctagtcctgaaaaagttagctccaagcctgtccatcttgttaacaaagcaaatcctaggcacaccatatttatcagcttgtctccacacagtctcagactgaggctcaacaccagcaacactatcgaacaagcatatagctccatcgagaactcttaaagcacgttcaacttccagagtgaaatcgacgtgacccggtgtatcaataatattgatcctgtgtttatcccaaaacgttgtggttgcagctgaagtaatggtgattcctcgttcttgctcttgttccatccaatccattgtagctgtcccttcatgcacttcaccgattttgtagtttcttcctgtgtagtaaagaatcctctcggttgttgtcgtctttcccgcgtctatgtgagccataataccgatgtttcggtaatctttaagcggtacagcccgcttcgcctcggctatataacatcagaaaacaaacataaaacgaagcaattcagcaataaagttcaaatttttagcaatatcagagtaaaaataattctcaggggcattttgacgaacacttagaaggcaagtaataaattttaaacttttatctcaaaagagtaaaaagatgaaagctttgtgagagagaggacacagaccttcagctgcagcgaagactgagaattgtttcttcttttgtgagagcttggaagaacctagcccaatacgagaagtacccagaaactgaggaattgaagaagaaatcgaagaagatgaagcacgaggaggaagacccagaaaggtagcacgatgagacagaggaagaagaacaggtcgtctttgtgaaccattaagattacaaaccaacgaaccagaactagaactcgagattctcagagcatccgccgccatttttataaaaatcgcttctatcttcttcttctcttgcttcttcttcttcctcttgggatattgaatcaattggtgacactctttggctaacgtatcacttactcgtaatctctcgtatggcttggggataacgaagccttttgggcttggcgtggtttgtttctgaaccgttggtttaaaaattgtttttttatttctctcgtcggttttaaaatttatatggtctataaattgtctgaagtttttattggtccaaatggataaggagacacgtcaccgtctatgtgtttaatccggattttggattaatttttttttttttcttttaagatttttggtttagaaataagggcaaataattagtatctaaaggtaaagtgaatatattaacaatttcgattcaaatttatttttcgtttcagagaaattttagttttcttttattttatattttgtggttttggttggattaaaattccaaattaaaagacaatccatttaagtcatatattcaaatattgttcgatttttggattgcgttttttttttatatggattgcgtattttagttaatggtgtatatataacaacagtacagctttattcctcacaacactagctcattatcaaacttaggttaaaggaagaattcacaagtatggcaaacttgatttggcgataacaactgagtagtcgaaaagctggcacgtctaagacattctcatttctcaatatagctcgtgtttcatttatgattccgtcctacttgtatagaccaattactctctcataaccatatttataagttctcaaatctaattaatatagctcaaactaatgttataaaaaacaaaacaaaaacacatacagactagttcacaacagacggaaggaacattgaaaaataaaataaaaaaagacaaaggtacaagtataactaggttttgcttaattaccaaaatagacaatgtctatgattatgattctctaattgtattactaatgaatcttaccaagcagatatttgtgggccttagaaagagtccaacaaggcaacaaggtgttgcaactttttcaccatctttcaataatatacaaaatattcacatacgatttatacagaaaaatcaacaatacctacctatatgacaagtacaaggtgtgacatacatgtatacatacatccaatcataagctttttaattttctagtataagtataaaacaatttttttctgtatgaaaacatttaattaagaaaagttttcttgcgtagaggcgtacatattaatgagagcaagcgcgttgctagtaagccgagctacctcaacaacatgtcgtcgaaccaaatctttcacggccgttttaactagactgaaaccatccatacatgtgtcatcattcgtgagagcagcactaacccatgtttcaacatccgacataaccatctcaaactttgcactatctttatagttgatagaatccaattcccttatcgaatcttgaagcgaagtcaccgagtctccaatctcttcaacgcaatcagcaaccgcaactacttccaaacgtgttagaccacctccgtgagatatgtttttgacgaatttggaggcagatttggcggatgagagggtgagattgagggcgatgacagcgagtttttgagggttggaacggattgttgaggcgtaaggagatagagagttgtagcaaatggttttgtagagtgtaatgttacatgatgttttgatgtaatctaagttggtttgatttgagtatgttgatgaagatgatgatggtgataatgatgatagaggtgatgatgatggtggcggtggtggtggtgatgatggtgataatgatagtggtggtggtgatgatggtgataatgatgatggtggtgccgatgatggtgatgatgatggtggtgatggtgataatgatggtgataatgatgatagaggtgatgatgatggtggcggtggtggtggtgatgatggtgataatgatagtggtggtggtgatgatggtgataatgatgatggtggtgccgatgatggtgatgatgatggtggtgatggtgataatgatggtgatgatgatgatggtgataatgatgatgatgatgttgtgatgaagagaagaatagctatagagagatgaaggatttgggtttgagataagatgttcatttttgtatcgtgctttcttttttgggtcgtcgattgctttaaaagaggaatggcctaggtgaaactaatgggcatgtgcatgtatgtatatatagtgtgtgtatatatagaacatgtgatataatataataataaattatacgtaaaaggaaacttgtgaaaagaaaattggttgagtctattaataactcaatcatatctaataacttttacttgattgaagctgaggttttttggtgggaaagcttaccaattacatccggctccaatgtttaacgtattctggatttgtcacatatgcttcaaaaaacatattttactcataaacgaccaaatatatatatctttaaggccgaagagtatggattcccatatttctaaagtatggaagaaatcgttaattgattataaataatttatgaaaatgaatataaataattattgtatatgaagttgttaaattgaatttattaagttaagtatttttcacatataagtatttttcatacattaataattgcgtgaaattttagcaatggaacttttcttccatacaatgggtcgatatgaaaataatttaagtagaatgttatgaaatacttaaagttttattaagatctaagaaaatgttagatattgattaatttaggcatacacgtttattagtaatctaagaaagcaaattgaggtgataaaactatttttactttatttattaattattgtatttattagttgtaataattagttatctatatgaactccataaataccgtaagagaggcttgacctttgaagaatttagttggttttttctaaatctgttgtatatgatgaattaattcgtccaactacagtttggtccagctatataattcccattttattgaagctagatccttccaaaagaaaaataaattcagagtggatacagaaaaagatcagtcggcaatatagccaataaatcaaatctttgaaatttaataaaacagtgaccaccgtagtgattcgcttctaatgatatatcatgaagactctagattctaaatatattattcggagcataaaaatatttttatagttctgagattataaaccagaatttagactaattcccgatagagttttcgtttataagttttctatattgttcataatatttgtttttgaaattttcaaatgtgaaaatcattatcagccactgaaaattatctgtcctgaacatggagacaaaatatacgttctaatttctgatttcgtacaaggatcggaaggtttcagaaaacgtatttcgtgatcctttttcacatatacgtacattgtgtttgacgtgttcgtgttgtgttagaattttgatttcccgtttataattataagttatatattttttttttttaattttgtttaagaattaatcaaatgaaggcattcctcattcacgatcatatttgctagcccatgcttcttatagctattgttttgcctactagacttgtttgtctaaaagaagtaaattaatatatgcatgcatgagccactctttttgtctctaaattatgctattttaaaggtagtgatttgaatacctatctcatatttatgtgcttgcctttaactatacatgcccttatctgcctactttaaactacgtactttacttgcatgtacttgttttttgctctatccagaaggtagcttgaactgacatcgtgactttatatagaagtgtcaattgggctgtccaaagcccaatggtcatgtccacttggaccatcatttttcatgggtttttatggttggtctttaatggacatggtctgaaaacttgtccaagaccattaaggaccattgtccaatggtcagcctatggtcagcccatgatttttcaactacacttaaagaagtttattttgacgtgacacaacttgcatttcgtctctgcgttactgtttggagctttgtttgtgtcttacatggttctatttttccttgtttcttaagcaaaaccctttgtttatgagaaacaaagaaaagaaaaaacgattacataagcttctaagtcacagactgagaataagaaacacataaccataggctcagagtttaagagaacagccatgtacctgtttcttcccagtcttgaaacgttcatgcaagggtggtgtttgtgtcctcttgaccttggatctcatcagtttctacaataagaaaaaccgagctattaatctaaaagctgcagtccaaaagccatataagtttactattataaacgagttcaagatgtgaatattaccaacttcttgaaatccacgaaaccagtttctagtacataggagggcttgcacattagtaggtaaaaggcagcttctatatttgttaagcacacgactacctatactaaaagctgattccgatgccacggtagtgatcggaatgcttaagatatcacatgccatcgatgacaattctttaaaacgcgagacattgtttttccaatatgcaataacatccatatctttaaaagagaccatatctaacacaggctcttccaagtacatatctaatggtgattttccagttccatttctttgagaaaagtaagagtaaaacccctgaaatatgaccaacaaaagaaaatatgaccaaccgtatagttcaacaatcacaacagacaacccattctcactaagtataagaatgcattttcatagccactaactatcacaacaaacaaacatacaagaacaatactgtaaacacacaaaattagcaacttacatcatatccaaatgggatatcctttcgtgaagattgagaagtgcttgctgcaacgttgcatgtggttcttttataagctccaaatagttgaaccatcttatcacgcacatgagtcaagttttccttactggtcaatggattcagaatattataacaatattctaaagctgagaatttcaatcttggatcaagaactgcagccatcgcaagaatgtcgctgaaatcttcccaatatttatcatatttctccgtcatatcttccaccatttcacgaataaccctatcatgagaatcatcatgatctcccagccaacatttaatcgctcatacttgcataaaatacacgtttgctgtcggataagacgaacccgaaatcagctttgtaatctcagcaaatggtttcaaaaggtcacatatcagttctgctctttcccactccacagcagatgggaaactcttataaaccctatctacttctgcaagactacgcaatacatccttaaactgaattgctcgtgagagcatatgataagtggagttccagcgggttgagacatctaaaactaaacttgcctcagtttgaattccaattgtatccatacaattctgaaataaattttctcgagtctcagatcctttcacatacttcacagtctctctaattttctccaaagctccagatatcacttccaaaccatcttgaactatcaagtttaggatatgtgctgaacatctcacatgaaagaattctccgctgcagacaagatctttttgtagctttctctttaaaatgctttgcatagtatcatttgcagaagcattatccacagttaaagtaaaaattttcttctcaattccccaatctttcaacagctcactaagcttcattgctatagctactccagaatgtggaggcgggaaagcagagaaagataagatcttcgttttcagaacaccatcaacatctacataatgagctgttaagcaaatataactttcaacagttaaagctctccacaaatctgttgttaagcatattctacccgggattatagctaacttttccttaagcttaattttctctctttcataaatcttgtagacatcagaagctgcagtatttctgctccaaaattctatagaagggttagcatatgtaaaggcttctctaattctttcatattcgacaaacgaatatggaagattatgttgaactaaagccactgcaatcatttctctaaagaccatcatatccacctttctgctaattctaggtgtacttccaggagtcttttcacaagatctcatatgacgattcatggtattagtaccatttcgtctcagattcaagtgataagtctgctcacaatatttgcatgtaacctcagttttcccattaggatatttctgtcctctatcgaagtttttccagcatgcagcacgaaatctacttacactactattacctctctcagctgtccctgaagaagcagtttcatgaggtagtatttgatccatttctggatcttcatggtccatttcttgatcctcaagattaaagttgtcttcatcaaccaagttttgagtatccaattccatatttctgaaacaaataaagacatacacacgtttagcagtgataattaagcatgaacaaatcacattccaatgagaaatatacgataataatcaataagacaaatggttcctattccatgaactatgtttttaaaacctttcaatacacgtgaccttttttaaagctcaagcatatacgataataatcaataagaaaagttcctttttcttttcgtatcaaatagcaagaagatgaagatgacttgactttgtcgtctgcaacattcaataagaaaagtttctttttctttattataaagtctttatatatatagctaagccactttaaaatcgcaacaacaacaaaaaaaaaaatgtagaaatagggctgaattttatatagacattgtgacttcagatatatatgacttctatactaatgttctatagaacctttttcactttatctaacttcgaattttgtcgagtggatggactaagtttctctttgagttttcacttccatgtttctagttttttccattgggcagacaaaaagttttaaaatatcgattgtaaaccaaactaattttgattaatgcaacatttacattttatccatgtatgtttttttataattttaaaagctttaatttaatgttaaaatcagacatcaaaattgttaaataatcaacattagtatataaagggaggggggggggggtggggggcatcgacttctatataagtattaattactaattgattgttggtcgaaaactcattattttctcacatgatatatagtagatcccaataatctcgaacaagtaaaactgatctgtaatgaaaataagatacaatccgagatgaatgaatcaaaagaatgatcatttcgaagtaacgtgttgtatatgatctcatattagaagtgtggaaagttatgatctcgtattagaagtgtggacgaactagtctaatatacacgagtcatgaacctatttactcatttttaaattagttttgagttgtaaatccataatttctcacatttaattggttagtcttaaaaactgattctcacatttaattggttagtcttaaaaactgatcttgatggtatagacgccaaattagaatcacaagtgcactcactagtcatgataactaatttgttacattcgtttccgtaatgaattagatgtttcgtagacgtaatttacgatggccaaaaagttaacatcattatcgttgttgcatgcatacttttctattggtaaaaggtatacgaaatcttaagaccatattagtctaattatatcttgttggcattatgtgcggccattcggccattccccttataggtttatccaactgattaaatatctcaaagttatagcttaaattcttatgcattgtgaatttttcattgtcatcatcgtaaaaaagttgattttataccctattgaaacatacctatggaaaattggaaaattataaattcataaaacatattcatatttgaactatagtttagtcgttaaggaaacagattataaaccgtacgtcgaattatcaattttgaatcaaacaattccaataacccaaaacttgccatcatcgtccaggaagcaagatgtaaactctctaccctatgaaatctcttggctcacaaccacgtaaactttttcagtttaaataaaataaaaaaataagacaatatagaaacaaaatcaatctaaaagtcacgtctcaacaacacaaatagcccattacggcccagcccaaacttgagacctgttgaggtacatataaataaatgcatttttaagatcttaaaagtgattacgattaggaacttaaaatgtagaattatttcgttcatcattaaactaagaaatgcgtaacgtcattttcaaaacattaaaatatgtaatagtgttttccattcgtcttattttgcgtctttaaccgtcaattgcgggaactaaagttcgtatttgatttattttaatttttcatcacaaaatttggtagttgtcgttgaaagtcatgtcctgtccttttgggtgacgtttgtcattttcgagcacatgaacagaattataagcatagttcgctataagacagaattcagattaatttactacgtactattaattattttgcaaaaaaaaaaaacgatttgcagaaattccttaaatttaatttggaaatttattgccagaggagattttaatgttttaaacatttgaagacgtcagttgtttttcaaaaaaaaaaaacctaaaacgaataaatctaatggcattgtcgaatgaatgacccattttgaaactaaaaatgttgagtgaatatttcaactctgtccacatcatacattacagatcatgtggtcaattacagatgttagttataattgtatatcactggcttaaatttttagtatatgatattaatcagaattatttgatttcagtattatctaatgaaaagtaggtcgttttccaattattcagcataaaatacgctaattttgtcttgaatcactagaaacaaatcaagacttttgtctctggacaaatcttgtctcccaacgttctcccctaattatgttttatcatcacgttaatttgttagaaaacaaaatccaaaagatttcaaaatatataaacagaagatgtataattagtaatcgttcttctgttttattgttatagtttgaagcttttttattaattactaaattacaaaaaaaattgcattaaaaacaattaaaactttaatgtatttctgatattatacatactataaaaaatttagaagggagtggactcatttagtaacacctttaccaatgtttacacgtagccaaaataaaattgaaaaatagtaaagcttagtttgaatctcaataatgcatttaatatggttcaatgattcaatctttgcgatgaagttagaatatgccaatatgaagtatatctcttcgacaaaaaaaaaaatatgaagcatatctataattttacacccaaaaaaggtgactatatatcattatcttaaaatacaatattatacaggacacaacaaagattgttacacaatcttgagtttactttccgaccgacgaaaaaaaaagataacaatttacacaactaattgaagtttagattcaaactctcacttacaagccaaaattttcacatttaagtccatttaaggaaacttcacacttcgcttctctgcaaactgattaaccaaagcaagagcattgctagtgacttgagccacgtgaaccaccttataccgaatcagtcttttgactttgcctcccatggctcgttctgagaatccatctagacacgttgtctcgtccgtcaaagcggcactgacccatgtttgaacgttactcattttccacatgaagtcctcactagccacagcatgaccagctcgagcaagttccttaaccgattgagctaaccggtccacgctattgcctagcacttcgatgcaatctttgattgctagatattccctacgtttaaattttggtgtcctaaatataatgaaaaaaatgttagggataaataaacttttgtaatctcttaaacaccggtttgggctgcaaacagagagtactgcctggttttaagtgtgtggttcacaaaaaaaaaatgttagggaaaagcgtactctttggttagtttggcgacgaagatagtaacggatttggctcgagccaagctgatgatgagagcagtctgggcgagatcttggtcattgttgtggcggatcttggtggcgtaagcagagagtgtgtgcacgcatagtgatggatattgggtggtttggcatgaagacacaataaactggtctgattccgaccggtttggggttgcagatgaagattggagaatggttattgatagaagtatgactagaaagattgtatttttaagctccatggtgttttggtttgtttgtttgtttattttttctaaaatgaagagaaggtgtatcagtggatgctgtttatatagggtttgatttaggtcaaaataaattattaaaatatcctatatcgatttggatttagatctttgcacaatatataaaaatgtaacaattcttaactcttaagctagattttgggctaagttagactacgtttctaatatggtatcagagcttatggttggtccaacaaacaaattcctacaaaaatggttttttacctatatggccacacaagtgataggtcttgttgtatttctaggcttggaccgtttctcacacgcatctcggaaaagcctattaaaatgttctatattggttaggattaagatctttgggtaatatataaaggatgtgacaatctttaactcttgagatagctttcgggctaagttaggccatatccctaatataaaagtttttttttattttgttttgcatatattttctcagtataattttaaatgatgttttaaaaacattctgtttcattttaaatggtagtttcaattttctatgtaaaattaattataattaataattgttggtcaataacattttacagtatatatttttatttattaaattagttgtagttattaatatttttatgtaaaaaagataaattactgaaattttggtgatttttaatatgcgtatcaaaaattttaaacatcacgtaaaataaagcagaggtaatattttttgtatatacttcttttgtttcttaataagtgttgtttaaacaaaaaaaaattgtttcactttattgttgttttaatttttttatgtaaaattattactattttattattgtgattcttgaaattctgtaatttgattttccattggttgaaattgattttaaatagataatgaaacatatatatatataaacttaatttatgtgctaaatcattaaaatacaactaaataaaatatctcaatcactttggttaaaatcccactgaccaaatctaactctacattctgatcctttttaaaaagtactatttacatgtgttaatgtgcagattaagtttcaagatgagtcatcgatcagacgagcaacacatatccacatgccataagttacactggcaatagtttaaagtttttttaaaattgaaattgcaatttttgtagtatttaattagttacttttttcccaatgcattattgtgtttatttgagatgcttatccagatcataatggatacaaacgacaatggtctctcatgcgttttctttggttactatttaattttcagttcacggatgagcattcatccgagtaatcagggaagttgaatagatatttacttaattttaatttgtctttggtcaacatgaacagaatacgtagttactctcacttttcatatgaacagaaaaactcatcagaaatgacagttccttaaccagaacaaatatttaaaaaataaataaagtaaaacccaaaataaaatttctaaaacatatgaaaatttcctgatttctaaaacctatgaaaaaatttcttaaaataaaatggaatgaagaaatatacgccaacacaaatatgtgtagtacgtaacgttagtgaacacgtgaaaactcatccatataagtttcatatgaatctacggttataagaataattacatggttgactgaaaaaaaactcacatgaatctactcgtaaacgccgatagaaagtaaaaagaatcttgtccaaattccaaaacccgtacgtcggtagctaacacaatacaagaacaagtgggcatgttctctttcttcatttatcgagtcattttgattttactatagtctttaattatttatactagtcttaatttactcttacgtatataaccaaacaaacatatgcatgtgaagataataataaggataattatgtaacagtggtgcttggaacttggaaccaatagttatcaatttcataaatgtcacctctctttctatataatttttttttttttgataattttttttcttagttattgttccttttgtaggttcccacttcccatacttattcatgtattttgttttctaaaacaaaaggtttcatttattacgaagaaaagagatttgattgttacagcgaactttgttccatactaaacagacatgcaatgaatgaagaaaagcttacaaacgtagatttttcgagatactagttggaaaataaaacacttgacatatcatcaattttggtcctttatttcattgttttattgcattatacggtcatacgaaatttcatattttgtcatcgctattatttcattaaattctttttattacttgaagatctgaaatgaccctaaaaatataaacatcgttcggaaaaaaagaaaatacattttactcaacaaacaaaaatataaatacaattttccccgataatagaaaacattcaaaagcttgagaaatctttcgaagactcatatgatcctacactgtcaaatacttaagaactgaagagcgtatcttctccatgtaatctcctgcttctttctgcaacaaatacatatgaatttcatacgatgattaaaagctttatcatatagtcaattttacggtttggcattcgattttccggtttgattcgggttacttgagtttcacgttttggaaaaatgggttcgagcaagaaccgaaatacatatgttaatcaaaaacagaacccgaatcaaacctaaccgaacttcgaaccagaacaaatttcttttgtcaactcaattattaaccgggtctaacctggtttcctttgtatgcattggctatgttttcgtcgagaagtgccaacaaagatctgttgatttggtttttctccaccatatccaacaactgtatcaaaagaagaatcaacaaaatgtctcaagatcatctcatgaaatcatcataaaatgtttttgtgtttatgggtaaagtgtcacatactgtggtttttatatcggttgaggttaagagtttggttaagctatttgtagccgtcataagctcattttgcattttgtcataagcctctgcaaagcaacataacaagagaagttatcaaaacctgtaaaatcgttgagtccatgagtcacttaataaggaagcaagagatggcacaaacctattccttcttctaaagctttttgaagtgtttcaagctcaatcaatctatcttcaatatcctgcatgattttgccaccaaaaaagatagtttagtagtctgattttcggtgacagattaaatgttgttgcttcaagaaagttgtaccgcagtcttagtaacagcaaatcgaatctgtccgatttcaagtcgtatctgcgcaaagaattcgtcgtttaacctgtaaaatttacagtaatcatgagctcgtttgaagtttagtcatcatctcaaatccccaaatttattactctagtatctatatttcaacgaaaacggattcacttgagaaactaaagcaccaaaacatcttcacagggtcgattcatcgaacactgaacatctatattcaacaatttactctcccaaatgctattttgatcaaccaagtatcaatatttcaacaaaaacggattcacttaataaactaaagcaccaaaacatcttcacagaggcaattcatcgaacacgttgtgtgcaacatacaaaaattgacaaaccttcctctaagcctagcgatctcatactcaatctcctgagcttcagtatcaagaaagtactcaatcagctccgcagcagtatccggtacaactctagactaacaaaacccaaacaaccaaaatcaatcgatataattgcaaatcacaaatcagtatgatttcaagaaaaaataagagatttttaacttgtctaagagcttgacgacgctctttctcttcacgaagttgtttctgaaaagcttctcttgcctctgaatctctctctagccgacgcttaaactcaagccgagctatatgaccagtttgagccggacccaacacacctttcggatccttccttcgaatcaatcaaacaaagaatcaatttcatgaaactaatctcaaataaaacttccttgttttgatcaaattcttacccattcgcatgtgattttgctcctccgtgaattaaatctcggaatcgtacggacggtggttgcagcggcggcgattccaaacgaaagcgtagccatttttgttttttgttttctaagtgtgagctctgcttttttggttagctacgttatctctaaacttctcttatctagttatctgttttaatggcgggactattcgtgaccgttgaatttacaagtgctgagagacgtttgatcagatcgtaaccgtttaaacgttttgatctgacgatcacatgtttgtcacgtggcaatataaggaggtccttttaaacatgtgcagaggcccaattaatcaaaaccttgtaaggcctttctatagcccaattatagaactattcttatcgcgctggttatccatatggtttaatgctggtttggatccaaaatttatgaaatgatttagtcttgcaaattacttgaagatcaaagtatttcaggttgacctagtcctaccacaagaaaattcaacaaaatttatggaaatttggtagatgttttattactatattagcataggctataatttttatttttgacagctacaaattgaagtgtacaaagaacaaaagttggcaagaaaacaaaacgtgattaactcatcctagaatctagagatttacgtcaaatggcaattaatataaacatcattttcaataaaatttattaaattacctaaaaaatattcaatcttctagttgaagtatctgagaaataaaaacttatcatgaaaaagaagtctttaagaaagcggcactaaacgctattagaccatttcggtatttatagacgatgaaatatttttggtggattatgcggtcattaagcgaattaaacgactattagatggattgtgtagatttaaatgtgttataatatttgataaaaaatttgaatctttttaaaaatatatataattgtgttaaaaaaaactatactttttattattttattttatcttcctttaaaatgttaaatttaaatttattttcaaaaaatttgataattttaggctttttgataatgtttttcaactttttatataatatataagtacatattgttttattctaaaatcgtttagatcttaacgaatagttataggcgttagacggcctcaactaattgttataagtgttagacggaaagttaccgtccccttagcgtttattttaacattaaaagaaaagatacatactattaaactaatggagtattaacaagaaaaaaaagaaagagtaaaatacgaaaggttccttaagcaagtttataaatatttatagccaaaaacaaaagcaaaaccaaaaatcacaagtaaccccaaaagaaaaaaagcaaagagagaggaaaagaaaaaaaatgacgaagacgatgatgatctttgcggcggcgatgacggtgatggctttgcttttggttccgactattgaagcacaaactgagtgcgtgagcaagctagtcccttgcttcaacgacctgaacacgacaacaacgccggtgaaagaatgttgcgactcgattaaagaagcggtggagaaggaacttacatgtctctgtacaatctacaccagtccaggtttgctcgctcagttcaacgtcaccactgagaaagctctcggtcttagccgtcgttgcaacgtcaccactgatctctccgcttgtaccggtaaccaatttcattttctccgatctccgattttttaatttttttgtcaacaacatgcattatgaatggatttgtggattctgattaatgtgaatgtgactaagaaaattagcatagttttttgtctactgctaacattttttagatcttgttgagattatgaaacagagatttgcaatttcatatatcagtattaatcatgtttttgttttttgtttagctaaaggagctccatcgccaaaagcttctttacctcctccagctccaggtatgaaccaaactcttcacctactccttacaattatttccttgaatactttgttatcaaaaaaaaaaaaaaatgaaatattgatcgacttgattgtgtattaattgaattattcgattgatttgattagtagagttaattaaccaaatcaaatggtgttaatcaaggcaattattcaattgatactctaaatcgatcttataattttcccagatttttctctctttttttgttttctatataaaaaacataaacagagtgtgaatgccagcttttacttgtgtactttattttgtctcgagtattgacttgaataattcggacaaaaccactaaaaaatgaaacttgtcagattttttatttttttataaattttttatttgttatttgctgattgacgatttgtcttatattatatggatgggtttctaaatattcagcagggaataccaaaaaagacgccggagctgggaacaagctcgccggttatggagtcaccaccgtgatcttgtctttgatctcatccatcttcttctgaattcctttacccggttttattattattagctcaataaattctcgagatttgtttgcttttggcttaacttatttaatatttaaagaaaaacaaaaagtattttttgttcacatgttatgtattatcattgattcattattgagtcccatgttagtatatttaccggttataatcggactctatcatttgcatatctgatttgagtgtggatctgtgttgttaattgatgtaatctttattatataaattgaaaatgaaaacaaaatataaaaaactgtgttggtttaaaggtcccaatcctcattttggtaggtttgactaccaactagaaacaatatcatccataatattgcttctttgtgctatcttattaaatgtaaaccaagaacgcagttttattctctaattgtgttcataaattaaacaacaaaagaacagaatcgcaaatttaattaggcgatgcgagtaacaacagcatgtatagcatcagcgagttgaggcactgtcttcgaacttagacttgccatgcttatcctcctgcaaatacataattttcattttgaagctaagatttttcatgaaaacagacaaagaaatataactcaatttatgatatgagtaatgatcttaaatgctttgtgtcattctcatttgggacttcaaatagtagtcatgcacccactagactcttttttcctagtggtttacatgaccactatttttagtcccaaatgggaatggcctaatcagaaagtaaatggaaaaggaattatattctttaactaggctagaagacaaaaataaataaatcatctagcataatctgaaagtaaatggaaaagaattacattctttgaaaattttaaaaatggacattatattcctctccaaaattgcaaagaaataagttaaatgtcaatattcattcttattagttcacatatcaaacacaattttatgctttttcattaattgagaagaaacctactttttttaactcacatttatggaatagaaaaacgtttgcgcttacaattaacagacaaaaacttgtttgaaacagcggtcatggtctcatatgaaaaaaaacatgtaaacaaaagccctaaaaaatatgtatctccttgtttcctaataatcatgttaactagtagcctaaggattagtagtagtactataatcatttgaaaagactagatatttcccttacccatcataagtcatgtaaatgtgatattctttggccatcaagcgaacttgctcctcactcaatccggtaaaagtaaacatcccaatatgtttaataatgtgactccaatcaccaggtgttcctgaccaaaactttttttttatattcctgaacaaaacttatatatgcatgatccatatctgagaagaaagatttaacaaaaaaaatgaaggaaagaaaagacactaaatggaacctctagcttctagagctgcatataactgttgacgcatgctaattatgcggtcagccattcctttcagctcaatggtccagtcattgtacatatcactaccaagatgtatacacataaactttgagcataaccaaaatctatataaaaatttcattatagcttttttcttatagtttataatacattacctgttttttagaattgtggcaacaatagatgcaccatgaataggtggtgtaagatacataggcctcacaacaagtagcacttggttctcaactttcttagcgacatcttctgatgtgcataccttcacattagacccatgaagattatataatatggcctagactatttcaaactcttcaatttctgcgtttgagtgtgtaaagaatttagaagaataatgtagattttcaatatacatcattttcagtttattttctcatataatatgtttggaaaatgcatatgtaacgctaaattatccttcattagatctaaatgcataggcaaaacaaaaggaaagaaattgatgccaagatgttatggttacttacgatcgtaagagagccaatacgctccccataaaggcccatatttttggcataactttgagctatcaaacattcacctccatcggctacaaacatacgaaccgcttgtgcatctgcgtcaaggctaccactagcaaaaccctgaaagtgttaggggaagatgagtcatgttacttttatggcttacctgatgacgcttaaagaaaaacactataacagagtctcatttggtgtagaacaaagcaacaaaacaaaggtacttttatgacttacctgatatgcactatcaaagaaaggtaataagcttttcgatctcactagtcgtcgaatcttttcccattgttcgaatgttgggtcaactcctgtggggttatgcgcacaagcttgaagtaccactatagctccaggaggtgcagcgccaagatcctcgagcatgcctattttgatatttattaagtcattatttgaaatcatgattggtatatatacttaggaattaacatcaactgggtcatattaaaaaaacatttggtgaaatttggtgtgattgggtcaatcaaacaaaattaagataaagtgcaacaattcaatgtgaaagacagagagtttatggacatagttataaaactacctttgaagtcgagtcctcggctcttcggatcataataacggaaatactggacagacaaacccgccaaagtaaaaatacggggatggttcccccacgttgggtttggaacgaaaatgacactctgaaacaaagagaaacgaaattagtgacaaatatgttgcaatgtaagtagcaaatgtttgtatgctaggaaaatttattacaaaatttgttagtatatactatattgtagaattgttgtatgtactatacaattaattcggtctttaattttaccgaattctaatgaccattgggaaagctaagtagagaacaatttacttctttgttgtgtgttgctagaaactcagctccaactctcaaagaaccagtaccagacaaacattgggttgtaacaactctattctctttcaatgcaggactgtccagaaaaaaaattatagcaaaattaataataataacataagaaaaaagatgaaagaaaatagcagtgaatacattacctatcatcacctaagatgagcttggtacttaatttattaaattcaggaagtccattgaggggaagatattccttgtccctagaccttaaggtaaaccgtaaagcagagaaagcatagactaatgatttacaaacacagaaaaaagatttggaaaattacattttgttcacggttgcgttcgtgtttacatttactatatttatgttctcaaaattaagattaaaacgagaatattttttttaatttataaaaaatattttgtatttcaaaatgtgaatcttttttattcatatatacacaaagttgcattatgatataaatattgattaacttacaggtcgttggctaactgttgctctgctcttctcacaacatcaagaacaagaggctttccttccttgacaaaaaaaaaaaaaaaaaaaaaaaaaagaacaaggagaagactaatctaatcaaaactttgaactcgcaaaatggctaattaacttaaatcaagattatgaagatctgaaaattacctcagttcgataggtacctgcgctcaaattcaacttaaccggactaggatcatctctacaagcaaaaattacctgtttccataatcataaatatatatattagaaaaagattaacataaatacacatttggtcgaagaagtatataataaatgtttatcaaaagaagtatataagaaatcaacaagaaagatataagtgaaatcgatgaaaagcctttagagtatacactgagaacaggatcttcgggagcaggaaggacgcttgacaagatggaattcatgagaattgattgaatcagttgaaatgaatttgaccccaaaattcattaaaaaaaaaaaaaaccaattattgaacaaagtgttgagaaattaaagcataattaggttcaccaacctgtccaaccacatgtccacatgaatcatactatgtattgattgtgattttaattatttatttaccaaatcagttcaattcgcatattttaattatttaggtaaataactaaaaattaagcatattttaatttaattaagacaaaaacttaacaagaagaaaagaaaaaacgaagtaacaaagcacagttgcatacttgcattgaaggtcttcgtaactggaatagatatcacaactaaaaaacaccaaaggagcttctatcagtcgtcagaagagatgatagtcttcttaccgcagaacagggattttatctgctgtctttccggtctttcttgttgaaagtcttggtaacaaagcttctttacaaggttgtacttgagtcggaaagggtctggagccatctcagccacgtcaagaataatcttacgactgtaaaaagtttcacccttcttcgtttccaacgccttctctgcttcgttaagagaagcaaactcaacaaagcaacagcccgtatgctggctctacaataactcgaacacgaacaacttctctctgaagaaactgaagatttttggtattatgttacgtcggggattacagatattggacgttttgttattattgcaaaaaccggcaaataaacttcaacaagtgtttggctacaccggatatttgatcttctctacttgtatactattagagtattagtcagaacagaaccggtcaagatgaagcaaatggtctacagaccggtaagtctttttcgaagaaaggagcagacccaagaatcggattggattcaaagaaatttgctggtttaagttcaaagctagccgcaacggttggcataactggataatcttcttgacaaggtacgtgatggaaccctagtgtgtaccacagtactatgtccttgttttcgatcgaacggtccctgtttcaccacaaaacaaagatatcagagaaatgtttcaaaccataaacggtatgtctcaattggtatagttcataaattagtttcgtaccggtctgaccaaacttgtagtgtgtcatcaccttggctctggtaaattagaactcctccggcatattgttctgaccggttatatggagtcacccatatctaaaccgataaaaccaattgcatcagttaaatgaacatttggacacattaagtcctaaaccgagattatagctaatcagaatcttatatataaaaacatagcctaaaattaaatacctgattattagtgaatgcacctcgaatttgaggaggatcatcgtgatcaagcaaactcgctgcattaccacccggtacgatcctgtaaccagccgggtttcctacccgagattttcggttcgggttcacaatgtggaattcatatgggtcatagaggctcaacttgatctgagcatctttctcagtcttggctatatatttcttgaccttcaagtaactcttccttggcgattttcctgttggaactctctgcttctctagatgaaccttaaccaaagaattattcatcggtccatcaatatccatgtctagatgaaacgttatgaaatgatcatgaacgactccaatcacattctcagagatcaacggtccagcatcatcctccctatcacctaagtcatctacattatcgtaaggtgtccctttcaccattaacattcccgaagccgcgacctaacaatagctttaaacttaggaaacttgataaaaaaacaaattatattcatatacagaaaaaaatgtgttcacataccgtaacacggatcaaaccatcagtctgaaactcccaatcgaaaatatagtcgtaatttccaaccgaagttgccattcgagctaccaatgtaacttttggccttgactctcttatctgttaagtcgtcaatttatgaatcaattatcattcaaaccaaaaagcaaataaaaaccagtccgaatcaaaccagaaaatagggaccgaaaaccaaattaacccttatatgcttattatagttatactttttgtctatttagattggttagaaagggaaacaaattgaactaaaacatgttttttaagaaaaagttatcttatactaaaaacaaagcctaaaccgtaaactcaatcatattaaacctatacgtactatatccgatttggtagcttggattgaacggctagcgaactccggcaagaaaacgacgaaatagctttcttaaaaatccgaactataccttaaaaagatctaatacccttagttcataaaacttaattagtaaataaaaaaacaaaggacatacatcggcattggcaaaaaggatctcagaatgtcgccagctgatatcgcctgcatagcgttcaaacaagcatatcatattaggttgaacaatgggtttgccgtctggagaggcgaaaacaccgtctatatagtaagaatttcgagggcaatcgttgagaggcacgagcggcattgccgtgggtcctaaaccgagctcgcctgcatccatataacctttgtagtaccatccttcctcagggtccatgtacggtacaaacaactctgatgggaatcctttgtacatcacacttcttggttcacctgcttactccacataaataaacagcatgcgtgagacgtacgttattcgaaaaagaatgttgtagtcaaatttcatcattaaataatattaaatgaaccatttaacctaaaatacttttcatgacaaatgatcaacatagatttagacacttttttttttttgtaaatgtaaatatttgaattatggtgttagatacctgtctcggagtcacgaaccgtggcctgagatatgatcataccggctcgttggtcagctttaacatggaaaacccaattagcccacttaaccaaatgcccatcttcgaccctaaaactgggaccgtcaggttgctccatcgaaatcgggttaatacgatccatatgcaccggtttattctgaacaccaaaccggtattctgtaccggaggctttgggaattggaattgggcctttatcgatgatcttgataacctccaatttgtctagatcgaccgttacataaagtccttcgagtggtctcataaaataattggtagtgccttgtaacgtgaaacattgaactcttatgactctacgtccttcttcctccgatccaaaccatccggcaaacggtgtgatgcaagctaaatcggaaaacttaaccccacgagcttcaatggagcggttaaattccaagctcttcaaaggaacctgccatgttgacatgacaaatgttatctttttttattaaaccggttagtaagagtggaatatccgagtttggtcttgtagcacaaatgcacaatggtattaccgtattagagtcgacgtagtattataacacgggttcaaagtttcaaacccatgtgtgtatgaactctagacgacgttaaatgttttgctctaaactaataaaaaaatgagacccagaactttagatcactggctctatttgacctgatccgatccataaagaaacagccaaaaaattgaactaaaaaattgatgtaaatctaattagataaaaatccctgaaatgaaaaaaatataataaaatcaactcatttgaaaggaagtaatgataaccagacaaaaaacctatctatagttttgtttgttaggatgtaaacagaatcaaaccggtaatctgaaccggaaaatttctgtgtttccaagaaaagtagaaaaccatctatacctgcgaagcagcgaagacgtcgttcaaggtgagaatcggataccctgaagtccggttaatcacatcagaaactacccgacccgaatcaagatccaccgttatctcatgtgtttgaccaccccaataagctacgaccgcagctcttcgtgacagaagcttatttcccttcttccactggacgacacgtgacttctccggctcatcgagagccatggagtgaatcgtggccgacccggaaccaaaacccgggtcatggttcgagagtattgttctgactctattgatttctcgcaccgttagtggatcaagtggatgatgaggcttttctaaagagtggtcaacgtggacttgacgattcgagccgagagttttccggacacgagtaccgaacaagaagcctgagtcgggtccaaagacccaagagtaggtggcaaagataaggagaaagctgaagaacaagagaaacagacgagcaaaagatggttctgccatcgattgagtgagagtttttgactatcttttggaaagttacttataaaagctgagataaataattacttagtccagttaaacaacatgttaaataagaaataaacaataattaacgcttttcaaagtcctgtacgcttgatcgcatctatgagatattttactaatttattctaaccatgcaattggtttaggttatttgttttataacatgttcatgtcattacaaacgcaataaactaatgtaggttatttaaaagaaaaaaaagtttaaatttggctcgactatataagatccctttagctttttgttgggatcagaacttcacaacgaaactaccctaagctagtttgtcaacgtaattaaatattggccaaggttattcatgatgtctagagtttagtcaagttacgatcgcatctagagtttaccaaatttttttttttttttttaattagagtgtgtttgatcgcatctctaaatatatttctgattggtttttgattttttgatggagtgacaacttagatggtcatagaggttatccattcaattaaaacagtatttaaagactaattagctactatagtatttataagtttaatgtagttcttacttgaaagttgaaacttaaacgtggagatttatgatgctaaaagatttcttcctcctaaattcctaaacgatacaatatttggttctcgcctccaatttagtgatgcacactatctaaactcaaacttgtattatcatcatcaaagaaagaaaaagaagtggctgttagatgctacacctagaaagctcagctaaagtagactacccagaagccaccgcactatgctactcatggcgtgattgactctatcaaccaaagtgaaaatttgaccctcttgtctttttataatctctcagccacttggtcttatcttctcttaatacgacactacgtgtccatgtcctctctctcgctcactaataagttccattattgcttttgtcttttcgtacgatagacctcgagatcctactttccttacacgatcttaatttaataagattctctccctcagtggtttcactatagcggattcagacaggttttccaaaaggagccttaattagaaaacaagcaaaagcataacattggcatgtgcgataaaacaggttttccgaggcatgtccgaatttgatttatttttatagttcattaataaaatgcagggagacattcttctccctgtggcctaccaaaaaaaaaagtatgatatttgcaatttcaaaataaccagttgtactgaatcgcgcaaataaacccttacgctattaagtgatcaacacagttgataaaacgcatcatttaatttaaacttgttagacgacagtacacatgaaaaagaaaccccctccttattcctatcggaagttcaccttctaaacaaacccaagcgagctagacacgaaccacaaaacaaccacaacaagaactctaaccaaaagtcattgcaacataatgtccagagaatcaagacacttgttccttagcagtgccaataagaagaacaacacagaagaaaaagaaataaacacttactgtgtttcattgatctgcacatcagaataaataatcttttcccgaacacccaacacacataactagaccattcattccaaagatatttgaacaaacaaagctcacgatcaaacacaagatcacttataccattccaaagattccaagttcctaaccaacaaaactatcatactaagttccaccaaactaagaaaccaacaaaacgctaatatcgtgaacgaaaactcgaaaccaacctcaaaggagcaacgatttgatgcagaacataaagaaccaagttcaagcaccaaacgaacatatacaacatttgcagaattcaatatcataaaggaaccatcttttcaaataacacagcttaattatgaccaaattcccaattacattaacaattaaacactttctgaacaaatcctaagatttgttctaatctaaagaattcaaattttcacagatttagatcttacttagcaaccattctagcaataaaatcctcataccggatcttaccatcagatccaacatcaacctctttgatccactcatcaaactcactcggctgcaatttctcaccgatactcgtaagtatatgtctcagatctgccacagcaacgaatccagtaccttccttgtcaagcactttgaacgcatcacgaagctggcgatcgaacggctctgttttcagatgtttcgccattagatctaggaatcgattgaaatcgaacggagacgagagattctccgtcgttatgattgatttgagttgtgattctgttggattgccgccgagtgaccgcattaagattccgagctccgacggtgcgattttgccgtcgccgtctgtgtcgaatagcatgaatgcttccttcattgatgagacttggtcgttgctcaaaccatccttgctcatcttcgattcggttcttacgggttttcgaattcgggtcggacctcttatggagaattcaatcgaatcgtctttgttcttgacgacgactgtgtagcgtttttttgataatttagagaaagagagaatcagagaaacaataatacgtcgtcgtttttgcttaagatcaatggtccaattatatgggcttcctaagcccatgtgaagattaatcattcaattttaataagaaaagtaaacttcacttcacgtcaaataagtaacaaagctttgttttccaaaatgttttgcgttaagtacaaaaaagattagaacaacaatttacaacgtagacgcagctgaatacaattttaatctaaatctattttactactaatcaaagatctgtcgattcagtcttgcagctttgagtgaagagatcatcgattccccttcttgagaaagactcttcctttcgacaggaacaagtcctaacttctcacgcaagtattcatttctcaactcatctccatccatttcaccaagctcaatagcttgcttccttgtcactaaaccgtaaagccaaagacctgattcgggtttctccatttggatcctaaccctcaacaatgacatggattcaggttcatccgaatttggagtaaacaatactgagaaattcccgaatgttaaatcgggtgtctcgaataactgatccaaacagcggtcttcttcttcgtctacctcttcttctttgtcgatgcagatctggttaggatttaaagccgatgatgacgctcttcttctagcaactctaagtatgtttgctgcttctctcattccacttaagaaggctccgtgcattgtagctggatattgtctgttagtagcttcacctgcaaagaacactcttccatcaccaacactctcggctaaaatatcgtaatcatctcctgatgatccgaccgcaacatatgagtaagaaccgtatgaaaacttgtcttgtccccatctggaacagagggcttgaaccggatcaggaacaacaattccttttgggtgatatattccgcgtagtatctgcaagacccgtttaacggaatcagtaggcgacaatgtctcgaatctttccgcagcgtctccagctacaagtgctacaagtaatggaccaccggaaacagaagaatagctgtagaacaagaagaattctcctctggtggacggatcttcggttaatcgcccaaaagtatcaatctcttcgccccagaagttacacggaaacaacatcgccactttgttcaacaatccgaatccaagtctctgaatcgcttctttcttcttatgaggaagttcgggataaaactcaatcgaacctttcttcagaacacctaatggaaccgtgcaaagagccatatcgcagtggaactctttgttacctgtgtaaaccagaaccccgttgcttccatatctgatgctctcaactgtactcccgtaaaaaattggaagattttccgctaaagcatgtacaaatatttcgttcccacctgggataaaacaatgatcaccacccatctcatacggatcatcttgatcccaatacgccattgacagattccccaacaatgtagcatttgcatattccaagtttgctaaatgccaatctaagagcattctctcttgctgatcctcagcaaccccataaaccaatcgaaatgtttcaagcgcttctcccaaaggcacatcaactgatttattctcctctatcatcgactgtctaagcttacaaactctatccaacaacttattaaacgatgcctcaatcttagaatcaacactagcatcagcaagctctccattgggaagatacaaaggacaaatatctctaaccttatgaagaggcaaaccaagttgcctcgccaaaaccccaagcggattcccattaattccggtgagaacgcttccaccaacatcagccattgcctcaacaccatcaccacctttcatcttccgtgtcttaacccgcccacccggtctatctctaccttcaagaaccaaaaccctaaaccccattgacaacaactgtctagcagcaaccaaaccagctaaacccgcccctacaacaacaacatttggcggctctacgccatcaaacgacctcaatttcgcctctttaataaccggagcaagcccgaagttaatataaccatgctcaagaaggaaattgtaagcagtatcaactaaggttttgtgttcagcacgtatagactcaagcgcatgatctcgcgttaaccaattcgatacattagatcgccacagagcaataatgtgattccttacaacaatgtaattagcttgatctttacctccgatgatcgaaaccacattagcttcaatttcttcctccgtgagcgaataaaccggaaaccctaccgacattgcgattagcgcttctgaatccacctctttgccgacgctagtgcggcggtttcttgagaaagctgggtttgcgttaatctcagtgaagaaacgtttcctacggcgtctttttcttgctctaggaccaggctccgccgcattagggttttgtgattgttgctccgttaccagatcggaagattcttcttcaccgagcgattctgagattcgtgcttcgactggaagaggaggaggaagaggaagaggctgaagctccgttaatggcgattggtcatcgagtgagttttggccgtcttcttcaatattttgctccgattggctcggtgagagtgagaagtctgtctccgtcgccgacgcatcagaaacgacttcgttcacgtcgtcggcgataagctctccgagaggttcttcaccgggtacatccacagtagtatgagttcccaggtcttcgggtttagtttcgggtcgggtttctttagtctctgttgacatagctctagctctgtgtgtgatgatgtgagtgacgagtctaccaaagtgtagccttcttttcttagctaaaaaaggaaggtatacggcaacgtttgatctctgcacccgaaatgtatgggccttggcccagacccatctagaaaagtaccccttcggtttgttatttgttaggactattgcattgaaagattgcacaatatcagttttgatcctttgttttcgcttaaacaatacaagtgaaatttcataatcattatacaaataagtgattatatctttatgtcatgaaaacttattatacaaaaaatctatttatcatctaaccaaaagagtaaatgggggaacatgacctaagattcttttaaacctctagtgtcgttttcgaaagggaaagaacaagacaattcttctttgtgccataactccgtcattaggaattaagattgaattatggggaacaaatacattaggtactactagataaagcataatgtaggtttttgtttgttttttgtttgtgtgcaacggcatatataatgtagtatttaacattcttttctgaatcttgtgtattgacattgtagccttttttatatatagttttaatgacatgttagaagaaaaaaactctaaatacaaaaattatctttttgcactcatatgtttttttttgctaaacttgtaaatatcattaaaatgaaagctaggtgttacaagagtaagtcctaataaatagttatgctttgccaaaaaaagaaaggaaaaaacagagcacaataaaaagatctcagaagaaggaaaagcaacgaatcccttagtgaagccataacgccattaaatgtctgaagtttttcagatgtctcctggcagtgatagtgttgatgatgagacgatctaactctttgaaaacagctgtcggagagagatcgatctgattatgaatgaaattgttcctttgcctccaaaccaagtaaaccaaagagtggataattagaagcctcagagtcttaggagaggcaatactctgaacctgggcccaatgaagaatggaattccagtcgctaaaagagtgagcaggatgcccaatcctaatcataattttatcccaaatgatgctagtgaaagcacaatggagaaacaaatgatccctggtctcgaaagatccggaacacaaactgcaggtagtggagacatcaagaccccaagaagctagacgggactttgttggcagcctatccagatttgtgacccataagttgaaagcaagcttaggtgtgcagcctttgaaccaaattaaaggagcccaaactttttctgaaactcttggccgtaatttctctcaagttttggaggaagaaaaaccattacaatgttttaaagatatatatcagcatatagaaatatatttatacaaaaagatagtagattaatctatttcatttggggcaatagtaacactagcagtagtagtgtggaatgtgaatttaatcaaaaaacccttcattatccaacagaagagcaaatttgagaaagtgggaaagaaaatggggaacataacctaatattcttttgatcaaaacctctagggtcgttatcgaaatggaaagaacaaaagaattcttctgtgtgccccaatcccattattaagattgatttgtgggcaaaaaatacatttggtattactagaaatggcacaatcaatgtatatatagtatgtacgtataaattatgatctcaattatgcatgtgataaaataaaagcatagccgaaaacagccaaattatcatttgcttctttctttttttgggttaaaatgtagctgatattttgaactaagtattccataaaacagtagctattttcgcaacgtaccatataaccatatgctttgtctaccatatgcatatcatattcgcatacgaccaacttatgaaaaattagatttgcaaaatattaagatgtcgaaattgtttaaaagataagtgttagataatctaggtgattttgtataagtagaaaaggaaaaaaacacatcagcaatttatcggaaaagaatatgatcgataagaaatctgaagaaactatcaaaaggatcgtgtatgaccgtgtatcgacatcagaaaatatcaaaatgaaaacatccacctaacaaaaaacattaatatctcaaaatgcatctaatgggaaagcaatatattgtacattaacaatgtacgaccaagtataacagctgtttttaaagttcatatttgtgtctttgtaatatatgtgcacgtatatacctacatacgatttgtacacgtataatagatatatgtctctcatatttctttttgtaagatgtcttctatacgtgttatcagattttcaaattcctagttttgtaagatcttgaaccgaaaattttgttaaaatattcaactgacatattactgaaaacatatgtgagtttttttagttaaaatatgaaaccgaccaattgtaaaaaaaatatatgtgacgttttagtaatttagtatgatgttatattcgaaattgagtattacttgaccatttgttttcataatcaaacgtaaatgcatatacatgttttatacgttgagtatgaatacgatcaacgttattgattctttagcgaataaatgtccaaaactagttgccgaccaaatccaaaaatatgtccaaaagaccaaaaccatcaacggaagaatcgttctaattttggtttaacaaaggacgtgggtggtggaaatatcattaacttaattaaactaactaacatctaatcatataagaaaagctttttaagaaaacaaaatataaaatatgaagaataatcaccaacaacctacttagtacgtggaatatattccataaatactaatatacatagtaccaagtcaattcaattagggagagttagtgatctattgtaccaaagcaatggacaattcaagagtttgttagttaaatataatacttttaagccggttccggctactaatcaaagattaagtagtttaatctcgttataatccaaatccaaaactctaacacgtcggattctcctggacaaaatgtttaatgtcaacgatctaacaacgcaacctatctttcaagaaaagaaacagagaataaatcatcttttggataaattagtaatgcacccccttagtttatgatgttttacagatttaatcccattatattatcttctactatatgtcaaaattttgggggttacttaatacttactacaagtcataaatacaagatctattttgcttcaagagttttagttattattttccatgataaataaattgaaaatttcaagtattagtttagattgaatcatggattgttagttaaaacctaaaagaagaaacacaagtttgtctaggatgttaaatgatttgtgaaataaacggaacaaatcaaataatggaataccggaaagactttagctgaacatatagagttttcgaaaagaacaacatgaaatgttaaatagtattagtagattaatgatgttttaggtattctatttatattttttgacatttttataatatatagcaaaattatttttcaaatatacagaaatgcaaaattttgacggatattctaactgataaaacatagctgatcatattttcaaatgtaaaaccatgaagcggtatattaattaactatcaacaaacaatttcacgaattattgtggaaattaatttaaattttattataagatctccggttaataaaaaatgtaaaaacacttatgggtttttattttggtaaccgaaaaatttggaccaatcttcgaaacatgatacaaagtttttatcatttaatgtgtttatagttaacaaattcatagtggtttagtggttgaataattcatgaaaaagttaaaaggtttagcatttcatgagtcttctcactgtattttcaatcaaaattaaacggtaatggggtgtgttgtagaataatggctaatcataattaaaatcacaatgaaatacccattcagccactaaatcaccatgaataagtttttacttgtggtacttaactaagttccataacatttgtgccaaaacgaaataaaccaaaagtataaggggcaatgtttgactgatacgcgcacacactttttcccaataaaatatcaacacaaagacttttctctcatgttctcatgtgttgtttataaaagcaaaaacatcgtttggaggttttacgctagactctgtctctgacccaacgaagacgttaataaacaaacaaacaaacgaagagagaagatgaaattgatttggtcaccggaaactgcatcaaaggcttacatcgacaccgttaaatcggtaagttcatctcctctgttttgactttggtaacgttttttcgaaagaagaaaaaaagatttcatactttctcacgaagtaaagcttctttcgatccttttcacattactcgaaaacccaattatctagatgtgataaatttttcgtatgctttgggattttgagacataaaccttagatctttgcacgtcttggccctttcttttaacaatttgtaacgtttttttaaaaaaaattgggcaacttttgcagtgtgaaaatcttggaacgccgggagcggcggagctagtggcggcgatggcagcaggatggaacgccaatttgattgtggaaacatggtcagaaggagaaactatagccataagcgttggcttaaacatagcgagtcgacacacaaacggaagacacatttgtatagtaccaaacgcaagatcacaaactgcttatcttcaagccatggcagaacaatcttgctcaaacttgccggagacgattattatgaacgaggaaggagaggaattggagcacacgatgcagacgctacaaggaatcgatttcttggtagttgactgggatcagaaggatttcgcagcaaacgttttgagaaacgctgtgtttggtagcagaggagctgttgtggtctgcagaagcggttaccgaagaagcacttcgtgtttcagttggacaaaagcatttagtgaccggaatgttgtgagaacagtgactcttccagtttctggtggtctagaaatcgctcatgttgccgcagcaagaagctctgggaagagtgataataacagcaacaaaagaaaatggatcaagcattttgatcaaagatcaggagaagaacatgttattcgaaagtaaaacaaaaagtgaggaatgttatgtttgatactttttttgttcataatttgtataagagtggtttgtacataaaatccaatatactgcaaatttttattggatgatttgattgttgtgttacattaaattccaagaaaataacaatcattttaagttaaaagctttagaatcaacctggactccattgtatggttttaagtttaatcatcgtaactaccgcggcttcttctcgcagatttcttgtctgacagaacttttttgcttttaagtcgtttattgtcagctttcgcagcgctgaaaatgtaagaattcaccgcgtcaagatttggattcagagttaaaacaatggaatcatggaaaaggatttgatttggttggttctcacagctttactattttcttcttttgttcttctgatggtggaggtggaacatatgaagccgcatcaattatcgcctgttcagttatgtgattaaacaaaaacatctccgttttagatagaatgaaacacaccatgacgaaaagacgtgatattcaatatattacctgtagtttttcaagtgcatcgtcgatgttacctctgcaagggaacatactgtcataaatagagaagttattgagaatggaatatgaaagagaggactattaggttactgacttctgcgttctggttttggtagaagatatcacaagttcaccatccttgttgatccgattcttctcctgttgacaaacaacaaaaaagctaactacacaacgcatagaaacaaaaagccaaatactctattatcctaaattttggccccaaccagatcaagagtcaaatatcaaacagcattttcaatattatctctgttctctccatggaacacgatatagataaaattcacactcatagttttgaaaagggatgatagagttttaaaaacaaaccgtcagtaagattttctctctgatcctgtcactcagccaatacgcgttcttaacattgaagcgcatatctactttggtattcactgtaagggaaaagtataagtattgaaacatctaaaaactacaatgaaaagtaaggtaaaggcacaagaacaaggtcacacatttgttcacattctggcctccaggaccaccacttctagcaaagttaagtgtaacattgtctgcaaataccaaaaacagatacacatgaaactatgagcacatccaagtcaatatataggttattcatcaatctactacaaaattcaatccttcccttcctgaaatgagctttgtatcagataaagtgattgaatttgagattcatgtatacaatacagactatacagtgattaacgaatttgatttgagattcatgtatacagatgatcattggctctacttaaactcagttcatagaaagttcaagagacatcaaaaagtagaattc

SEQ ID NO: 111 - DNA, 79469 bp, Arabidopsis thaliana
aagcttgaaagcggcggaatccttacatattccgacgtacttaaccggagcttccggcgccgccatcttctcttctaattttccggcgattgaatggagacaatgcgtcgccgtttttcaaaagcggtgcggaagagaagagtgggcgaggaagtttagagaaactggaacagaaaacctaaagcgaagaagtgatgagtaaaactcctctacacgtggtctttagtaaacttcagtggatatgtaacatgatcgacggtcgagagtttatcatattttaaatgggctttaggaaggaaaggcccaataaagaaatgaatatttccaccacagaattatgaattgagtaaaccagaaaatcgaagaagaacggcaatggctacttcttctactcagcttctactgtcttcttcttctttgtttcactctcaaattaccaaaaagccattccttctcccggcgacgaagatcggcgtttggagaccgaagaagtctctctcgttatcatgtcgtccttcagcctcggtttcagctgcttcttccgccgtcgacgtcaatgaatctgtgacttcagagaaaccaaccaaaacgcttccgtttcgaatcggtcatggtttcgatctacatcgtttagagccagggtatcctctgatcatcggtgggattgttattcctcatgatagaggctgcgaagctcactccgatggtaaacatttcttgaaattcgatttggttaattcgtcttcttgtagattttagggttttgatttgagtttgatgttggaatttgtgtaggcgatgtgttacttcattgtgtagtggatgcaattttgggagcactaggccttccagatataggtcagattttccctgactctgatcctaaatggaaaggagctgcttcttctgtattcatcaaagaagctgtaagatttcgacgcttaccttgatgttcaattttgtgtgtatgttccagtattagctacttcttctttaagccttattttgtgtgtggtactttatagaatggttcagaattcaagctagatccataagttgatgggatttactcagcttaataatactcttgagtaaattattttcatctataggaagtcgaagaaatatggaaatcagatcttatccctgaactgttgtcatcactcaacgatgctatctataagcttatcactcttgtatacatgatttttgtcttgaaaagccttggcataactcaattttctgttgaattttaggttcctgcatctttgtattgttagatttcaacacatatgattgatgataagtagaggtactcaaggttgaagctataaagtttctttcttgtcctgtcttttaagttatgggttcacatttggcgtaatgtgtttgttaagttcaccatgattgactgtgaatgttgattgcgtggaagctaatctgaatcacttgtaatgatgttatatagatataacagaagaaatgttagattctcgtcggtatgaagaatgattcaataaacttgagacgaggtttatttgactttgtgtttcaggtgagactcatggacgaggcagggtatgagataggaaacctagacgcgacgttgattctccagagaccaaaaattagtccacacaaagagacaatccgatccaatctgtccaagcttcttggagcagatccttctgtagtgaacttgaaagccaaaacacatgagaaagttgatagcctcggagaaaacagaagcatagcagctcacactgttattctcctcatgaagaaatagaagtcaaaattgattttagctctttatcatattccttaaagtgtctcatcttttaagaaaaacatacttttgattgtaaagtgtaatcatcctttaaaggttaattaatcgaatcgtttcgtagaagcagagaaaatcgaatcatattttgttgatgattcattgtgattcctagttccttggtcagatttgaatataattggaaactgtgtcttggactgcaagttccttgtgacacaattttttatttgtctgtcatatagttgttgctttccttgtctacatgaattcttaaatcaaaatcagagaataataatatcatactgaaataaatacatcaatgatcagagaataatccttacccgtcaatataaaatcaacttctgactaatcagagacttaacatactgcaaatcttaagagattatacagccgtgatcatgatcgcacacaatagtagtgtgatgatgcattggacaaaccggagtgtcatggtgagactgagaccggtaaagagcttcttcacgttcacgttcacgttcacgttcattttcttctttcttcttcttttccgcagctgcagcggtttccgcttccttcttcggatcgaacgggccaaatgtagccattttcgcactctcccatctctttttgagttttttgagaatctgcatttcgtcaaactcaccaatcaccgttaacttcccttcttttgaatccatggtaatagttgtaattcctggaataaaaagtgttaagatttaggtcttgagactaaggaagatcttttcaaggtggtaggttcttttgagatttcaattcataatccataaagaaaaccaaaaacagaacgtattattattattcaaagctttgcagcaaaagctcattaacaagaagaaacttaaacttaaactcacactcaaactcaataatgagtgattaaaagatttggtttttcactaaataatcatgaacgagacaagaaaaatcaaaatcattatttaagggatcatatcataacccatgaagaatcacataaatagagtctgtgtgtgtaatcgaaaaatctttgccttttcaatttaaaacgcatgaacagaacaaaaaaaagttttgagggtttcaaatcaaaactcatcaaaaatctcaagaacaggggaatgtgagtaacgaaaagctttgctttttcattaaaaactcatgaatattactacataaatcaatttcaagttttgaggtttttaattcaaacccttaaatgatccaaaaagcagagtgaatgttaaaagcaaaagcttttggcttttcactaaaagaacagaagaattagatccatcgttggagatagtcttaacagcaatcatttttgtagggtttcaattcaaaacgacagaacctacaacgaatctcaaaaccagagagtttgtgtaatgaaaagctttggcttttcaataaaatcacatgagcaataaaaagaagaaaaaaattggtgcatgttcacctgaacagctagctactgtttggatgactttctccttagacctctcgtcgcaaacatttatcatcaccaccattttctgtagagaaagtgtgattagaagaagaacaaccattaatcaaaatactccaaagtctataaaaattcaaaagactcatttttcagtactttgaaaaccaaatgacacattaccttcattttctttgtagaacagagaagaagatgtggtccacagtaaaaagttggtgtgctttttttattcgtgtaagcaagtcgatgatgctttatgtcccaaataacaaaccgccacattaaatggattcagagaagaaaaaaaacataatgttggaatatcatagtgttttgtgatttaaattttttttagaaaaatgttttcttcagtaaaaaacaagagtgtggatttcacttgtgagaaatggcttatggatgttttcaactgtacttgttattttctcctgtggttctttggaaatttcttctctttaatggtcccatgatgagtgtccgtcgattattgatcgttactatatccagtaatttccatttcaaaagtttttatattgtcaaagattcttccaaggtccctttttatggtaagttcatgttcatcatatggttttgttcatcatgatcaattgtttttagtaccaaccgccaacatccatattttgtttgcattttgtacttcttctccaataaacaacgagaaatagatcatgaaaaatccccgaaaatcatatttcaatttgtgttatgtggctagccagacacgtcatttatttcttagctccaaatgttatattgtcctaatttttctttttggcatatgtttattgatattattttgctttataattcatttgcaccacaatattccgtttttttttttatgtgcgttaagaccgaaatgaaagcatttgagtaagcattgagtaatttccacgcacactttatgcaagttatttcactcgcgatcacaagaaaaccatgtcgattttaccaaaagaaaacaaaaaaccatgtggaagatatctcttaaattgttcatgaaaactctatcttaatggtcctctgttagttctttttttaatgtcgacttatgcttcaagaaaccatgtgaaagtctctaaattaacaaaagtatgtgtgttttctagaaaatcaaaccacttataaaatcatttgtaaaggataatttgtaatttctgaagttcgcttgtttagtattaatcccttgaatatgttatccgtcacatcaaagaaactgtgttttcataatttttggtctttgagtttaacctattagcaaaacttcacatggtagttaaaatttgtcatcattaatattgttttaagattagaaaggactctcatctataacgagtggatcccacgcgcaaattcttgtggaacatttctgagttatgtggcttaccaaacaaatcattaagttcttagttccaaatcttctactgtcctaatttttctttttggcttaaatttagaattgatactattttgctttataattcgatttcaccacaatatttcctttctttttctcattatctcacaaattcaaacatatttagctgtctttttgtaattgcttttataataataaattagttacttgactcaagaaaaacaaatactccaattactcaagcgaacacagctaaaaagcctaaaataaaggtcaaataaaagcatccacgatcaaactctacaattcatccttactcataaaatgtctttatacattaattaatatgaactataaatcaaacaaatcgaaatagttaaagtaccttatgtctttttattcatttttctttagaactctagcaaatgacacaaccttgctcctccttatcattgaaaatatcacgaatttcacggttgtatctgtaaagagcttcacgttcaatctcttccctcttctgcttagcctcagcaatttttgcttctttcaaagcatcataaggtacatataatgttaatttagcttttccccatttctttctgaggtttctaaccaactccacaggatcaacatctcccattactactagtgtgccttctttcaaatccatataagatgagtgaattcctgaaaacaaaatattaaagatatgggctctgaagtttgggaaactctgtaaaactgagcttttcttatgtaaagtaaaaaacagagcgtaaaagattaaatgtttgtttttttgataaaataaatcaaactttttttaatataacaaagatcaaatgtttgtttatcttttctaaaactcttacgaaaataagttttaataggatatgatttaccgggtaagtcagaaatactcttcgtgattttccctttggatctctgatcataaacacccatccacacaatcattttctgcagaaattgcatgagaatacaaactataaattaaaaacactcgaactgtgtataaattaaaagattgttttttttttttggtttgaaaaccattaaaaaattaccttcatttttaagagaacagagcagaagatggaagaagaaaatgaaaatgtcgattattccaaaatgctaacaagtctatgctttatataccaaaaaatgaaagcaacatgaattgattttattttatttttgtatgcaaaaacatgaattgatttggaaaggaaaataaacaagcgatagttctaaaaaaggaaagctctgatacgatataccacacgcgccatacacaaacataaaaattgttttcttcagtggagaaaaacgaacgtggagttcactcgcgacaagtgcgtctggtttttcatctttcactttacttttgttggtcttactttggttcttagtcaaagtggtgaaatgctgatgatgcactgacggtcgataattactaattgtttctaactttttttttattagtcatataccaatttcaaatttgttattagtgaaagagtcattcaatgcctttttctgttattggatttggcatcaattgttttttttagttttaccaacattacacgtttgtttgcattttgcaatatttcacccattaaaaaccgagggtgttgtttttgcaaaacaatggtctcttgtgttaatccaagaatgatgtcatattaaaatatagatcgagttagagaagagtttataacagttttgacatcttggccgaatgatttcccctatcaatgatgaaccttggctatcatagatatttaccaaccacaaggttctgcagaatcacgatttttttagtttgttattcccaccattccgcaaatttatacgattttgcaacattcataaccaatcataaaagcccaacctatcatagattcataaccactttgacactttctcaattgtagaactcataggcagtaaataaatttctatggcgtatgaaacgcgtttaggctacaaaaacctttttacatgtcgcaatcaatcccacaagactctattacgtgccgcaaaacaaatccttgcgtgaattataacaaagtcttcattattgtttatacaaatttcgtttatggtttacagtcgataaaagaaatctaaataaataaatattttaatgatccacgaaacaacccatagatcatgagaaaacgatctttatctatctcagtgactaacatagattttattagaaacaaagctctctaatgagcaaaatatgattatcccaaaaagaggttataaattattcgaggagattattgacaacagtgctctctatagatcatttttccaatggaaagatgaataactctcaccgggaataaaagatgttgatttctctgaacccaaaagctattaaaaaaactccatgaagtttccttctctaactctgtagagcggcttgagcaatctcgagagcttcttcgactgaagatgcgcttgcgagtttagccttatcgacaagtggttggcttcttgctagctttggtagaagctggaactcctgtttcaagagatatacataacaatggaagcaattaaaatccatatagttaacatatttacatgaaaacaaaacccatgctgatgtaattgctattgtcaagtttcaatgaccgttccaaaatattctaattttagtctcgcagatctaaagaagcatgatgctctaaagattggctaattcagaatgttaacgagggagatgctaagaaagactcttacctcaggcgatccgctttctactagaacacctttcaacctgcctgtgttacgataattactcatcaaagttagttaatttgctaagctgtgtatttgtgcaaggttaactgaagtgagaaaaggctgaaggaattatttaccagattcaatccagaaggtagcgattttcgggtcaaagttcccaacctccactgtttctcccactggccagtatgaatcagtggtttagctacagtggaaatattgtttgagtaattggatggcgtcatatttaggtcaaatagatttaccattatctccgaaaaactgccaccacacttttcttgggcttccttcatactcgaatactcttgagtagaaatatggaagataatcgtacctgcaaatattgagcaagacaagaactaataggtgaatatccgttaagggatacaggcaaagtctacagatctttccagggaagaagcttacgtgtcagtgtgtgccgtgagtagtgatttcacacagtgttgtgcagagcggcgggcgtgatcaacatgttcaactcgagtcatcctatcatatatctggtcatcagacaataagatgatgagtttgcacttcacgagataattgatggcttaacatatattatctagcagcaaagtaccttcaaagggaaggctgcgacatctccaatagcaaaaattccaggggtacttgtcctgaacaagccatcgacctgtggttgaagatgagctcttatcaaacttttaattgtatcaacatactgatgtagtttcttgtgaagttctaactctgaaaaccgattatcttggaaaataaatccggatgttttgtaataataatacctgaattcctccaattgatttgttcatggccaaagtttcaaaggggccaatagcaggcttagctccaattccaattacaacctgtaaagtaaggatacacaggtcgtacaaaagtcagtattacattgacccttcacagttttcatttgatcaaagttgttgaatttgcatcatttgagaaagaaaaaagtgaagctgagctacaactataccgtgtctgcctcaattgtagacccatcagcaagcttaacagctgatacacgcccatccgaacctgcttccaagttatttatggaagcgccctgttcaacagaaagagaaattcaagtttgcacactgtgtttctgaaattcttaggtttgcaggaaagcaaaggcttcagtataaggtgttgatcgtgtgctgatatcttaccttgacaaacttaacaccattttgacggtacagttcttcatatttctgagcaagcgatggagtgaacaatctttgcaaaagctgatcttcagggaatacaatctattgttccacatgggaaagcccaaaagcaactgtaagttagtacatctgttccacaatttatctgaacgtttctaggaatttgtttaactcatcgaatgattagaagtattcttcatttctagcacaatttaaaaattcaagtgaaagggataataaccgttgtatctagattccacgcaacagctgcagcagcaacctccatgccgatgtagccaccaccaacaatgacaattttctttgcctttccctgtatcacatattggaaggttattttgtagccaggaaatttggatttttctgatgacgcatattacaacattgcattaagatgacaaaactggtaactggtaaaaatgcccttagcttaccagagatgctatcagtgaatcagcatctgcaacctcccgaatatagtgaacccctggcaagtgcccaccgattttatctgggaacctacaataaaaatccagagcaaatattcataatatcagtatacatggttgaaaaggcctaggttctctgatgttgtttatcaatcattgcaaaaaaaatgcgactttcactcaccttgaggctgtacaccctgtagcgataattagagatccatattttaactgcttccctgcgtctgtggtgagtgtttgcttttcaaaatcagctccagccactggatcttcatatattacctgtccaaacaaaatgcattagtaagacacaagagaagaccacaaattcaccgacgtacattccaagctgtacagttaatcaaaccaaagacacttcacttacattcatatattttagaaaacaaaactatgtatcagaagatgaattacctcaattcctttctccttataccaatctggtgtttgcctttctccaccacctccaacgcaagtatgaaatccctgcatatacgaccaccctcaatataaacagagatcacaaaactaaatcatacaaatcttcatatcagtaacaatcgtaacactgtaaacaatctaccggtactcattccataatgttcatgtagccaattaagagcaatagcactaaaagaaccactcaaattgatcgaatcaaaacattaaagttggcaaagcttactggtaaacgagctggcttcttctctggtgggaacaagtaagcttttgtcaaagccggtctctcataaggtgcgtaagcctaacaataacaaccacaaatccaacaatcaaacaaagtaaaaccaatagtgttactgatgaagaaaacactaagggatcgatttgaatcacctctttggtcacaatgcatagccgaccatcagccattccattttccacaaaagttctagcagcataaccagcagcatttcctccaccaacaatcacaaacctaacacaatcacacaatcaatcgcatagaaattcatcaacgccagaatcaaaattggaagaattatatatacgaactcgcgattctcgttagcgaacgaagcagtgacgaggcttctggaagcgattctagaaccgatcggagaaaaacgagcgggaaatcggcgagcgagagacggagaagacggacaccaaagagataatccggacttcgtcggcaacgtggttgatgctaacgccatgactctacgaactgtaacaacagattagagagataagatttcgatctagggttttgacaatcgaggaagaagatggtggtgagtgagagagataagaagacctgcagacattagtttataagaagagccaaattcagatttaattattgaaacaagtgtgtgagtctctctgtagtgttggctctataacaaagctaaagggcaatgagagtagtttgaaatttgtgaaaagagagatgatttattgtaaaagatgggtagtgaagaatggagctgacttgtcttgttgcttttgattcatttgtcttttgactccgaattttaatatctttattgacatttaggctttcaatagaacttgcaagttaatggaactaaaccattagcagattacaccattctatttttaggatggaaaacaattcgtcgcggacgaagcttatttttaagttaaaatggtagttggtctgtggggatttttattttattttcctaggacaacaatccctaatgcataatgttttacgataccattgtaagggagctagagttaagaggatttgattgaagttagtcactctagccataatgatttatgttatgtccttcaagcagattatttcatggattacatagaggttgttatgctcttgtagtttaagagagtttgatgatttagatttgatacaaaaaaattgtcaacttttgcagataaaagatgattttaacttttaaaatcctccatttgccttctttgatctcacattctcacttgtgaaagcttcggagccgtaactaaagggttccttcaaaaatttaaattgtttttggatattatgcattaatttaacaaaatgaaaaatgaaaaatataaggagaagggaaaacatatgacatgggcctgtccagagttctaaaagcccaaccataaatagaaaaacaacaatagacgaaaccaagaaaataaaatatcctattagcccccaaagaattacaaaacttcgaaattgattcccaataattcaaaacttttacacaactggcgccgaaactttcccggcttgctccaacacctcgagaatctccgcacgactcctcacgatcctatgaaaaacttctctgatctgttgctgtaacggcacaagctcctcctccattctcctgcatatctccgccatctccgccacttgcaccgccgcagattcagcagcatctttctccgccggataatgaaatccatctgcgaattccatcaacgagtgacctagcttctccatcctcgtcatctcctccatcaatccagcagatcctttcttctctttcttcttccactcatctccgattttctcatggattccgatcaaactctgagcccaattcaaatgtttcggcggcactggtaaatgattcgctaatcctgatctctcctgacacggaaccgccgccgttagcacccacattacgaaaaccatcaccgtactcattataaacattggttgaggcaatcccgccgcttcgttaccacgtggcggcgtaagattcgctgtcattgcgtggatctgcttcgccgccgaccaatttctcccaaccgcccacgacgacgatttgagctgaccaatcgttgctcctcctttactcgccgccgatgatccaccgcttcgacgaccaaacgaccacgatctctccgtcgtcttattccctccgccgccgccaccacctccgccgctaacattctctttatcctcgagactcaacgcgacgacgagattcgccaacgcgcgtttagctctcctcacgttaccgtcacctaacggacgttgctccaaagccgtcacagcaatctcagctaaacgctggtaatgtctaacggaatcgataccgttaacaacggcggtacaaatgtcaagcgctttaatcgaccggtctaacatttcaggaactaaccggtcaaaaggcggcttagaaatctgggtcgggtcacgacccattaacaaaatcgctttgaattcagcttcgcaacagaggaaaacatccatcagcttacgaagccaagtcacggacataatctgctccgtcgcggctacggaagctaccgtgttaatttcatctgacggtggtggttgaggaggagaaagaagctcggtgaaacgatcggcgatgtgtttttggaaaagctcgagatcttcttgttcttgttcgttgttgacgtcgacgaattggttgcgacggatactaatccggccaaggaacgagccttgattatcttgcgcaggtctcatgatttgtttgaaggagaaagaagaagaagaagaagattgggaaggttttggaaatggaggatttatatacggagactaaataaatttgtggtgcgcatgtcttgtcggaaagcttgagacccgttcttcgtgcgcagttatctcctttttttgtttccagttttgtccttgtagaggtttcgttattactatagtaatattattacgtgagtcatgacattatactcttttttggtaaatgaaaactgtgataatatgattggatttccaattattctgattttttttgtttttttttgtcaaactgtaaatatcatattaatgaaaagagttatacaacaagtaaacccaagcttttgttaccacggcaaaaaaaagaagtaaaaaatacgtggcaacaaatcgatttaatgcagaaacaaactgcagtcaacgaatccataaacgcattaagctttggaaaagatgacgatattaagctttggaaaagatgacgatgtcttcttgctgtgatatcgtgtttcttatcaatctatcaatcacaatgaatatctgagaagatggaatggagcgaagattgaaaaacctattgtttctctcgcgccaaacgttgtaaaccaaagtttgtacagaaactttccggagaatagaaggagagctgtcagtcttgcacctaagccaagtcaacaagccagcccaagagccaaagtttgtaggtggtagacctaacctctgctgaatagcatgccacaaatccctactatactcacaatgaagaaaaatatggtctctagattcatcaaaaccagagcatagacaacaatcgatggggatcattaaaccccatgaagcgagacgagttcttgtaggcaaacgatctaactgtgcagtccacattgtgaaagcatgcttgggagttgcgcctttgaaccatattgctttgtaccactctttaatatcttctctcggcctgatcgcttcccaagtccgcttagaagagaaccctttgcaatttatcgcatccacaatccaggagtaagaatcatctatggaggaaagacttggcaaactaatggtggtcaaatgactgtggaatgacaccgcagaatcagacctcggggaaacaagagtccagtcatgatggttgcaagcatcggcaactcttgcatttaggggaatacggcagattctcggctcatcatcacccaaaaacttaattaaggggccaagaggcgtccaattatcgagccaaaagctagcagtcttaccatttcccacactgcatatgacaaacctttctgccaaagatcgcagcttaagtaaagatttccagttccaagagtctgtcacatgctctttaatagcccaaaaagacgagtttctaagtttgtttccgtaatatttttaccgaaaatatttcagattcagaatttccttaaataaaatgaaaaatgaatattaacttcaagtttatggcatcgttcgtgaaacatgcaagaagaaatatgattgccaccgttttcatattttattttaaaaaattatgattgtcacagttttcatttttcaccataaaagaagggtaaaacttaatcatgaattcagacagaatattgttatagcccaaattctttgtgttaaagaatatagcccaagttctctccatcaatttcttctctgagtccacgaagcccattttagatcacaaatttccacatgaatacttcctaacataacatatacactaaaaagaactagaatagtcatttttagggtcaatactcttgtttaagaactaagaagccgtatttaattgttgaaaatctaaggggcacttacataattgttgatttttttaaaaaaatggcttcgaaattatatgaactagagtcgtcaatattttaagtgttccaactcaaatcactaaattataaaaaacaattcaatactacattcataaaaatgtaatctcatatcattgggatgtgatttataattatttatgaagacctatttaattgtttaaaagctttttcagtgaaggcaaaatagctagtacatcactaactaatactattttggtaagtttgtagaatgatatgatataatttttcataaaacttattttaatgctatattaggatattttgccatttgtcaataagagaaaatcggagaaaaaaatgatatttcatcattttcaatgtctcaaaactactatgttacatggatttgttttttttttgttttgcttaaaaggatagttaattagaaaacaaagatagtttatggaaattataccaaaaaggggatgaaaagggaagaaagatatacaatattcatttaacggatcaaactcaggtgtcatatgatatgaaccacaaacaatatatgttttgagtatctagctattaccgaaaagacgaaaagatttattgtcaaagtctccttttcttaggaattagtcctactaaagtttcaaaacactgtataattaattccaaaaaccacgacgttcacatgttttcatcatttaatttgctaattatatttgaattaggttggccatattttgtaaatgcatattaataatttgtaattccaagcgattacatagaaaccaacgtacataatctgaatatatagttgcagaataaggttcaaccccgacgaaatatctagctagagttagtactttaatcgaggcctctttgtaaaatttgtcttcaattattttggaaaatgaaaatctctcaatggctgtcaacccaaaaaatgcaaggaataataagttcaatctctactaatcaaaatccaaaactagataaattccaaatttaagctgttatattataaaaaagctttagaattttataaaatatatctaattaaaagtttaaaacagacaacataataaacaaacatgagaaatatggaagagaaaacttaattatgtatggaagagatatctcaatctaatgattattattatctcgaccaaccatcccttgaaaggcttgtttagttaattaagacagttgcttcattagcatcactacttaatcaccagaaatattatttatgttgacaaaacattacctcgttttaaaaatgtagatgattgaaacaagcattgtggacccaaacaaggtcattctattgctcctccttaaaggtaagcccttaatgatttcaatgatagaaaactaaaactatgcttaagttggattatatccctataatcctatcaattatataataaaaaaaaattatgtaaagttcagaaccgttgagtgccaataaatgctcgttaacttcacaaatatagtcatttctatttatcacattccgagaaattatgattacttgaatgcattaatgttaaaaatataatgtttgttgcaatgctaaggttttttttttttcattctaaattttgttcttatttttttctctaaaaaatgagtagaagtaaatatagccgagaaaaagattgcgatatatagaagcaaaagtcacctttctatgtgatcaaattcacatcgatgtttggtaattgatttgctttaatccaacggtcccacttttacatcgacttcatctactatacatacatgcatgggtcttccaatacatgtgtgtagcgttatatacataaacatatatagtgacttgtataaaaactaaatgtaaataaaacataacaaaagtaatggaacagtgatttagtgatgtgtggtaactggcgagtgctttggacatttttgtataaccgaaggtttaactaatcaagattaaaaaaaaaaagaaaattaatcaagattataagaaagcacaaaaaattatcaagattataagagcaaccccatcggttcaaataaaagatatcttagctatatcttagctaataaactgattaaatttaataaaagcagctaagattagttaagatttatatcttaaccaagatattttcttaagtttaagaagtggacaggtgttgtgtatttattgggtacacaaataaacaaaagtaaggaaaaaaaaaccattggaacataaataatttaaattttttcccttaagaactttttgcttcttaaccaatggagcataaataaattaagatattctctaacttatcttaactttgaaaaagcaaaattttaattttaaaaaaggttaagatccaagattaaaagctttaacatcttaaccattggggatgctctaaaggaccatgcatccagtatcttatgtgttggaacaggtgtatccgtatatgtatgtaactatgtattatgtatcgtaatttgtacgtaagcttggtgccctggtctacagttccctagttaagattctattttgacaacaaaattgatgattccaatcatccatatttgttatagggagaaattgagcatgctatatacggtgatatatatgatatttatttaatatattgaataacaaacacagaactagtgttataggtgcaggtatgtaaatataatgtgataaacattttttatatagattggaaagaatacgagattgttgttgctctgttagaacgaacaaacagaactagtgttataggtgcaggtaaggtaaatataatgtgataaacattttttatatagattggaacaaataaacatttttctgttagaacgaacaaaggcctgtcaaaaagaacaaacctgatgtgacatattacatatatgattataattgattattgtatatatagtattgcatgactatctttacaagatttcaatacgaaaataaattaaaaggagaaaatttataaacgaagcgatttcattctcggtaaggttttccgatatgtctcctaactaaatcaaagccttgtaattgaaacttgtaatgattgttattctatatatctttgaagaaagcttcggtattggacgtacttaatataattggattttatttaaattacaaaaatcactgtataattcggctacatgacttaatcaattatttcacgttgaaaacaatactatatcaacttcaaatacactccttgtgtatggattccacaagttcttttctatctatagaaatatagaatccacaagttctatctacttttattagaattttttattgttcgttgttgttaacataattataagcaataaattcaaaaaaaaaaaaatctaaaagacacaaaatttccatctttgatagggcttcggaatcattaattactttttacaaacaaaaaagaagaagatagggcttcggaaattattagaaagatggaaggatattgtattaaatttggcttcatattttcctttggtttgcggccatcaagtactagtactactcagtacccacaggccacaggaaaaaaagtagtactgctttattaagtgtgttacgataaatggaaagcgttttagtatgtgattacaaattgttgtatgtgatcattaattagttattggtccgacttctaagtttaaatattttcagaattcagttagtttaattatacatgttagacgaaatgactctttttgagccaatatataatgtatctgaatttttcattttgaaaaatctttttataaaataataggtcaacctcgaattattataataaaataaataatttgcgttactatgaaaattaatttactgaatacagtatatagagagagatagaaatagaggaaaacagtggataatacatgattagttgatactcatgtgcagcgagtctatatatattatatactcatgattagttgatacatatgtgacgattagttctacgaatcaatctctagttttcgtcttaaaatcatttggttttatagaatataagaaacaaagaaaacaggaactttcgcgggagacagaagggtacgtgaagagaaaaacacataaaagtgataagggcttaacgtaataatactacaacaaaacctctctacgtacaacgagtaataacacatgaaaatagaaagtcgatgagacatcgttttaaggttagatcgatgaagaaatatctcaggccccacccctgggacccgacccgacccgacccgacccgacctttgtctcctctccttttaaaaactctccattgcttctttgtcttctctcttctataacataactcaagaaattaaagaagatagatagagagagagagagagagtaaaaacctaaagggtgatatacttatataaaaattaatttaagattgtgattaagtggttcactatatttaagttactttgaggagctactaatcatgggtcatcactcatgctgcaaccagcaaaaggtgaagagagggctttggtcaccggaagaagatgagaagcttattagatatatcacaactcatggctatggatgttggagtgaagtccctgaaaaagcaggtgatcttacttgtatattagttttcaagtaacatatttttttctctaaccaattataacgatcttgcgctaattaacatatatagttaatgtaactaattttaaaatgcatgtttgatcaaatttagggcttcaaagatgtggaaaaagttgtagattgcgatggataaactatcttcgacctgatatcaggagaggaaggttctctccagaagaagagaaattgatcataagccttcatggagttgtgggaaacaggtctccatttttactaactcgacttaaatttttatatattatcaattcaagatagtgtattattatagaccgctacaggaagtcttataagattttcaatactgataccattttcaataataagtttgttgggttgggatacatacatagtacattttatacttatattcagtttatcatgttatattttaaatttaaacaattatatgtttagtttggccacggtttgaagcaacgactagcctactgtcgatgaccaaagaatctttaacgtgtagtttcattcatctagctcgtttacttttgtctacttggtcgagctattaagtagtacactttaagttacttcattgaacattctcaaaatgtgatacatacatattttcttattaaacttatgttttttgtttttttcaggtgggctcatatagctagtcatttaccgggaagaacagataacgagattaaaaactattggaattcatggattaagaaaaagatacgaaaaccgcaccatcattacagtcgtcatcaaccgtcagtaactactgtgacattgaatgcggacactacatcgattgccactaccatcgaggcctctaccaccacaacatcgactatcgataacttacattttgacggtttcactgattctcctaaccaattaaatttcaccaatgatcaagaaactaatataaagattcaagaaacttttttctcccataaacctcctctcttcatggtagacacaacacttcctatcctagaaggaatgttctctgaaaacatcatcacaaacaataacaagaacaatgatcatgatgacacgcaaagaggaggaagagaaaatgtttgtgaacaagcatttctaacaactaacacggaagaatgggatatgaatcttcgtcagcaagagccgtttcaagttcctacactggcgtcacatgtgttcaacaactcttccaattcaaatattgacacggttataagttataatctaccggcgctaatagagggaaatgtcgataacatcgtccataatgaaaacagcaatgtccaagatggagaaatggcgtccacattcgaatgtttaaagaggcaagaactaagctatgatcaatgggacgattcacaacaatgctctaactttttcttttgggacaaccttaatataaacgtggaaggttcatctcttgttggaaaccaagacccatcaatgaatttgggatcatctgccttatcttcttctttcccttcttcgttttaaattaatgtttaaatcacagcaaataaactccgctaatttgtttataagtttgtttattcaccttttttctcttagagtttgtaacgggattttcactttattatgtaatgagtgttctaaattgttgataaagagatggtgtgaatgtatgtatataaaactcaaggtcttgtccttaatttgatgtatgaaaaggacaaaaaaacactgcttccatgttgcaaggcaatacggtaacgtagtgcattcactaagttcgttaacgttgtcgtatcgtaacacaaacgtagagatttggctagctacccacgtacaggccatggcaaaactattttgaaaattactatagcattttggtttgtagaaaagagcataaagatatgattaatctagttgcaaaatgaggtagtgaatgaacaatacttgggaataacaaagtattgtaattaatccacttatattcttaatgatacaatcaaagtatatctgcaacaaagtcaaaattttcagttttcaagggaataacaaagtcaaattaaggatttcaagatactatatgcatgttttagactcctttaaaataggtaggattatctttgtagcgcgcttttggtttagtgaatctgaagatcaaaatgttgatatctattcgctgaatcgagcaaacacctcatggcattggcaacaacacgaataagtaaacacgaatgtactgttttgcaaatcgagtaaacaccttatgtttctatataattcaaaatgttttgttgtcgaaatcaaaccaaagggaatatcgaacgctaaactgtgtaatgttttgattttgcggtatttacagacaagactcaagtagagaatgtttctgaggcctgagttgttgttcagtgacgatatgtcttaaccgccagatctattcgtctccgacaaagtggacagctggtcaagtgggaggagcatgcggtgcagcagcacatatgaccacacctgcgagtaccaaccacaagcattttagcaagttgcaaatgcagaatcaaccaaaaatggcggaagaatgcttacgggacaaacacagcgttgtactcctgctctaggcatatcacacagagatcaggaacagcgtcttctttcttggtagaatctgaaatgctctcacgtgtcccgtttgaacctggtcagaagagattgtagtcagagccagtgcaacctatatgtagaataaagagattcaccaatggataccttcactctctagctcagctctctttgctgctgcgtcaagcactctgcaaaaacagctgactacttaattttgtgtgtacatagtttcgagagaaacaagccgatctagtactcatgcttgagaacggttattcacttttagacagacaaatctgtgacataccttttttgtaactgtctccgccgtcttctctctagaacagagtcaatgacatgcttcgtaattaggaacacaccaagaacagtaaaacccatggaggcatatttgtacaacctgtaaattatactcttctcaatcagtttggctcattgccgtttttctacaagagtataggagaagaaccgagagaggagagagacacgaccttgaccattttcccaaattagaaatgagctgatcgagtgatttagaagagacgtagaaagggcccctgtcaggtttttgaatcctgaattctccaatatcgtccttgacagcctgttatacatggcagcaacacaaattagatttaaactcatcggtaagcctctatacatagatcaatcccacttcctacaaatattgctattaaaggaactttgagaaaatttcaagaggcaaataccagactgatgaaggagttagtgtgctatgtatctctatcaacagttacaacttaagcaaaagagaggacccgaaaacactgagaatacgacatacctcaccaacaattgttagcggtattccagttggaagaacacgctcaatgcgcttaactccaagcatctgaaacaaaacaatggccgcttaagcaaatagagaagccaacaaacaaagaaccggaaagaaaagtaaaaaccttaagtccttgaagataatcaagtgttcctcgtacaagcgagcgtcctgactcttcaaaaacttcactaccaacagtcaaggcaaaacccgtcgcaccacgagctcccattacatggacacggcttgtcccatcgtcctatcccaaacagttttggaaatggtattaagaaaacatccaatcacagttgtttcaaacactatgctactagactagacttaccagaaaccaaggaacctctttgctcattgatagcatcaacgcactatcttgtacccaagaacccgtctcattatgtttcaggaaatgttgttccgcctgaaaagatcatgcaattactagagtttcacataaaacctaatcgattaaaccagaaaacaaactaagttccatgcgctaatcatcagtctacaacataccgtttcttcaacaataacaccgcgtatgccactatgctcgcatttgataggtgtctcagagccgactcttcctgataccgcaacaatgaaaggcagaatcttgctatctaattctagcaattgagctacacatacagaacaatcagaaaacatgatcaaaacttcatcctgagagtagatgaagcaatcaggggagaagaagattacctaactccttgagctgattaaccctagtgactgtttcgagtacttcagcatccctgcactcaaaaggataagaaaggatttgattgattgataatctctttgggaagatgaaatataaaagagatcagacaaacctgccactactccggccgagaagataaagagcagcggcgctgaggcagcaagtaactccaccccaaggaatcatcagactctgaagtcactcttacttgtttgcagaagaacaacaatacctttgaagttattgatgagcagagagatagaggtaggttttgaatctggatgcagcgaattgaatgaaatagagatgggagtgaaacgaatctggatttagaacacagagagatggaagaagatcatgcgaaattagctaatgagagttatgagtatgaatcgaggaagagtttgaagaattagaaactagaagcagtgaaagaagaggagaatttcgaaaggggaaattaaaagattcagagggttggaattgaatgatcctttgcttcgatctctctcaatattctcatgcgcagggtttggggaagacgacgatatagtccccaagcaacgaagctgatgacgtggccacttcccaatccaatgggcctactctttttttttgtttaagcccagctaagacgcatgagtctttttttgtttttttgttcttaataaaaagttaaaaactgtcccattccccacggtaagagagtcgttaatcttttgtttcattatgcaattaggtttgtacataatttaaatttacaatcgttaaagctgtctattagtcgctgcctagtcagtttgaagtatgaggcggttcttgactcgaactttctgcatattatcacggattaaagaggttttgaagagtgaatagatttattataaacgacaggatttataagtgagagagctttcgaagcaatttgtaatctctttcgctttctttaagagccattcgaacaacttggagcaaagccttgactcattcaaatgtgagagggcccattgagtcttgactcttgagtataagaacaaaaaatcttctctttttattatagccacaaaaaattaatcttattatctctttatttgatattgcctctctgataatttttatatacagcatttccaaagacacattaacgttaaatatcttcttttagttatcttcaacatttccagctcgttcatcatggcttctccttcttctttttcgtctcagaactacaagttcaatgtcttcgcgagcttccacgggcctgacgtccgtaaaacacttctcagtcacatacgactacagtttaaccgcaacgggatcactatgtttgatgatcaaaagattgtgagaagcgcaacgatcgggccttcactagtagaagctataaaagaatcaaggatctcgatcgtgattctctccaagaaatatgcttcatcaagctggtgtttggatgaattggtggagatcttggagtgcaagaaagctatgggacagatagtgatgaccatcttctacggagtagatccatccgatgtgcggaaacagatcgggaaattcgggatcgctttcaatgaaacttgtgcacgtaagaccgaggaggaaaggcaaaaatggagcaaagctttgaaccaagtcagcaatattgctggagaagacttcttaagatggttggtctttattttaatctctgatttattgtttgtttataggttatattatattaagttgtaatcaccagagaaaacttaaacaattagtgctgttttatgatgtaggaggtattacgattattggaatttaaatgattaagggaaatgtttttgttgaattaagtattaaaatgtcataaattgttgggaacatgcaatgttatctctgtatctatttgatggaaactgtgcttttcctttctttctcttttgttagggacaatgaagctataatgatcgaaaagattgccagagatgttttagataaactgaatgctacaccatctagggattttgatggtatggtgggaattgaagctcatttgagagaaataaaatctttgctagatttagataatgttgaagttaagatagttgcaatcgctggtcctgctgggattggtaagactactattgccagagctttatatggtttactctctaaaaggtttcaacttagttgttttgtggacaaccttaggggaagctatcatagtggttttgatgagtatggttttaagctgcatttacaagaacagtttctttcaaaggttttgaaccaaagtggaatgagaatatgccatttaggtgcaataaaagaaaatctaagcgaccagagagtgctcatcattcttgatgatgtgaacaagttaaagcagttggaggctttggctaatgaaactacatggttcggtccaggaagtaggattgtagttaccacagaaaacaaagagcttttgcagcaacatggtattaacaatacctaccatgtggggtttccatctgatgaagatgctctcaagatcttgtgtagttatgcttttaaacagacctctccacgtcatggttttgaagagctttcagaaagtgtaacaaagctttgtggtaagcttccgttgggtctttgtgtcgtgggttcatctttacgggggaagaaggaagacgaatgggaagatgttgtgaccaggctggaaactattcttgatcaagatatcgaagacgtactaagagttggctatgaaagtttagatgagaatgcgcaaacactatttctccacattgcaatcttcttcaacaaggaagatggtgatcttgtgaaaaccatgttcgctgagagtgacttggatgtcaaatacgggctgaaaatccttgaaaacagatctctcataaagatgaagatttttagcaatggggatacaaaaatagtgatgcacagattactacaacaaatgggtaaaagagctattcaaaaacaagagccttgggaacgccaaatcttaatagatgcccgggagatttgtcatgttcttgagcacgccaaagtaagttcgtatttcttatcttctatcttcaattataatgtaaattaaggcattcgctgtagataaacaaatcctactagtcctgctaacaatttcttctatatttggaattcggtatagggtaccggctggaatgttcatggtatgtcatttgatatatcaagaatcagtgaagtgtctataaggaagaaagcttttaaaagaatgcctaatcttcagttcctcaaagtttacaaaagtaaagatgatgggaataatagaatgcatgtacctgaggagatggactttccttgtctcctaaggttgttagattggaaggcgtacccaagcaagagtcttcctcctacatttaatccagaacatcttgtcgaactcaatatgcattctagccagctcgagtacctctggcaaggaactcaggttggtgttgtacttgatatatatgaattaggtattttctctttcatgctatatgatgctctttctctctctgctactgtgtggttttctaacatattcagccgctcaagaatctcaagaagatggatttgtcacagtccaagaatttgaagcaactcccggatctttcaaatgctacaaatctggagtatttgtatctgatgggttgcgagagtttgatagagattccatcatctatttcgcatcttcataaactagagatgttggcgacggtgggctgtataaatctagaagtcataccagctcacatgaacttggaatctcttcaaacagtctacttgggaggatgctcaagactaagaaatattccagtgatgtcaacgaacatcagatatttatttataacgaacacagcagttgaaggcgtgcctctttgccctggtcttaagactctcgatgtaagcggcagcagaaatttcaagggattattaacacatctccccacgagtttaacaacactaaacctatgctatactgatattgaaagaattccagattgtttcaaatctcttcatcaactaaaaggggttaatctacgtggctgcagaagactcgcatctttgccagagctccctcgttcgctactaaccctagtggcagacgactgtgaatcactggagacggtgttttgccctttgaacactttaaaagcaagcttcagtttcgccaactgcttcaaattggaccgagaagcacgaagagcaattatccaacaatcgtttttcatgggaaaggctgtgttaccaggaagagaagtgcctgcagtgttcgatcacagagccaaaggatattcattgaccattcgtccagacggtaacccttacaccagctttgtattttgcgttgtggtttcccgtaaccaaaaaagtgataaaaccattcctccctcactattgtggcgtcgcatcatagctcaagatgagggctatcccgttgaggtctggaaccgcataggagatgtcttcaaatatcgaacggaacatctattaatatttcacttcgactttctagaattcgacaacagggatatagtgttcgaattcagcagcgaatcccacgacttcgacattattgaatgtggtgctaaagtcttggccgaaaagagcatcaaagaaagctatgaatctggatccgaccaagcctttgaagacgacgttgtgtttgaacccagcaaagccttcggagacgaaaaatacggagattgttgtattttgtaaggacgtcggaacttccgactgacgcttgtttctggttgaagacaatagaatccggaattgaattacacaggaacttatcgaaggcctgttgaattaagggcacgcatcaggcttgttaaccttgccctgcatatcgctgttttagttcttgctttttgtgtttgatttgaaacgatttagagcattttacaagtgaagacgacttatgaaaactaatgcattttttcgtgttcttgcacaacatcacacatacacacttggaatgtaagctaactactttctgacccttttactaactacaacaaccactcccactaggctcacgtaaagcctcttaacactagattgtagctagttttacaaccaacttaaaacaaccaacgtaacattaatacttttgttaagaggctggtcaaagcatatgcattattgattctttaacttcataacgcgtttacattctttttaaaaataaaataatgataacgtcttacatacagaaggatccttttttttttgtttcatatagctttccaaaaacacattaacttcaacatctgattttcacttatcttcttctattcttattaccctatttccatctctcttagaatgtctctcatggattctccttcctctatttcctcttgcaactacagattcaatgtcttctcgagcttccacgggccgaatgttcgtaaaacacttcttagtcacatgcgcaaacagtttaatttcaacgggatcactatgttcgatgatcaagggattgagagaagtgaagagatcgtaccttcactcaaaaaggctataaaagaatcgaggatctcgatcgtgattctttccaagaaatatgctttgtcaagatggtgtttggatgaattggtggagatattaaagtgcaaggaagttatgggacacatagtgatgaccatcttctacggagtggagccatctgatgtacggaagcagaccggggaattcgggttccattttaatgaaacgtgtgcacataggacggacgaggacaagcagaattggagcaaagctttgaaggatgtgggcaacattgctggagaagacttcttaagatggttggtctttattttaagggcttattaacaaaatagacactttttcaaaagtaatttgagaaataggtagtttttttagaaatttgtgaaatagacacttttttactttttgtgagatagagtttatgtgtaataagttaaaagacaaaaaaattgtcaaataccactttactctttgctttatattagaaagttttattgtggttccaattttatagtatttaaatatttagactaattattatattatagttaaaaaaaatttcatctttatttttttgtattaatattttttaacttccaaaacaagatgatttttatatattcaattatcaatctcgtacactagcattaaacatagttttgtacactaacacttgtataccaaatcattttatccaacaatatttatataatatatcctaaatcgttaaatgcaccgactttgactcatatttattaattaaagtaatggttgttcataaatttatattaatatgatgttgtacaccatcatgtacaccattaaataaccatgatagtgtactaacatttgtacacttttatgtacaccaatctcgtatactattatttaaactttattttgtacattatcacttgacaaaaatggttctattttttgtatatggggtgtacaaaataggtgaaggtatacggtattttagatggtgtacgaggtgatgtatggtatgattcattatctcatcatttcatatatactattaatattatgtacaccatattttatatcatctccgtacaccattgtattatgtagttgtacaccgctatatattgtcgtttgtacaccactttatacattgtcatatatcgtattacgtgtattacttcttagatcaatattatttattttctacgtacactattatttgtacaccacttttttataatatcgcgtacaccacgaggttgagattaaataaaagaaaatgttacatatttatgatatataacaaaattagactttttagatacatataaatctgttaaagattaatatgttttaatggtaattatttaagaaaaaaattatagcaaaacaaactaaatatgtataagtaaaaataagaaaaagaaaaagtaagttttgtctttatttgattacatgacaaaacatgaaaaggttataaaagtcatttacaaattagagaagaaagagaaaagtgtttattctccatatttctaaaaaaactacctactttacaaattatttttgtaaaaagtgtctacttcacaaaatatctcttattttaatctgagtttttataacttaggttctactaagttgtaagcaccagataacgaaatgtttttgtttagaaatacatgtcatcattactagaacagaggaatgttatctttgttgttatctctatgactacttggtggaaataatgcttgtcatttctttcgcttttgttagggataatgaagccaaaatgatagagaagattgctagagatgtttcagataaactgaatgctacaccttctagagattttaatggcatggtgggacttgaagctcatttgacagaaatggagtctttgctagatttagattatgatggagttaagatggttggaatctctggtcctgcagggattggtaagacaacaattgccagagctttacaaagtcgactctctaataagtttcaactcacttgttttgtggacaacctcaaggaaagctttcttaatagtttagatgagttgcgtttacaagaacagtttcttgcaaaggttttgaaccatgatggaattaggatatgccattcaggtgtgatagaagaaaggttgtgcaagcagagagtactcatcattcttgatgatgtaaaccacataatgcaattagaggcgttggcaaatgaaactacatggtttggttctggaagtaggattgtagttactacagaaaacaaagagattttgcagcaacatggtatcaacgatctgtaccacgtgggttttccatctgatgaacaagctttcgagattttatgtcgatatgcttttagaaaaaccactctttctcatggttttgaaaagcttgctagaagagtaacgaagctttgtggtaaccttccattgggtcttcgtgtattgggttcatctttacgtgggaagaatgaggaagagtgggaagaagtaatacgcaggctagaaactatacttgatcatcaagatatcgaggaagtactcagagtcggttatgggagtttacatgagaacgagcaatctctatttcttcatattgcagtcttcttcaactatacagatggtgatcttgtgaaagccatgttcactgacaacaacttggatatcaaacacgggttgaaaatcttagcagacaaatctctcataaacatatctaacaacagagaaatagtgatccacaagttattgcaacaatttggtagacaagccgttcataaagaagaaccttggaaacacaagattttaatacatgctccagagatttgtgatgtccttgaatatgccacagtaagttctttctcttgtgtttattaatttatcatttaaacttaggcatgtggtgaagaaaagcaaatcctacctattgtgctaacaatttcctattaattggtatacatattggtcttagggtactaaagctatgtccggcatatcatttgatatatctggtgtcgatgaagttgttataagcggtaaatcttttaaaagaatacctaatcttcgattcctcaaagtctttaaaagtagagatgatggcaatgatagagtgcacatacctgaggagacagagtttccgcgtcgtctaaggttactacattgggaggcatacccatgcaagagtcttcctcctacatttcaacctcaatatcttgtcgagctctatatgccaagtagccagcttgaaaagctatgggaaggaacacaggttggtgtctgtactttaaatatatgtatgaataatgttcatgtttgatcttcatgctctttctctctgttttgtgtcgatttattcagcgccttacacatctcaagaagatgaatttgtttgcgtctcgacatttgaaggaacttccggatctttcaaatgctacaaatctggagagaatggatctgagttattgcgaaagtttggtagagatcccatcctctttttcgcatcttcataaactagagtggttggagatgaataactgcataaacctacaagtcattccagctcacatgaacttagcatcccttgaaaccgtcaatatgagaggatgctcaagattgagaaatattccagttatgtcaacaaacatcactcaactgtatgtatcacggacagcagttgaaggaatgcctccatcaattaggttttgctctcgtctcgaacgtctcagtataagcagcagtggaaagctcaagggaataacacatctccccatcagtttaaaacagctagacctcattgattctgatattgaaacgattccagagtgcatcaaatctcttcatctgctatatatccttaatctatctggctgcaggagactagcatcattgccagaactccctagctcacttagatttcttatggcagacgattgtgaatcattggagaccgtattttgccctttgaatacgccaaaagcagagctcaatttcaccaactgcttcaaattaggccagcaagcacaaagagcaattgtacaacgatcattacttcttggaacaacgctcttaccgggaagagaattaccagcggaattcgatcaccaaggcaaaggaaatacattgaccattcgtccaggcacaggctttgtggtttgcattgtgatttcccccaacttggcatcgcaaatcacagagtacaggcttcctcaactattgtgtcgtcgtcgcataggtcaaggcgacttagaccccattgaaaaggtgttcaacgtacgaactctactcaactttcaaacggaacatctatttgtgtttatcattcaccctcacttgccatttatcgatccctctgaagtgagcagagagatagtgttcgaattcagtagcaaattcaaccactttgatgttattgattgtggagccaagttcttgaccgacgggagcatcaaagggagttatgattctggattggaacaagtgtttgaagacaacaccaaacacggtgaccatgcagattgttggaattggctattccactgttttgatctaccccattttgtgaaaaacgtcagaagctttgtctcagtatgaagaaaatagaatccagaactgatgaagtgttcattctccaattcatgtcagcccgagactctgtcaccaaagattttctatactaattttatatccatcttatggtgtcgtcgtctcatagatcaaaatggtttatccattaaaaaagcttgtgttttggttggcttacctcatcgattacttatatactgtagttcaatcagaacatatccgtgtgttgtaattcagtcttgtttagtcgtgtgaagcgagatcctgttttggatcatcatcgttttcttgcttcgataattgcgaggaaaaccgggaaacttggtttggggaaaatgatgatgacgtggccatcggcttcattcaatgcgttgggtccttctaggtctaattaaattgggcctataggaaaaaaagtgtaatccatctcttttattttctgggtggctaaatatatgggcttagaatgggcctacagacaaacaaagtgtaatcaatcttctttttttgtgtttttattccgtgtaaatcagtaatttcaaatgaatctgtttcttaaccgctcgtgattttgtatcgctaatcgtgttgtgtgtgtttagattttacaatactcagcgactcagggtccacaacattttcgtctttttgaagcagtctgtaattttgttcttcttaagaggttatacacaagaaggtttgtagaaaaggttacagtgcacatcagcacataaagctgcaaatatggatatcgtttgtattattcttcagaggctgctcatagagtacattattattttctttgacttaataacgcgttcagatacaggagggaccccttttttgttcattttctcctcttgtataagtttccaaaagttacacaatggcttcgaaatatttgatacagacttatcttccacttctcagtaccccttgtccatgcattattatttcgttgacttcataacgcgttcgtcataagtcatacagaaagagaggaccacctttttgttgttttgattttatatagtttccaaaagacgcattaatttcaaatatctgatttttttttatttttttacttatcttccaattctcattacccatttttccatctctctggctctgagcatgtctctattggcttcttcttcctcttgcaactacaaatacattgtcttcccgagctttcacggaccggatgtccgtaaaacacttcttagtcacatgcgcaaacagtttgacttcaacggcatcactatgtttgatgatcaagggattgagagaagtgaagagatcgccccttcactcaaaaaggctatcaaagaatcgaggatctcgatcgtgattctctccaagaaatatgcatcgtcaagctggtgtttggacgaattggtggatatcttaaagcgcaaaaaagctatgaaacagatagtaatgaccgtcttctatggagtggagccatttgaggtacggaaccagaccggagaattcgggatcgctttcaatgaaacttgtgcacgtaagacggacgaggaaagacaaaaatggagcaaagctttgaacgaagtggccaatattgctggagaagacttcttaagatggttagtctttattttaatctgagtttttaacttttaggttctgttaagctgtaatcaccagagaaaacctttaacatttagttagtgttgttttatgatgaataggaggaaatacggttactcgaattaaaatgaataagggaatatttttgttgattactgaatgctagaaaatagaaatacatactgaaacagaggaatattatctctgtgactatttggtggaaataatgattttcatttctttcgcctttgttagtgataatgaagccaaaaggatagagaagatcgccagagatgtttcaaataaactgaatgctacaccttgtagggattttgacggcatggtgggacttgaagctcatttgacagaaatggagtctttgctagatttagattatgatggagttaagatggttggaatctctggtcctgcagggattggtaagacaaccatagccaaagctctgcagagtcgattctctaataggtttcagcttacttgttttgtcgacaatctaaggggaagctatcttagtggtctagatgagttgcgtttacaagaacaatttctttcaaatgttttgaaccaagatggtattaggataaaccattcaggtgtgatagaagaaaggctatgcaagctgagagtgctcatcattcttgatgatgtggaccatataaagcaattagaggcgttggcaaataaaactacatggtttggtccaagaagcaggatcgtagttaccacagaaaacaaagagcttctgcagcaagaatggtatcgatgatatataccaggtgggttttccatcctatgaacaagctctcgagatcttatgtatatatgcttttaggaaaagctatccacaaaagggttttcaatggcttgcattaagagtaacacagctttgtggtaaacttccattgggtctctgtatggtgggttcatctttacgtgggaagaatgaagaaggatgggaagaagtaatctgcagcctagaaaataatattgatcgtgatatcgaggaagtactaagagttggttatgagagtttagatgacaatgagaaaacgctatttctccatattgcaatcttcttcaacaatcagtatgttcatcttgtggaacgcttgttcgctgacggtgacttggatttcaaacgtgcgttaaaaatccttgagaatagatctctcatagagatatcttttagtagtagaatagtgatgcacagattactacaacaagtgggtaaaaaagccattcaaaaacaagagcctttgaaacgccaaatcttaatggatgctcgtgagatttgttatgtcctcgaaaatgacacagtaaactctttgctctattcttgtcaattaacatactttaaacaagtcatcaggtgaagataaactactatcgtgctgacaatattttttatttggaatatttgtttaggataccagatacgtgtctgccatattatttgatatatctggtatcgatgaagtctatatcagagagggagcttttagaagaatgtctaatcttcggttcctcacagtatacaaaagtaaagatgatgggaatgatataatggatataccaaagaggatggagtttccacgtcgacttaggatactaaaatgggaagcatacccaaacaagtgttttcctcccaaattccatccggaatatcttgtggaacttgttatgaagaatagcaagctcgagtacctctggcaaggaacccaggttggtgttgtactttttaatatatgaattttgtatcctactttctcatcaagttatatgatgccctttctctctgttaatctgtgtctttcttgcatattcagccgctaaagaatctcaaggagatgaatttaaaagggtcctccaatttgaaggcactcccaaatctttcaaatgctacaaagatggagatattgaaactgagtgattgcaagagtttggtggagattccatcctctttttcgcatcttcaaagattagagaagttgcggctgagggggtgcataagtctggaagtcattccagctgacatgaacttggaatttctttacgacttagatatgagaggatgctcaagattgagaaatattccagttatgtcaacgagactctactttctaaatatatcggaaacagctgttgaagatgtgtctgcatcaattacgtcttggcatcatgttacgcatctctcgataaacagcagcgcaaagttaaggggtttaacacatctcccaaggcctgtcgaatttctagacctaagctactctggtatcgaaaggattccaaattgcatcaaagatcgttatttgcttaaaagcctaactatatctggatgcagaagactcacatcattgccagagctccctgcttcgctcaagttcctagtcgcagacgattgtgaatcactggagaccgtattttgccctttcaagacatcaaaatgttggcccttcaacattttcgaattcaccaactgtttcaaattggaccaagaagcaagaagagcaattatccaacggccattttttcacgggacaacgctcttacctggaagagaagtgccagcagagttcgatcaccgaggaagaggaaataccttgaccattcctctcgaaaggaaaaggtcttaccgtggcgttgggttttgcgtcgtgatttcccctaaccaccaaatcacagaaaaatttcattccggactacttatcaaatctcgaacaaaacatttactgataattcactatcactttgaaagattagaccaccaatctccagcgttgagcagagagttgtttttcgaattacgcagcgtaaacgataacttcagattattgaatgtggtgccagattgattgaagaagagagcattgaagataactatgagtctggatcagaccaagcctccgaagaagatagcatcgaagagaactatggatctggatcagaccaccaagcttccgaagaagatagcatcgaagggagctatgaatctggatcagaacaagcgtccgaagaagacagcatccaagaagagaactatgaagagagcatccaagaaagctatgaagctggatcagaccaagtgtctgaagaagagagctatgaatctggatcagaacaagcctctgaagacgaaaatgagtttgaacacagcgaagaagcctctgaagactacaaatggagtaatactaatctgtgactcccaaagtcgaaggagagagcaagtgccatacccagacaaacgcacgagcaatctccttcgcaatcatggtgaattcttcctctgaaacattgaattattttcttgctattaactcgaacagaaatgaataatgatatgatgattttctcgtgcttgcagattatctcagagaagaatcgccgcgagatctccaaataccacctcttcaaaggtacaactctttttattttgtttgcgaatcgtcttaactttgatctgtatacgtgtaatcagatacagtacgtagatattctgaatctcttgtacttagcccatcgttttaactttagctgtttctgaattcgatgccttacttactttgaacatagttagcaagaacaatgtgattcactaggattacttagaaatgttacttttatttcgagaaagttttgtatgctaaaagaggacttgaatttgccacaacatcccttgatcgagtgttccgaatcctgcaggtgattaagcttatgtagagctttttgtcaaaggagtatgtcaaagagacttttacttgggtacattactactggttccttaacaatgaaggcattaacttcctcaagactcacctcaatctcccacctgagattgttcctgcggtcctgccaccttaaaaagcagccttctttttttttccacgactgagaccttaattaaaagcagccgaataagcgaccaattttctgtaaaaagcacttactagattttactttgttaggctttcccttttgtgtatttttgtatgtctctttaaaaagataaggcattcacggtaaaacaaaacaaaaaaatcaacgaaaaataattacggaaacacaaatatttaatgaaaataaaaaaccagtttaaacacttttatgggtcgatttttatttttaaaaataaaatcctttaaaaaaaaaactaaaaaaggagaaaaaaatcgctttgattttaaaaacaagtgatcgaattcaggagagggatcagatgataaaagaaggagagtgctcaatagtcgtaacaggctgagcgaaacactcttctcgcattaagcgagtttaataaccactcctcatttcccctttaacttgcctgaaggatcatatttattcattgccccacctttaatcttttttatagccaactaatcatatccctcccgtctcttctaaccgatgtgggacaaatatctcttcttcagtttttcaaaaccctaattagcctaccgaaaatgggcttaggcctggtaaaaattacaacggcccaacaagacgacgatttctcagtatgacgattacgatttctgttgacagagaaactttttgaaatgatgactactacgacgacgacgatttctcagcataacttctatggtgctggagattcggaaacttgcatttctattattgaggtattaagctctcactggtaaacaatggcgatttctaatcgagctttcttctttcgcgttttgttttttccatcgtttgtttgtgatttgtgtgtatgtgtagaatttgaaggaagagtatggattgtttgtttggccttgtagcgttatcctcgctgagtatgtttggcaacacagatctcgatttcgtgattcttcgatactcgaggttaatttctatttcaactactctttgctaaaatcccttgattttgaattgattacagaattgggatatgtgtgtttgagctaatgaatcttaaatatgttaggacctttttaacgttttcttagacttgtgttgatggaatttacagctaggagctggtacttccttgcctggtttagtagctgcaaaggttggggctaatgtcactcttactgatgatgcaactaaaccagaggtgtgaaatttaagttcttgtgttgagaagatttttgctatttgggtttagagaatatgagcttatttagttcgtttgtatcatatatatatgcaggttttggataatatgagaagagtctgtgagcttaacaagctgaactgtaatgtaatataaactatcttcacctctcttcaatttaacaacgccaaatttatcatttacccggatcattatatgttgcatatgtaattcacgaaggttgttgggttgattgctatttacatttgaaattcttgagagtttgcttctagaacttctctgtggttgtctattgtaggtgttgggtctcacctggggtgtgtgggatgcaccgatactcgacctgcgaccaaacattatacttggggctgatgttttatatgattcaagtggttcgtttcatttgtttttgttttgggtattggccttttctttttccccttgtgaatgagttgaaaatctgaacttggacacctctgttgttaagcatttgatgatctctttgcgactgtctcatttcttctccaaagttctcctgatgcagtttttattaccacttatcataacaggaggtacacgaattcttcttctttcattcttcccggtcgtctattatatatatccgcaacagatttagggtgacgatttcttccggatttcatttgttcagttttgattttgcagtgggcatcatctaatcgagttcctgatggtaaaatggggactaaagtgtgttaaacttctggatggcttctcattcttgccctctcaaaaggcatctgtacttagtggaaacattcagttggttgagatcgtattgagttcccaaaatgaaaatcagcagctttagactgtaacaaccatctaagtggataataaccagagatcaaagaggtataacatttacttcattgtaataatacatggttactctactatagaaagtggttagcaggaatctctggactagggagtttagtttaatcaaactcatatacttggtaattctttgcataaattcaaatttatcttcccaaatagatcaactaagagcttggcacattcaaatctctcttaaccttttaattttgtttcagatcactactgatcttgatgcatataactgataagtgttgttggacgaagacattaaggtcgagagaagacctgataccctaaatcatgatgtaaaatctccaaagcatcgaatatatagtatacaagcaatcacagaactggacttttaagccgtcaaaatatggatggcatcttggtttgcactttgacgaagaaaacgcccacacaagaccgtaatctattgtgtgctaaacctaccaatattagaatctcaatcaaaaccgtaccaaaagtagagagcatagatacgggttaaacttgaaaagttccttcttctaagacattggagatgaagaaaatttcagagagatgtacaaaaaggagctccgactcatcaagatgaaaactactttcaaacgatcaagttcatgcaaaacttgtatcataccaattctaaccgtggtcgaggtaataaaatccgaaaaatctaacacatctccattcatcattgccttctcttttgaattaagattcatatgcttcctcattgtttgatcctcaagaaacagcgcaaaggtagccggggaatagacacaaggttaaacagacctgagagatctcttaggagttttcagtggctgaagcggtgactcttagccgagcaggctcttgactctgttctttccgtctccaaaacgcccgtctccaccaaacttcgaaccctctctggatattaggacagtcttcattagagttcaagaaccgatcaaaccaagctaggaaaaactcttgttgccaagcaagaggaagagtcagaatggtattgcttaaaccatcctcgattaaataccgatcaagccctttcgaagctctcctcatccacccaaaatcatcatagaaaggtgtcaaccaattcctcagcagcaaacacctcacttctttcggtgtcagaatttgtccctttccaattccaacaaagatcctcgctgttactctgctaatctcaaacctgtgaacaacagggaccttagaatgtacctcggatagctcagaaagagaagcccacatcacaataaaatcctctgcgatttgtctatctatcaaaatatccaaaatccaatgcagattatccgcttgtcttgctatctggtcaacattctccaaatccgactctgctgcttgtagaaactgccgcttaagcttatgcaaacacccatcacaagccaagtacaacgactctttcctaagatcatttccagacgagttctctctaagcattttggaaacaagtgttttcatatcacgccttgctttctcatcttttccctcaagaacaatatgcaaaagattcaaaagcacctcgtcattgctcccaccgttactcccgttattcccattgctagcttctacagaaactcttctcaaaacttcagttgccccaacgttttcaaggtgtagctcagacaacaaagaagcaatcctgtattcttcatcctctgaccatggtgctgcttccaagtactccagacatgaaagcactccagcatcaaacccaattgctgctgaaacctgagaggacaacaatggcaaactgaaattgacaatgtgattgcaaatatttaacagaagagtattcacaatggagacttttgagtatttctcacactaccttcaaaataccaagaaccctagaaacatcatgtctcatcatcttcttccttagatctctgcagtacatcagcatcaacgtctcaatatacacctcaacgtcatcacaatctgagatctcaacaatgtacggagaagacgacggcggcagctgctgtttagaccatcgatccgacaatttcatagcgaaaaacctactgtgagctacaagaatctgcctatgaacacacatggtgatactaatcccatctttagagctcagagtcagcttcacatcactcgaattcgggtcattgaactgattcccggggctccgaatcaccagaagatccgaaatccgttgcatcgcaagcgcttgcttatcctgagctgaaataacaagatgattcacattcgtcgtcctcgcagccgtagccgccgcagaagaagacgatgaagacgacgacggagatggaagcacaccgttatggatctgaactggaactttccctatggtatcagcttcactagccatcatttcgaacagcgtcggacttgatcgtgtcttgtcgtgcatcgccggaggcggaggaggagacattggatttagaagacctgccgttaaagcggagttgaacttagtgaagctcgaagggaaagaagagtcacgcggcgaactgtaaccgttccccgccgtcgtcgtagccgtagagtaatccatgaccggtggagatcctttcggatccgaaaacgaagttggagtcgggtcgggttgaaaattcaggttcagacgagagagagtggtgatatcacttcagaagcataaccgttgagaagaagacggaaacaggttcgggtcaaaaaccggaattgaaccggacccgagaacccgagattttgaaggtggttgttgttatgagtctcgtgattgtaggcatcgacagtgccaggagtgataaatgcacaacgcttagaatttagtgcatatttttttctttttatataaaatgtgtatatattatagttttcgtgatttttcatttttttggcagctacttttgtgatttttatcgatggaatattatcgttatcgctgtggataatatttatttatagagcttcggtactaacaaagatgctcgttatttctcgaattaatcattatcatattaaactttgagtatttaattaggtgtcagcagttccatagagcttttacttttgcttctattgaatttagaaaaaaaatgaaaaaatacaactaaaattgtctcaataaaatttggtttaaattggattaaaaataataatactaaattagtttgttattaataaataaagatatttttggagaggcaaaaagtaaactgtttttcttgtacaaatttcaacggatttttgtttgtagtgtgggccaaagcccaaatgcatcatagccacgcacgacattgtgatgacgacttttattttggtgcttctatatactgtgtggagacaatcattctttcaccatcatcaatttattttgttttattccatcatataatcattttttgttagatttaatcatattttatgtttgataatgattggttataatttgactttaaaagttcttgatcactaactatcaatgaataaatcaaagaaagggatgtattatactatagagtgacagctgataattaagtcataacaaatcaagtgttttttttacactgattagaaactcatttaaggatataaattcttatggttttctataacaaaatgtttgtaatatgtgttttagttagagtttttactattgtataaaggattggctacatttggtcatcttgtaataataagaactaattgggcaccacaaacaatttgaattgatgccaagttactaacaaaggtcatatacacttgggtcatagcctcataggccgagtgtaatgaagcattggcccatatgttttttgtgtgcaaatggcccatattttatggtccagttttgtacatgtaaccagatagggtttttctaacgaatggcccaattagtccagttacatacggtttagccgtacagtatatatatttatttatatgtcaacgagtgattttaaatatcaaaaagctagaatttgattttgaagaaagaacaataataaagtgaacaaaaaaagagacaagaaatgaagctttttctttttctaaaggacaggtgaaaataacaaccaacattacagattaaaaaattatgtggtcaggtcaatatttaaaaatttacatgatgtttggtgggcgataagaatatggtttaaagaaaaagtaatttgtcactttgcgtagacagagttaagataatcgattccattaaacctattatcaaccatacatatagagatcttttaagacaagaaaaaactaaatactcatcatagtaatagtttttttgttttttttttgttttttttgtactcatcatagtaatagttgaaacttataaatattaatgaatgacccaaaagtcttattcattgttcattttttaataaagaaaaacgtccaaactcttttaatttggctataatttatttattaagttgtatatatagttcagctaaacaaatttatatcttgtttatagacatgaaacaattaatcttatttcaataaagttaaaataaaaagaatttagttaaaaaaatatctaaacaaatatttatatattaggacgaattgaaaaagtgaagaaagaaagaaagaatgaggtgaatggaaggcacgttagtttgcctgctagaagagaagggggagggagacaatagattcgctgcttcagttcttgtattagctgtctttgtactatttcatgttcttgtatcaactctttttctttcttttaaagatcttttactgtctcttcttatcttacttctaaaatatacatcatattcagactcagaattataaataaaaaatgatgactgtgtttgaagtttgaacacatctacaacaaacatatttgatcattattaatactgtatgacttgtgttgtttgcgacagatctcagtggaaacaaacaattgttagtaatagtattatggttttttttatataacaattgttagtattagataataaatagataaattagcattccatctatttataaacatttccattctattatttttataaaaacatttttttgtaagttattacaaacaaaactgattctctaaaacattaaaatataaacaaaatgattgtttgtgaacttcttgcatttttttcctaattcgtttttcactgttggaaactttgtgttacaaatattttagatgtatgagtaaagtccgcaccaacatacatcgtgtgtcgatacaggcaaagtgtacggtctgacatatacggataataaaatatgtttgtataaattgttagaaagagacgatccattataaaaggtaattaaaataattttattcctgtgggaaaggaaaagaaaaaggccgcgtggtccaagtcagtcctcatgaccaatcattatttaacatagtatgatttattcatatttaatataaaaattattagagctcagatttgttttaaaattagtagtagcttaaaatttaggggttttcagaattagtctgaacaccaaaaaaaaaaaaaaaaattggttctaatgtggaattggttgtattgaataaagttgattgagaaagacacacagtatatgctaattatggtttagctggttgtttaaaataatagagtgattagttggtcgcttactgacaaaacgacagtgtctgacttgcaaaactggaatgaattttgtagttttccgttgaattagcagacaattttcaacttaaagatgtttactctactttttttttaatttaaagcaaaattcttgtaatgtttttttttattgtatcctctttcatataataatttttaaatcctgtaacgaataattaaagcaaaacatgttgtcactacagtaatccgtacataacaaaagcaaatatacaatttttattaggataaattaggtatctttgattttaaaaaaactatattgaaattataaatatgctttcattttcaaatataaaaattctctaacgataattatactgagtaagaattacaaaaaatgatttaacccttgaaaataagtggaaataaaagttttaaaaattaaaacggagaaaacttaatacgaaaaaaatctataatcattgaatagtgaccttcatataaaagaccgtaaaaaaaaaaaaaaatgcgtaacctatattcacgatagtccttactctatttaatttccacagtaaaaaaaatcgtataaactattttttgagcattgctcttgagtaatacatttaggttaccaaatcatatgaaaatataatagtttctctctaattattttctcaatattcttaatctgatttcgtatttatattaattgtccagactccagacaaaagggatgaatcatggctggatttagctgtcctacctgttaatatatctctactgtctagtaacgccaaaacctgacagttagtgatatatattagactaattagttattccctaacccctgtttccaattatattactcacatatatacatgagtttgtgataattaaacttgatctacttaaacgtaggtgatagacaaatagcctaatgttttttgttctctcgcatcttttaccaaataccgtgtggtggattcaagttctccatagaacattttaaatgttgacaagacaagaatctattggattaaacatacaaatgggaaaatttatctattgaaatgttatttaagttagataaatgcatcaacaaattgacgtatatgtacttaactgatatatatatatatatatgttaatgtgtatatatatatatatatatatatactatgttaatgtatatagttatagttgcaaaagaaaaaagaaagtgttaaattttggaatgtgaaatgttggaggagaagatggagagagtgtgaggtgggtcagtgctgcttttggctctttcattacattagtcagattcccatatgacatgagactttcgctcttcctcagaaatagatcccttaatattgtattctagaagtatatttgacataacggaatcaaaagccaaattgaagagctatgtggacttttctacgtaattaatttaggtcttaatatacttagtatacactctcaaaatgctagtaattaatatagcaaatgacgaatatgtagattgatgatagttcaactagtcatgtaatgatgtgaagatacaaacataatatgcatttgaactcaaatcctatcaaccataagtaacatttgggtacccatatttataccaaaacgtaacagccaattaaaaaatctggtaaaatttcatagaaaacgacgtaatcgtgatacctttgtttactactaatcttgatactttatgatttacatccatgtgaaaataaaatcatgtagaccaaaaatttctcatacaaaaacattaaaaatagaaataatggttttgcaatattttgttaaaacagttaatttttttaaaaaaatacacacgtatatattcatagtttatatactttataggcttatagcatagttcaatagaggtacagacaaactgaaaagaaatgaacctaactatctgtcttcacctcgattatttgtcgtctgtctgactattttaatttaattctaataatttatgaatgtgactagtttggcttataggcaaagatcaatttttagagtggggttattgaatattgtattctaacggaattgtatgtattttcaaagacacggtgacatccactgtcattcaatttctatttgattttgttacatttgagtttcaatgtattattttgtctaaatcacgagtaaaacaaatacgagccttttatctctgattttgatgtatttctcataaaaattataaacaaaataattattcccaaaattgttttatttctctttcatctaacaaagagataaagaatcagaagcattttgagaacaatataatggcgaagaaactgcaagatccaccgatggcatcttcaaaatggagccttcggctttggaggaggaagatcgtattttaagaacagaaattcgatcattcatccagatctgatcccttatgttgcagttcccactctctttttttcttttcttttttgccatttatgatgcagtgactctttgaacatgagtgaagttcaaagagaactcagtcaaaatccataccaattaacgattaacacattacaacgtaatacataagtcgtgtattgtagtgactttgtcaaaatccaaattcagttacgctaaaatacattgaaaacatcaatccaataattttgaaccaaagattcaaataaaaacacgattttttttattttgtaatcgaacgattttgaaccaaagtatagactaattaatatttgggatttttagaaaagtttaatatatttaaaccctcatgggttaacctaggtatgagtttttttttttcatttgtaatatgttgattatgtgtattcttgggtgctataagcagaagttacatttctgtctccgtataccgtattaaaaataatgtatactcaattgtaaatatctttgattatgtcattatgtatttcatgtatacatgtcttttctcctaaaacttttataccacttcataaatcaagaattgtaagaaagttaaaattaaataaacagaaatttagtgtttaaatctgatttaaaatggaaatttgaaagtaacgagtttattatatagtaaaatacatataagaaattatttaaaacccttatttaaattatatagaaaaaaaaaaggtcaagtagtcttctattatttactagtataacctctagaaacatcatcaccacattcctggctaatatccttcatctagaacaattattaacgaatcaaaataccaaaaaacaaagcacctcattgactattaaattagtactaatacattaattaagttattattcctatatataaatctcacccattctccaccttatcatcacaatccaaaactctctctctctctctctctctgtctcttgtcttatcatttatctctctaacggcgaggcaatgggttttccggtgggatattctgagctacttctcccaaaaatctttttctacttgttatctttcttaggtttgatacgtaaactcatctccacaatgttcaagatcattggtctaccagatttcttagaacctgaaccggtttcaacctcatggcccgacccaccacccacgttgaccaaacctgactcagcagcaatactagccggagagatgttaccggttgttcgattctcggatataaaccgaccggaatccgagtgttgcgcagtgtgtctctacgatttcgagaacgacgacgagatccgacggctgacgaattgtcgacatatatttcatcggggatgtttggaccgttggatgatgggttataatcagatgacgtgtccactttgtcgtacacagtttatacctgatcatcttcaactggagtttaatcaaaggctctggtctcaatcttctgctgtttcttctcaacttcttgatgaatcatcatcttaggacgtattaaatctttgtccaaacaaaaaaaaaagacatattaaatcctttttttttggtactttcattgggaattgggtttggtgtgagatcgatgtaaatattaaacaaaaaaaaaaaggtagtggttacaggttaatgaaaaaagaaagaagaagaaaatttgtacttatccatccctgaaagatgaaattacattttgagttattataaagttgtaaactttttttttttgttaaggaaaaaaaaaatcatttgctataacagattaatactgaatgtgttagttttttagtacagtattttaataaacattgtttagaagttattttttaattgttacttgttcacctggctaactcaatgatactgacatattgttttttgattaaaggcttacatcaatgatatctttcttttataatttaaaatcaacaagcattatgcataggtcattgaagataagattgtttgttcatccctataacatgctgaactaatatatttcaacatgtatttgagggtatttgaaatgttctataagtggtaataacaaaactgaagtcggaaaccgatatgattattccccacaagtgctaacatcatgtatttaggttctcatccgatgacatgtcttgaaagaagcaaaaattaatggcgaaatcgtcatgaatatagatatatcttggacattgcatttgacttttgtttgatcacgtctctcacaaaggagcttggtgtgtcctttacgatttatcatgtgatctattgtgacaatgctggagctatctatctatgggataatcattttgtttcattcttgtttgaaacatgtggcacttgactatcattttatcctaatcatgtttttcactcccggtttcttatgtattgttcatatttcgtcaaaagatcaattagcagatacattcaccatattttttgcttactatattttgctacttgttttgacaaaataagctaacctatatctatcatttatattgaagataagtatataagagctatctagtaaatatgtgtaatttacacttttctactgaaactagaacttttacttgtatatatatcccaagttatgttctttgtgtgggaaaaaaaaagttaggtttctttgtataaatatagttgtatctctatcattaatcactaaaaaataatctttcgtctatacaagagaccacaaatgaactcttaatcattgggaattaggacttttaagagccaaacaaaaataaataaataatcatttggagtctcgtaatagaaagagttgcaaagtggaatatgtaaaactggtttgtgcaaaggcgtgacgcgaggaagcttcccatgtgaatgtaaactttggagtatgttatgctgtcgcggcgtggcatacgtggacttgtctgtgcgtgtgcttatttctttcaataccctaactcaatagagcccacacgtttctaatcattttttgctttccgtttaccacataaattaaattaaacccttttgaactatatagtatatcgttaaaataacgtatagtaaattatgtttaatcttaaccatttattttattttgaccatttcattattacatgtggtttaccagccagaacttgcgccatcttatatgatgattcaaaacattgctcacaattataaaaaaaaaactatgatagttgtacaacttatattgaaatatagaagagtagtatgagtaaactatacataagtttgatttaaaaaattgtgaatacagtgatttttttaagcatatagtgggagatatcgttttataaactgatatacaactcttcgaacatttgttgtggttgacccactttgactacaaagcctaaaggcaattcaaaagatggtatgaatgaatcattagctctatagtttatagttttcgacattttcattatacctagatataccctaagcaacattgctcatcctcgatggttccacgtccaccctcgtgcgccaattggaacaaaaacaatcgataaataagttaaagtgaacattgtacacatgtgttacaaagacaattatgttccgaaaaaaggaaaaagcctcctctggtttgcattaactagcttatttagcctctttaataccatcaaccttttgtattataaaaatgttaccaaacactttttgttcatcaggtaagagtttatgcaaacaactttgatcatgaaaatttcagactttcaaatgatgtttgctatatgtaagttctgatagtatatcgatccaaaaagccactgacaccgagttttatttttccacaattcttacctcttgcttgtaaatccggtttgagactgtacttagattcttaactgattgagatcaatgcagaagattctcacaaaattaatcggtttggtaataagttctaaaccagaaccacaccggtttgcatatctcatccctccgtgtaggattttgcgatttccagagagagagagagagagtgagactgagattgagattgtaatagctggatcattataaaagtagtttgtgattgtgaattgaaacattcgtctggtttcggatttgatggtattgtggaacaaaattaattaactagttttgttttgctaaacttgctaagtttataaattgagttaacaagttaggtaactaatacatatgttgttctttttctttacttaaataccaaagtcaacaaaccagttgatgatagcaaaagcttttcagacataaccagagtaccaatacctcaaaataaataaatcgcagaaataagcagaggacaaagctgaacaatataatagttctgcacacctaaaccaagtaacaacaacactttgacacataaaatgaagatactggttaaatttcttaatgctgaggataaccgggaggcgggtaagatgcaggagggtagccttgagcaggcggtggataggactgagggtatccgactggaggagggacaggttgatcaaaacgagacatctgctgagctggtggcacacccattggctgcgatccaaacactccatctcttttgtccatctcaagtttgtgttgtgtctgcaagcagaaaattggattttgggttatatatatataccataagagaagatagtttcagaagctcagataagtttctaattctcgctttctagtacctgcatacatgcgcagaccctgcaagaaaatcaagaccgcaaaatattagcaattcgtgaacatgaatagattagagggagaatctaaaaatcacaagaagtaaatacagacgtgcagtagaccatatcagcacagcaagagagtatctgagaagcctcggaaagttcatcactaccaacaatgcaagcaactatagagaatatgcaagcaacttggctgaggcagaacataaatcccttcaaacacacaagatgagatttgttagtttcacacatgtgtaaaaccaataaaagtagaagaaaaagagagtatgagagtacaattatgcaattgtcgcattgtgttgtctggatgttgaattcatcctgcagaagaaagcgggtagaggccacagagtttccgaagcaaaggaagacctgaaaatttcaattgcaaatgctaattcataagaatcatgaagagatctattgaattattgcaagcaggttttaaatgccaaaatatcaagaacatcacactcatcggtaaataatgtgatctcctaagtcaaataagttgagcaacggaattctaatatagagcagaggaaactaggaaagatgacggaatcacattatataagatttgaacagatgtcccagaaagacacagtgacacaactacgagaaaaagaaaatatccaaatcataaactgtttcatgttccactttccatttcaataagtttacacaaacaaaacgagtgtcattcactgatgttaaaactaatgttacattcaccaaaaaaatcagaaataatcgaagtctcacctcagtggcaaggcaaagttgaggacatttgctttctccacaccttccactacagggcatatatccagcacagcaagtatacctgtgacgcgcaatatcttagcaaagaaaaaaatcagactaatattctcaaaatagtttagaaattacataccttgacatgtcattgtaaagtgctcttctccgaagcatgtatgacacacaaggtccactacattcaaaatgtataacaaatcaaatatgtaaccaaaaccatgaatacagactcaaaattgaatcaagcaaaaataagcctaaaaacaatctcagatacaacgaaaccctaaaagcaaatagatcaacaacaacttaccacagacacgagatgcagcaatctgcaaaaagtaagttcataattcccgaaaaaaacaaaaatcagttcttcaatagaaaaaacaatgaagttaagagacataaaaacaaaaacaaaagagactgagatttacagggagtgtcggcggtgacggtgcccatgagatcggagtgccataaattccggtaatcttgcctaagtttcatcttatccaacttatcttgcgacgccgccattgctttggaaactcaaaaaagaagaagttcagattcgaaaaaccctaaatcagtgactatacagagcaaaagcaataaatcaaaatcggttacaaaatctataagaacctgatgatctgcttcacgcgtaaacctttaattgatgaaagcagaaacttctcgtcaccctcacttcaacgaagatatttttttttatcaaatcagtttcttagaaaaaatgagaagtttgactattatttaggaccagtttgacccacaactttttctttaattgtcgggaccaacaaatttaatatcctcgggttctgattggttaaaatatgaccttggggaatgccggaattatataataaattttaaatttatataattagtaagatcaaaaataaaaatcacattaatgcacaaataaaaagattttcaaaatgttgaacgcattaatcaaatgagggtttggtaacaatttcgatggtttctagaaaataactattcctctacggatttaatgagagtttgaagtcgaagaaagagtttttctatctctgcattctaaattttttgcaaatgttggtaatattacaaaatattttgccgacaaaaaaaaaaaattacaaaataagtttttaccgtcaccaattaccgcatgtaaattttactttttcaaagtcagatccgttacattgacaccaaatttcaatttctcctttttcaaacaaaagtccactgtcgtcaatggctctacgaatcacacgctaaattcgatttgtttctatttcaatagcaaatgagtataaaaggtttgtcaattcttacctttagcttatgtcatgcaaaataccctagtgggtttagactttaagatataaaaacaccagagagaaaattactacaataaattatttacaaacatagacaaaaatgtgtaaattaaatgtatatggagaaattcataacataaataaaatacgagggtacatttgttaaacccactaattgtctgctatataaacatagcccaccagaccaaataaactggacctgtcatgccttggttctgaaacaagaactgtgaagaaaaagagagaaacaaaaaaaaaaatcacacttttttgggtaaaaggtccaaatttacattaagaaaaaacagttttctttttgccaattttggattctggtggttttcaaaaaaacaaagatcacgagtgtcacttgtgttttctctgtaaccgtttcatttgctcaattcaattgcagagacagtaaaaaaagacagaacataaccccaaaagattcacttgtttatctctcttcttcttcattgagaatcttgagtttgtgttaccaaaataaaaagggcatggattctgatctttatatctttgatgggtcttcatcttcttcctcaatctgccacagtactgatcctgatatgttttcctccgacacaacaacaacaacagatctctactgcaacaatccttatctcaatccttcaatggatgatcatcaatctcttagtttctttgaaagttttactccgacgactcatcatatcctctcttcttctcctccaatctctcagctccagaccttaactctcacacacacaaacagtttccccaacttctccggtttcgaaaacttcgacactgtcaaaacagagcagctcttgtttaactctccctttgatgctccattcatggaagattcctcgaattttcagaatcagaatttgttaaactcgccggaagattccttcttctccgatcacatgcgacgagtttacagcaccggagatttgcaggtactttagctataatatcctctgttttcctctgtgatttcacacaaaaactaatattttggaatttttttagaatttaggaagggattttacgggacagagatcatactcgagtcctttggcggcggagagttcaccaacgacggtgttttccggcgatgaacaaagcttgagggtggggcgttacagttccgaagaacgtaaagagaagatttctaagtatagagctaaacgaacacagagaaacttcaccaaaaccattaaggtaataataagttaaataactactatttaataactagttttaactattagcaatataaaattctaaatgaatttaatttcggtttaacaagtttatttttttctcaatcaaacgaaaaaaatatctaattttctctatattaattggtcaaaataacaattaaaccagaaatagaactgaattacatgttcttttaaagaaactggaatataaatcaaactatttcagagactttggaaattaacttgaatttttgcttggttattattccccgttgtataaaagaaaaaaagaacaaaactcaaattatatgcacatattcaattaattaaataattgttttacaattttatacaaattacaactttacatttgtaattttggtttgcaccgttataattttcttatatattaaatgcaaaaattgaagtatgcatgccggaaaacgttggcggacaacagaccaagagtacgtggcagatttgcaagaaacgacgaagtgtttgagaaccccaagattgcttcttctttcactagacaagaaaacgacgacgacctttgggtaagtaaaattcaagttgattcctaaattacaaaccttactttttcatctttttatacaagtataataaattgtatttaaattgagattaagtaaataactgataattatttacttattttttaacattatggcagaatttggatgggctgcatgaggaagaagaagcttgtgtgaacttagtggaatgtcagtctcagtctcagcctcagttgcaaatgcaatacatgacaaattcctactggtgaaattaaagcctctgtttgagaaggaagagatgaatatttttcccatttagttttaatatgcagacgaatcgaattaaatcatatatattagcaatgtattgtagtgtaatgattggatttaccatgaagttgagtaatcataagtcggatctttgcactgtgtacgttttaaatgacataattagtcagagagttttgggttaagagtctatatactattctcttatacatcatataaactataatctcgcaattcatgtctcgaacatactactgcaccagaatcaaaaagtaaggtaaaaattatggatatttatttccaagagaataaaatagtgatttaatatataaggtacctagtgacattgtcatagtggtgttacatgtgaatatgtaaataaataaattgtgctatgattaattatcacagatggaaaaatctttgaccctcgaaggaagattccttggtctgaattttaatttatatgatgaatttgaattagtggactactaaacattggttatatgatcttagattaatattttaatagtccgaatcattgatatatagtagtcaaaacaacatttttctatcatggaggaccaagatcctctcttgtcagtttagtctgttagtacatatatgaaattatgaattattatcgctttagagaatcacatttcaaattaatatatgtagaatagctttgtagtatatcaatatgctcaagtccaatcatccgttggacttgaaacaagttgcacactaaaaatagtggtttagtatatatgtgaaacaaaaatttgctgatgaaacatttaaagtttaaacgatgatgtaagtttaacattgatggctcattagtttattgaagttcttcaggtggagaagcttaaaaattaactgatgagaattatttatgttcaatgtagctaccaaattattactgaagtttattttcttggaacaaagagcaattaatttagggttaatcccgttattctactacagagtactacttgaatactggaacctttttttttttttttggtcaacaatatactggaacctttttttgcccgttattaaaacatcataaaacctagtagaaacaagttgcaaaattatcaacttgcaaattatagttctatctataatttatgctttcaaaataattggttacctaaaaaggaaagatgatgctttccttcatagaatatgttctcacggaaatcgagatatttttgccttttgaactatatttatgtttgattacgaaagatggaatacaccagcattattctatgaatacgacgcattcagggataaactttacatacattatatgtaaattggtcgaattcggatagatttttgttacatctatatatttggttaatgggtatcatagagtacataacccctctatatagagtgttattatttgattttttttaaatctgcgtataggttctagtagttgggcttgttctggttcatgacatttgatcaccgcgaactactgttgtaatgtcaataaaattctgcgtattcataaatcgatatgatctatgtgactacggcatcgtttttatttgatttttgaattttctttaggttgtgaattattttgtgtccggaataaaccgaataagctaccaaccaaatatttgtaatcaacttggatatatacctattctccatctactatttataacttttaaaattgttcaataacttatattttgaaatgccttttataaagtagatatataatttaaaattgcaaacataaattcttttaagagattacacttattcataagaaaatgagacatggaatcacaagttgctatcaactagcatatcatacatatgaatattttcacgtacacgtcttctcttttccctcttttgtatgtgtttatcatctcatatgataactagcttacatttacagtagtaaaattgcatttggtattgtcctccactcgaagtgtcgtccattaaagtcaaccatgaataatagaaaaggtaatcagaaaaaagaaatgagaaatggttaaaaatcggccgccttgataaaaattacaaatacaatgcatggagagcttgagcaggctgcaagtgcatccatgctaattatgtgatgcgttgaccttttatataataagcacgtggtaatttttggttaacatttttagctgccgtgtgaatgtctaattagatgaacaaacaaaaatgttgcctaacataaaatgaaacaagcaatatatgttaagaaaaataaactcctaatttgaactattgttttgttcaaaaaaaaaaaaaaaaaaaaaattttgaactattgtaatgttctgattacaatattctttccaaaattttgcaatactactatattaaaactttgaattatattttatataatacatcgaaacaaattaaacactgaaataggtaaaacggatatattgttttaagttactgtaagatgcaggcaaagttaacgtagtaattctttatcaaaaagtttgtaatgacacagtggttttccagaatgagtattcgaagtcactaggttcagttttacttgaaatggtattttaagaaatgcgggattatcaatggttaattttgggtaccacatgaaatatgggcaaaaacctgaaattattatggtttataggaagaaaaaacacgtaacattaacataagtacataacatatagttgaattttttctcctaattaacatgatacctctagctcaaaaaataaagatatctctagctcgtatgtgagttttttttttagcgcattgtgcaatgcaatctagatgaataaattttcttttgttttccctaaaatcagaaatggaacaaatgaagaaatttgagtaggttgatagtgctatgttctatattcaaagtatttttttgttctatggtggaggcaagaaaattcataaaactagcacgtccaaggctagaggattctaccagttttatatatgttttcatttattaatttatgtgtaacccaaatattgctagtgcctgggtgatgtcaaatccaataagacattatcatagtaacaaccataaccaaaaatttaataaaaagaataatgagtaccaaacaaagagccttcaagtttctaaaaggcttgtgttgggcagcatgttcagcctataaatgtcattatcctaaaacttattatattcagtatctggttcatgttttttttttttttttttttttgacagagacaaattaatatggttattttatttacagttgatttcaacatatttttatatctatgtaacatgtatgcatgtcttgcgatcagtcattgatttaataatatcaaaataggttaaaatacgattcaattaagtatgtataaaaataaattacagttcttgatatttcattatgctagtttatgtgtttctaaagttttacaatatttttttttctttttcttattcatcaatctctcttctaatatttagacttctagattccaccatcatctgacatttatttctaggtccattttttcataacatcgaaccgttaatttgtgaaatattaccacaaatgactactgttctcatatgtttttcttcacttaattttttttgtgattttagttagttggttagttttctcgagaaagaaaggaaaactattctcagttacttttgctttctttcttatttcatttgatgctcctaaaagctgatatttctattaatcatgttattcaaaccgaggcaaagcaaggttctctataatctgtatatgtcagcttacaagaataatacgttacgtacacaggaagacgtctggacaaaagttataccaaaataaagacgtctagaggaattttggacatttctttatatcaaaataaataatcaatcattaaaggttttatgatataaactagtataagataatcgtaaccaatcatggcattgtttattcacaaaagaatcgatacagaatggggctcgtgtcacatatatacgtatttgggtttagttaacttatcaaactttaacatatgtcgatacttccattctcttatcgatctccttgcattgatcttttttcttcattgtttccaaagtttcacatttaagcatatagctagacatgtttcctaaagcagatgaagttcatgaaaggatgctcaaaatgttgaccactaattaaccttgtacctttgatttcttgatgcatgctagacaaatctcataaagttaaattcaccgaaaacaaggataatccacaatttagcgcattgacagtactaaattttgtatggctataacaccgcaaactttctaccattatataaggaatacctggctactaattatatttttacaatgagaatagccaaatgtataaaagagtgtattaaggaataccaaactactgtcatgactatcgtctactttctatcctagaatcagtgagccagaaagaccaaaaaattacatttcgctataatatcaagaagtaatcagaaaacttctaaacttttaggcataagataggaaaacatcaaaagttaaagggtctaaataaatcagacctagctagttagagggaatttctgcgagtcgtgattccaaacagcttaaactataccctgttcgattaacaattaacaagtgtattttacaatcagtcatgtagcaatatagaatatttcataactaatttaaatcaatactatttagtacagtttttattatctcgctgtgtaaaaataaagaataattaaaatttgatatacaatgttcctaactaattttctatacaaatacataaatattcacatttttacaatgatcatcagccaaatgtacaaatgagtgtggattattttatgcatgaacacattcatgcatgcacacgtacgtatatgtataccacctacatagaaaatggctatatttatagaaaaagaagagatggcttatgtggcaaattagtgccaaaacacaacttttgtgaattgtgacctcaagaggatttggtcgttctttactgcaaattgtttgtttatgttcattgttctaggagagtcttctattagaaggggcacatattaagttgagtgtgtgtttaacaaatgttttacatatatatatatatatatatatatgtatatatatatataaatctttttctttataacttacacgcacattaacaaatttgaaactaagttatgacatgatagccgtatatcaaaaactaatttatactatttattatgaattcttaaccaacaaatcactattagttggttttataaacttggttaggctttcaattctaaaaacaaacatcatataaatagaaaagataaaagcaaactgattcttgctatttaagaacaaaacaaaactatttacttattagttaaatgaattttataatctaccttcgtgaaaatacccatttctgatattcagttataataatgattaatccctcaaccaatagggagttggcatttcgaaagaattttatatcataaagcttgtacaaacagataaagaatcaaggatgatttgattattatgacttaaatgcatattttattaaatcaatgaataagagtaagagcactcttggaaaagtggtcaaaatgctacctgtttaattctttgtaggtgtagtagtctaatgcctaaaaaaaaataatttgtacaaaaatctgaatacaaaaatataaaccaaatattcttttaataattttatttcgtttattgatttgtttagctaatctattgattttgcttattaatttgtggggtatcttaccaacttcctccacaaagacaaactagcttcaaaagacaaggtagtcttttatcttccgttgtcgacttgacaagtactttataaataaataacaaaccgtcaaattggcgaatcaatcttgagaattagtgtcgacataaattttattattgtacattatacaatttagacgataaatagtccaaatccattgtcctcgagcagggacgactctaaaatatgggaggtccaactgtccaagccaaagaaaatgtcttttggatatttgtagatagtttaaaacaatgagagaacatttaaaaaaattggggacaatgttttggatatttttatatagttttaaaacaatgagagaacatttttaaaatattttttaaattgaagacatatatttacaaaaataaaaaatttagtgattttagacccatatttcaactcgtagaggatgaactgatgcatgattagaaatttagaatcctgaccttaagtcacttgtgtttttttgctcaaaaaaaaaaatctgattatttatttttaagcccaaaacttagataatcctttacctttttgctttgaaaaagttctgattaaaactttgtgggcaattttcttgaacttcatcactatttgggctttttaacaaactcacttatggccagttttatagaaccggcgtcgtatgatacaagcccttgcacgacagcgtatctatgaaaaataacaaaaactgaaagaacaaaataaataaattaattcggacaaaggtttaaacttaaacccaaccctggtttcttcttcttcctcagtgccgccgtaaacaagcttcgccgtcgattttctcctcctctgaagaagaagataatttaatttctaaagtaagtttgcttctgattccgttaatagtctctatttcgaagattgtagtctcttaggagaaaatcttagtaagattgtaattttgctctgcttcacatgatgggcttaaacgatgatgaagcccacataggccattctgcaatttgagacgaaatccttgctttcaaaatatatatacattaaacctttcattattttgctcttcttctccttcttcttaaaccctagtcatcgagaatccagtaccagtaaccatggaggcagatactaagacagactctcgtactctgaaagttaacgacttgttaaaagatgctcgcttagattacgattctctcaggaagcttgttgatgataccgtttcgtcgattaaagaagctattgatggaatccctgaaaaatttcaggtagttttgtgtgcatctatatatgttattcttctctggaaattgtttgtttatgagcttttttagcagttaaggaactgtaaaatcatgttttttattaggttacctcggagttagctcctagttttgttgaggacattggggcagataaagaagtggagttcagttttaagaagccaaatggtttcaatctctgtggaagttactccatttgtggcatggcaaagccggatacttctgttgatcttcttgttcacttgcctaaagtaagtatttattgctcatttcgtaagttttaaatcgtgtcttacaggttatgtaattatataattgttcttgcaggaatgtttttatgagaaggattacatgaatcatagataccatgccaaaagatgtctatatctttgtgttattgaaaagcatttgttgtcgtcatcgtccattgagaaggttgtatggtcaaccttacataacgaagctaggaagccagtccttgttgttttcccaggtgtgctcttgtttttgggttagagaaatagtactttttatgttgacaattatatttacgttgagaatgtgtgtgtttgcagctaagaaacttgatcagtttcctggattttccataaggttaatcccttccgcaacatcactgtttagtgttgcaaaattgagtattagcagaaacaacgtccgttctgtaactgcaggtatcaagaatgttgaactcttcttggataaatatattgaggcatcattgtattgacattctgatttgtcttgatgataaagatggtgtccctgagcccacgccaacttacaactcaagcatattggaggacatgtttctggaggaaaattctgagtttctcaagaaaaccttctctgagtggaaggagttgagcgatgctttgattttgctgaaggtatggatagttaacaagtattgttacctgtgtatattgtgatccttaaacgtctctggttgtgtgcagatatgggcaagacaaaggagctcgatatacgtccacgattgcttgaacggatttctaatctctgtgatactttcatatcttgcaacccattccaaaattaacaaggcactaagtgcattagatatattcagagtgacattggatttcataggtatgttagtacagcttacgtctatttgttgcatttgaagtatttgattctgcaatatggataaccaaaatttgtcaatcctgtttggcagccacttctaaattatgggagagaggtttgtatcttccgccacagagtgaaattcgtgtctcgaaggaggtgtgtagtctacttgcttttctgtctgtttcatttttatttttgcgtatcagtatgactatgcactggtactactggattcgtctgctggtgtatactgttattgtagtataaaacattagacataaggcatcttctgataatccaaagactacatatagaagtcttgataatgtttgaaaaaccatatgtaggcactagatttttcgtgtatgacagtcttgataatgtttgaaaaaccatatgtaggcaataagttttcttatagtactcgagctaattgacaaatattttagcaagtattctatcaaagaaattttcatgtgcgcatacaggtgtcctgttctctgcatacttttgttaactgattatcaatgattaaaattcaggagaagatgcagttcagagagttgttccctgttgttatatgcgattcatctacgtttgtgaacttggctttccggatgaccagtgttggattcctggaggtacatgaagctggagaaaaactcttaattcaatgtttttcgattatccgatatttcatccaaggctgtggttgtgttagtgactttttcatggaatttgtttgttggtcagcacagcttcaagatgaggcttctttgacgcttaagtgtatggagaaactcagagatgggggattcgaggagatttttatgactaagattgactatcctgttaagtatgaccactgcataaggtaagcttcacttctcacttctcctgattgatatgtattgtattgtcaaggatagaagtggctggttatgttcttacttttgtcaaaccgttatggaagtggctggttatttcttactttcgtcaaaccgttttatgcatgtggaagtatgatactaaaaaatttagataggaatatttttgtcacaggttcaagatagcattttttctgagctagtttgttcccttgtcagctagctatcctgacatataagttctcttaggttacagctaaaggggaaaacagcagtgtctctgtcagggttttgtttggacaaggaatgttggagactctatgagcagaaagtgcatagcctgcttttagaaggactcggtgacagagctaaatcaatccgtgtagtttggagaaataccaatcaagattggcatgtagagagtgtaagttttttccgatgatgaattttacttttcattgcaacgaagtgggctcttttctaatactcttaactgccattgaaccagggcttgtcagttcttgacagagaacctcttttcattggcatatctgtcagctccactgaaaaggcttatagaacagttgatattgggccagatgctgaaaacaagatagaggtatatccaaaatttctgaatcattgctgtctcattgggtggtactaagtaatatattggtctaggcacttagattccggaagttttggggtgagaagtctgatctaaggaggtttaaagatggaagaatatctgaaagcacaggtgtgtaatcaatacaattcttgtggcagagttaacaatgaagttttgagttaatgcaagctgaatattgcctcgttcattttctcagtttgggagactcagcagtggaccaaacatcttatcatgaaacaaattgttgaatatatccttaagcggcatctttcactgacgtccgatgacattgtacaattagtggatcaacttgatttctctctaaactatgggggcaaaggtactgctaaacacagaattaaaaaaattcctctttttctcaatgcattgcgcgctgtctgcttatagtttcaatctaatgcaacaacgatgttatgtctcagacccaatatctttatctggaaatttggttcaagcctatgaagttttatcaaagtgcttgcgtgagattgaaggcatacctctcaaagtctctagcgttcagtctttagattcaggtttgttaaaatttagaaactacaagagtgtactggcactgatattttcagtatctgtagtttcttattttaaattttcctcgtgacttgcagctctcaggttcacatccgtattccctcctgaacctcacccagtggcttgcgaaaaaatcgattcgcgaagactgcaaaaacttataccatcctgcattccagcaatggaagtcatgattcaggtgtaatcattacaccagatggttactggcatagttactttgtcttaattagtcatcttaacactcctgtcattattcttcttttgctatctcagctagaaggttctggtaactggcccatggatgatttagcagttgagaaaacaaaatctgccttcctcctgaaaattgcagagaggtgggtgaagctattgtttgtaacacttcaaactattaagtcacagtgtttttatctgagtactgacaaatgaaaatactgacagccttcagaacgtcaagggaataccatgcacagctactgaggataatgtcgatgttttcattggtggttacgcatttcgcttgagaatattgcatgaaagaggcctgagtttggtgaagagagaaagtgagttttcttcttgtacacactatcctctatttcttaataaaaagcttatgtgatgctgacttcctcgatttctactgagttgcagttggagtggacccggtgaagcatgtttcctctaccgataaaatgctttttattcgtagtcaacatgcaagtatgattaatggtttgcaaggtcgatttcctgtatacgcaccagttgccaggtaaaagtcaataaaatttatgtgttttacttttgtttgctttgaagtttcataacccagaccttgtctgctacttgaaggcttgcaaaaagatgggtttctgcgcatctcttttctggttgcctggcagaagaggccattgaacttttggttgcttatctcttcctcacacctctcccactcggtgttccttcctcccggattaatggattcttaaggtacatttccgcgcttccatacttatgaattttatggaaaacaaccaggcaatgctgttggcaacaatcaaaacatcacatctttccgctggaccgtgtaacaggttcttgcgattactagcagactatgaatggatgttctacccgttgattgttgacataaacaatgactttggtagaaatgacgagaaagagatcaatgtgagtcccaactttaataatgggtctagtgttgggttagatttgttagaacggccgtatgtcattgtaaaacatttctggtatttttaggataacttcatgtcaagtagaaaaggctacgaagaggacaaacaaaacataagttcagctatgttcttggctgctccttacgacaaggcatcagaggcatggacatcaacttcaccaaatttattggttagtaattagaatacgcttttgaaaagcatatcttccgctactctgttctttttcttcttaactctctttatttcctttgttaaaggaacaaaaaaggttggtggcttatgctcgaagcagtgcaaacgtgttgagcaagatggtattgcaagaacataatgattctgttcaatgggaggtgagtgtgatgtattgaaaacaaaatgtattgaaccggtattatgagaacattacatcgactaattttatgagtatatatgttgcagtgccttttcaggacacccttgaacaactatgacgcagttattcttctccatagagacaaattaccttatccacgtcgtcttctgtttccatctgaacttaaccaaggttccaaacatagctctctctgtctctatttattatgtctatatcgttagttccaccatttaacttctttcccatttattgaacagggaagcatgtagcacggggaaaagcgagtagattgttcaacccatttatgtcgcctggagatttgaagagaagccatgaagagcttaagaataagctaatggtggacttcgagccgaccaagtgcttgttgagtgggttgcaggcaagtgttgtctcaaaaacataaacaatcatatttattcaatttcttattaaaagaaaggaacctatcacgcgattcttatctttatgcggttgtttgcaggaagagtttgggacgttgaagccatggtatgatcatataggaggcgacgcaattggtttaacatggaacaaacacaattcaaaggtaaacaaaaatcttcttagtgtcttacttaaaagaaacactaaaggaaaaatcgtaataacaaatgtaatgtttgattgcagaaacgagaacgagatgaagaagaagaagaagaagaagaaagtaatccaatggagatgttaaaggcggtaggcgaaatgggtaaagggttagtgagggatatctatttgctcaagcctccacgctttgtctaaatatcaacttgtcttagtttctttaaaatgtgtttgtcaattttgtttactcatcatcatactcaaactgtctaaagcgactaaacacattaccagttttgcttcattcattgagtttaatgtgtaccaaagcttaatgactattcgttgtcctactattttgttttttaaaacaaacaaagctcaagacctttcggggaaggttatgtgacaagcaaagacatatatacaaaacggagtagtatttgtggagattggagaagaacaatgaaaatgaatttacttgtgctttgtaaccgttgtgtaataacggctattacaagaaaagtttatagataagataagttacatgatctcaaatgtttcgatgggttttgtttgatttgcaaatagcttcctgagcatatcacgacagtattcatgtctacattttctttgtggcctaattattaaatttaagttaccgtcgaaacttgaacttgaaactttatttttgccaacacggcaatgagttctcttggaacatctcacatcatcatcatcatcatcatcatcatcatcatcgatatctgtaataaaataaaacaaaataatgaaaaagattctctcacattatcttatttctccacttgattcccagaagacaaaaaaaaaaaaaatcagaaaaaaagaagaagagagaaaccatgtcttcgccgagcaagcgtagagaaatggatttgatgaaactgtaatttttttaatcttattatcttatcagtttattcttgattttgagctccgattttttttctaatgtttgtttggcgatttgattcgatttttttgtgatgatttgatgtgagagtttaggatgatgagtgactacaaggtggagatgatcaatgatggcatgcaagagttctttgtcgaattcagtggacccaaagacagtaagtaactcaattcgtcccgtgaataatttaaatcatagagttttgattctgttttttcttgttcttgctgctgatgatgatcatcatagggttttgtgtcaatttcaacttatcagtatcaacttgttaatttttggtgattttatctctgtgtgtttgtactatggacaggtatatatgagggaggtgtgtggaagataagagttgaacttcctgatgcttatccttataaatctccatctgttggtttcattaccaaaatataccaccctaatgtcgatgaaatgtgagttcaatcgaatcagtagatcttttggaggagtgattatgttccttctccaaatcttgagtggtgcttatttgttatccctctttgtatgtggttatgcaggtcaggttctgtttgtctagatgttattaaccagacctggagcccgatgttcggtatgatcataacaaatggaacaatatacaagatagttttaactcctgttagtttttgttatgttaattatgatttggatttagttattcagacctggtgaatgtgttcgagacatttcttccgcaacttcttctgtatccgaatccgtcagatccattgaatggtgaagcagctgcattgatgatgcgtgatcgtcctacctatgaacagagagttaaaggttagatattgagttgattagattcttgttaccctacattatcttatcttcttgctcggtttcagagtattgtgagaaatacgcaaagccaagggcggatactgaggaaatgtctagtgatgatgaaatgagtgaagatgaatatgcctcggatggtgatgatgaagatgatgttgcaatcgccggtaaacttgatccttaatcccgcattggtcttgatatgaatcatgtagctggcttaatagatggctaaaccggggatgacaaaaagaagctggtgactttgtatgtatcatgtatatatgaataatcaatgaatgtttaaaggttccagttttaattgaactgtaaaatctctatttctcttgttgtttacgttgtcattttatggtcgtttaatgtaaattattgaagcttttttaatcttcatgttgtgcacctctgttcaaagtatagtttgttgtaaattatgaatggtcttacagatttatctaataaaatattaaaatcacagtattatttaagacagaaatgcccttatagctcagtggtagagcgtcagtcttgtaaactgaaggtccgtagttcgatcctgcgtgagggcacctttttaccatttttactattttttttcttttcctatgggcttctttaggcccacataataaataaacggcccaaaatagctagctatctccgcctcacgttttgaatgacaaacaccttgccgttttctcaacacttcgctatttttcttcagtcgtcttcttcttccggcttctctcgaaacccttacctaaaaccctaatccgccacatccgtgttttagcctcacgacgaatcacgatgcaacgcagactcgtaaggttaaaaaaagagtatatctacaggaaaagcttggaaggtgatgagcgtaaggtctatgagcagaagcggctgataagagaagcccttcaaggtctagtgatgattttttttttcagtatctgttgaaacaatcattgattcgatgtgtatttttcgtttttctgattttggtttatatggtttaacagaaggaaagccgattcctactgagctccgaaacgtcgaagccaagcttcgacaagaaattgatcttgaagaccaaaacacagctggtaagaatttggaagctagatttttccaattggtttgaacctgtgatatgaatggtttgtggcatcagctaatggttatcatctaatcatgttgttactagttccgcggagtcatatcgatgatgaatatgcaaatgctacggaagcagatccaaagattttgttgacaacttctaggaatccaagtgctccgctcatccgattcactaaggtattgttttgtttagtttccgtcgttgaatagatgctgacgttataatgttcctgattccttttcattgatggtgtggtttctgttgcaggaattgaagtttgtgtttcctaactctcagagaataaatcgtggtagtcaggtatgtgtgttgttctggcttctgcacttaaagtcatttggaaatatctaattctctttttttctgtaatctggttttgttttgcaattgatcattgcttgtggtttcttcatcgatgttgttaaattgattgccaatggtattagctcccttttgtttcctgggtataactattgcatgtgcatagacttgtatcagattattgttgaatttatgcgcaacactggtcatatcaatgaattgcatattagatcaagctttataatttaaaatgtagttgagtctgtccaattctgcagaatctagatttcaaataaaagcaagactaatataaacgatcatttaagctggagttgtactgacacttatattcaacacaaaacctctctatgtaagtgtaacacggaaactatgttgcattcgaatcgtaatctaagtttctttcccactctgttaatttgcaggtcatttctgagatcattgaaactgctcgttcccatgattttactgatgttatattggttcatgagcaccgtggtgtgcctgatggtctcattatctctcatctcccatttggaccaactgcatactttggattacttaatgtggtaagtaactctttgaggatctgatttttatatccaaatctttcttctttcaactcctagtttagcctttttacttaatccaaagtcccttctgtttaggtaacaagacatgatatttcagacaagaaatccattggaaaaatgcctgagcaatatcctcatctcatttttaacaactttactactcaggtatatctctagagccaaaattcacttcgttcttactgtaatttggtattggaaaccatcaagcttcgtcgtgtctcatagaatgatcgctctggtttattcatttctaatgtaaacatattttcaaatttgatttccctttgttttgcagatgggtcaaagagttggaaacatcttaaaacatatcttccctgctccaaaactggatgcaaaacgtatagttactttttctaatcaatccgattatatatcattcaggtaaaattttctcacaatgatcagattttacgaattttaattggtgacatcaattgtagtatgcaaagcctaaggtcttaaggcttatgttagcatttggtaatctgatccacatagaaacagcatgtaagaacactgtaaatacaacagatggagatttttataaattcttgtgggtatatatatataggaatcatgtctatgataaaggagagggaggtccaaaatcaatcgagcttaaagaaatcggtcctcgatttgagttgcggctctaccaggtacgcattctgcttaaccgaatcaaaactgttttcctcgagtaaaataatggtttgataaagaatcattctagttccttagtaacaatgttgtttctgtgtaatgcaattatttttgcaggtgaaattaggaactgtggaacaaaatgaagcagagatcgaatgggttataagaccgtacatgaacacctctaaaaagcgcaagttcatcggtgaatgatgactaaacggaacagctttgaaccctttatctaaattctgttttacttatcattctgttggaagagctgttcagtttttgtgtccttagagaaaattgcgatgattttgttttaacgtttagcttataaaaacaaaactttcttgtcttcaattagtatttatcttcaaccatatactgttgcgtgagtcataataaaaaattttgtagtagtatttttatccacgaattcaaacaaaaattatctgagcagcatcgaagtgctaaaaggtattggaaaatggataaacacaaaattgtcaaaattctaaactataatttttattttttaattataaatatctttcatcgtgttgttatatatatatcagtcccaggtttcgtctcatagtttcagttgtgtctctttcatctgatcatcggatctatcggtaatttacttcttcgtcttcctcagatcgatttgatctctgtgaaagtcgcgaaatcgaattttaatttcgtttaatcatttgcttgcttcccagttttatttttgttttttgttaatattatatcgaattttctcggccatatttttcattttaaattctatccattagttttataaaagtccataacttactgctctgtgttttctcttttgattcttctctgtttatagtgagtagagagagttatcatctagggtttatagattggagattttagccgcaacaaggaggaagtgtttttaatttaattttattgttaagagttattgttgctttagggatttttagaatttgggtgttcttttaaatggctcggttgataattccttgtcgaagttcgtctctggcgagagtcaatcttctgggtttgctctctcgtgctcctgtgattaccctttaactcttttttttgtttcttttggttatagatatagaatgttgtatttttgattgattctgacaatagaaatgatataattaaaatgatggagttctgttcgaattgtatgtttttgttgagagtttagtttttacatgttttacttttgaattcggttgtgtacacaaaccttggaaagaacttgtgtaagaataagaaattgttcttgattcttgtgttcctatgacttctgttttgttttgttccatctttatatgtttataattatgttaatttctcttttacaggttcctgttagaagcagttgtcttcgtagttcggcaaacagacttactcaacacagaccgtttcttacttccgaggtttgtgtttctttgtttcttctatcatcaagtgccacgctatgtaaatagagaatgatctttgctgtaattctttgtttcaggccatttgtttgaggaagaatcggtttctaccccattctgttgatgtaacttgctctatccttcccttatgatagataaaatccaaaagttattagtttaatgctgtatttgtgtagttaaaataaatgcatattctgttttatatgtcagacacataagcaaaacagcaggaggctcatttgttctgttgccacagaatcagttccggataaagctgaagattccaaaatggatgcacctaaagaaatatttctcaagaactacacaaagcctgattactactttgaaactgtatgctagctttcttttaattccaaattgagtatatgactagaatcattttgttgttatttgaagcttttttgtttgtttgtttaggtggatctgagcttctctctaggtgaagagaaaacaattgttagctctaaaatcaaggtttctcctcgagttaaaggtacaacagtctagtactttgctgtttctttaagctgaacatacaagtttatttttcttttgcatgagctgtttgcatagctttaagatggatttttgcttctttttttctcacatcacatctgaacaagtatcatgttggccaggatcttctgctgcattggtcttggatggacatgacttgaagctactttctgtcaaggttgaggggaagcttcttaaggtatccattcaatacttttcctttcggaaaatatttgtatctctaggctcactttatagacttttctctaagacaagcaactcagttgactaagaataagtaactcagtttcctctctgatacttggtctctcttttcactttggctaggaaggggattaccagttggactctcgccatctaactcttccttcgcttccagctgaggagtcctttgttttggagattgatactgagatatacccccacaagaatacttcacttgaggtgaacttattttcctttctttttaaactttcaatgatgtaaatgatttcttctaacctttttaatttcttctgttaggggctttacaagtcttctgggaatttctgcacacagtgtgaagcagaaggtttccgcaaaattacattttaccaggttgattacttgttgataagatgactggtgttggggtagtacaattgatgttcttacattgtgttcttattatgaaatgacaggatcgtcctgatataatggctaagtacacgtgtcgtgtggaaggtgacaagacactttatcctgtgttattgtccaatggaaacctcatttctcaaggagatatagaggtcagcaaaataatgccttctttcttgtttgccaagtgtctctcggcttggtctttgctgaaagcataattgtttatggaaatgtagggtggtcgacactatgccttatgggaggatccattcaagaaaccgtgctatctatttgctttggtggctggacagctagtgagcagagatgatacatttaccacacgctctggtaggcaggtttccctgaaaatctggactcctgcagaagatctaccaaagactgcccatgccatgtattccctaaaagcggccatgaagtgggatgaggatgtaagcacttgcattttttaaattgtagttgttacttgttaggttactgaatctgattatttatttatgtgtacccttttttcactaggtgttcgggcttgagtatgacctggatctcttcaacattgttgctgttccagattttaacatgtatgaccaaatggtggattctgtcacacttgtagaattaatccctttgcaaatatattctgtccatttttctttttcttactgtcgataccagacaaactgattgattttcgctcgattttcaggggagccatggaaaacaagagtttgaatgtaaccctaccttactttataagaaatcatgtacttgtaaacattatatttgatggtaatccatgagcttctactttacagatttttaattccaagcttgtcctagcatctccagaaacagcaacagatgcagattacgctgcaattttgggtgttattggtcatgaggtatgtaatcgtttattgatatattttctggcgtttcagttaattttcattaaactcatctttcattgtgctctttgtgcagtactttcacaattggacagggaacaggtcagcctcatctctccttccctttgctagtacaattgattaatctttcttattgaatcttctaattttgtttctggtataaaatagatgcttctctgtgcagtatattttataaatgaaacattcttagtgtgtggcctaatatatgactaaaagtctacttgtaacaacagggtgacatgccgtgactggttccaactcagtctaaaggaaggacttactgtcttccgtgaccaggaattttcatctgacatgggaagccgaactgtaaagcgaattgctgatgtttcaaagctt

SEQ ID NO: 112 - DNA, 111222 bp, Arabidopsis thaliana
gaattctaagaaaaatgtaaaaaattttggcctaaactcataattcttaacatacgaaaccatggagaactccatgtctaaaaaataaaggctaaagctttttggcgacagaagcagataaatccattcaaaacacataaactctaaacaataaacagtgatactcaatactaagacttgtaaaggtctacgtaactcaaaactggagaatttcagatcgggtgtggcagagaagcttggattttgcaagaacttcaactaatttcgcctgtcgctgaggacttctccggtgacgaagccacttgtcaccgatgacgaagacaccacctaactttttcatatgccataaatgtcacacctattcgaacaaaaataaaataaagtacaattgggccgaaagaagaaagcccgttttgagcccgtttataaactagcaaaacattcaatttcattcccgccaaaaattaactttcaatgtcccaatgatttaatattttgtttttaagaatcaatatatgcattagaattagaaaattggtaagtacgagttgtagaaaagaactagtttttgcaggatgatttttgtccacattaagcctttgcagataagaaacttgattaaacaagctaaaaacacacatacacatactatttgtatattacgagagaggcatggatgcgagagtaagagtaaaagaaagctacaataagattgggaaagagatcgtaaagaagaagaagaagaagacgtcacatttctaatccagtttagcttagttttcatatcggtttttaggggatcaccaaaaagtgcttatgaacaagcataaacataacgtctccgttatataaccggaacctgacttatcctactttcctaaagtcaaaagatactacatagtcactagtataatcaaccaaaatgctcggtttggtttgacacaaatccatctaacttccagctcttcttcttactagttatgtgttaggactaagctgctgactaggaggaaacagtgttggaactctgcaatcttccggccaagctgcaacgtccggaacaggagaaaatgtagcagcgtaagttttgcaatattgttcaacagtgtaacactcgtctacatactgcaaagggttgattttgagcttctcaaagactgctagagcgtgcagacatgggaacttgtaactttggaacttcctacacgtgcaggttgagacatttaactggacaatccattcctccttttctgaggactctgagaccttaaatgaatctctctctaactgcgttataacgtaaggaatggaatctgtcatgaactcttcaagcttgtccatgaaaggttctgtgtacacaacaccgcggttaagagagctataaatagaactaagagacttatcaaaagaggatctcaactcatcaaacataagcatcacaccccctgtcattgcaactgtacaataaggaaagcctctacaaactgcaaatagagcttctctatctatctctatgattccatatctcagaccactgtcatgagccaatgcccacttatgtcttgggatttgatctaaccatttccaagcttctgggttcttctctttgatgtcattcatgtaggaatcaaattcttccttctgattcgtggatccagcctgctccacaagactctccaggttgtagtctcgaaaaacgccaaggaattgagagcgcaaatgattcagacagaacttgtgatgagcccatggttcttgccacagagaccctggttcattaacaacagcgactatgtcccggagaggactggagatgaggcaaaggtctttcctttgcgtaaccttctctctgattttagtgaaaaaccaacgccaactatcagtagacacttctttagtaaccgcaaaggcaaggggaaaaaatttgttggctgcatctactcctgaggcaatcatcagtttcaattggtacttaccgttcaaacttttagtgtccacgacgatcaaaggtctacagtgttgaaacccttcgatagactgtgaaaatgaccaaaacacgccacggaaggatgcaaaatcaggattaggaaaaagatcatattgccagtccacgagaagcccattagatgagtgaaatgcagatattaacttgggcatgactctgaaactttgatcctcatctccaaatactcttttgattacttccagtttcccatcccgcatcttggaagtttgaagctcatagccagttttttctttccaccatttcttcaactctgcaattgagagtgtgggctgtatcctgacaacacgttcaatctcatctgctgcaaactctgactcaaaatcatttggatactcatgactacaagtatgtgggccagtatatttggttatctcaacaagtccgtgttcttccattcttgctgcccgtagtgaccacttgcatttccatcttacgcactcaaacgtgtacatttccttctcggtctctcttactatacaatttcgccgccttctaatgcaccaccaatccactgccttctttaactcatctctatctttaaaacacagtcctaaatgcatgtcatgatcgtcatcaatccacagtctaggcagaagacagggttttaaagcaccagaattgacaactttaaccaagatgccagctgagcctgaattattatccactatttcttgttgtgtgatcctctgtctttttgaggaactatcaggactttccagtggcgatgaacaagtaacaggaacaacgacagcatcagaagttggttgagcttccaaatagaattccaaattgtttacagaaggatgattccttggaacctcaagcatagtctccaaactagagtcgttcaacacgggaaaatgtacatacgtaaagagatccggtgaaacatctacagggtacttaccgaagattttgaactctgatttctgcttatctaatccaaacaattgataaagcctatccaacaatctgcttaaggcagtctttcgcataattgtgatctttttaagaatggatccttcatagtatacgccatcagcaccatacttaatataaccattcaagtgacacaacaccataaccttttctctgactgtttcaatcgccatgagcacaacaaatctgcagtgaattcaaagaaaaaatgtaaaaaatttaggcatagcttcctaaaatgaaaaaccctataaagctcaatatcaacggtaatgtacagctctaaaaggagaaagctttctagctatagaagcagataaactcattcaaaaacataaaccctaaacagtgatactcaaaactaagacttgtaaagttttacgcaactgaaaagaagaaaaacagggaatttggaaatgggtgtcgcagaaaaaagcttagatctttcagaaatggaagtaatttcaccttcgctaacgatttcgccggtgatgttactgttacaggtcaggtcactgatgaagacaactactacagtctacagggaaatgagaaatatagcttttcgaaattttataacagaaaaaaatataaaaaaatcaattgggccgacggaagaaagcccgtgaatatttgtagcttgttttacaactgaaaccagattaatcctacttccctaaagtcataagatgcccggctcggtgcaaactcaaatccatctttcagctcttcttcttagtagcgagaggagtagttctgcatttggtacctgatacgtaagttggaggtgatggaggtggtgacggtggaatgacaggaggaagcaatctcggaactccagaagcttccggccaagctgacatttccggaacatgagagaaaatggtggcgtaagttctttttaaccgttcaagagtgtaacagtcgtctacatactgtaaagggttgaatttcaacttcttgcagacggctagagcgtgtagacatgggaatttgtaacgctgaaaatccccgcatgtgcagctgcagtcgctcagctgaacaatacattcacccttatctaacgctgttgcaacctgaaaggcgttattgtctaagggcgttacaatgtaactgtaagtaacgaaagttgtcctgaattcttcaagcttgtccatgacaggctcggtgtacacatcgccgcagttaagagaacttcggctacaactaaaagacttgtcaaacttggatctcagttcatcaaatagaagaagcacggaacctgtcactacatgaccagcctgctcaaatgcgttacaaactgcaaacaaagcttttgtatttatctccatgattccatatctccgaccattgtcatgagccagagcccaccgattttgagggaattggtctaaccatttccgagcttctgggttcttctctttgatgtcattcatgtaggaaacaaactcatccttctgactcgtggacccagcccgcctaatgcgagcccccaggcagaagcttggaaaaacacgagagaattgggagtaaaaatgattcagactgaacctgtgataagcccaaggttcttgccactgagacccagattcgttgacaacagcaattatgtcggggtggggactggaaatgaggcaaaggcctttcctttgtgtaaccttctctctgattccagtgagaaaccaacgccaaatatcagtagaaacttctttagtaaccgcaaaggcaagtggaaaatatttgttggctgcatcaactcctgaggcaatcatcaatttcaattggtactcacagttcaagtttttggtatccactacgatcagaggtctacagtgttgaaacccttctatagactgtgggaacgcccaaaacacaccacagaaggatgcaaaattaggattaggaaaaagatcatacttccagtccacaaggagtccattagatgaacaaagggcagacattaacttgggaaaatcttcaaaactttgatcccaatctccaaaaactcttttgatagctttctctttcgctaaccgcacatcagaagtttcaagctcatagccaattttttttttccaccacttcttcaactctgaaattgtttgtgtgggcatatacctgaccgcacgttcaatctcatctgtttcaaactctgatttgaaatcttctggaacaatgggatgacaagtatgtggaccagtatacttgattatctcgacaagtccgtgctttttcattctagcggctccaagtgaccacttgcatttccatctgatgcactcaaagatatactcgtcctttgcagtctctcgtactacacacttttgctgagctttaagggaacaccagtccactgccttcttcagctcatcgccatctttaaagcacaatcctactcgcaagtcatgatcgtcaagccacaaactagacatacacggttttgaaacatgaccagaaatggaatctttattcaaagtgctgctatcaaccaagtgtaccacgccatctgattctgagtttctatccgtctccctctctaacttaacatgtatatcggtcttctgtcttttcgaagaaccaccaagaatgtctgaaggcgatgaacaagtagcaggatcaataactccaacggatgtcgattccacttccaaatacaggtcaatgtctttaatataaggatgtttggttgtaatctcaagcatagtctccaaactagtgtcgtccaccacgggaagaggtttatacttaaccctaaacgcttgaatatctgtaggatatctaccgattataccaaactttgatctcttcctatctaacccagtaacttgatacagatgatccagcaattcgttaaacttagtctttcccttcacagtggtcattctataattggacccttcatagtatatgccattagtgccatccttgatgcaaccgttccagcaacagaacaccggaacatttacttcagacatgagcacaacaaacctgcacggagttcaaaagtaaaaatgtaaactttggggatgcaaacccttttctctgacgttagggtttctccggcggtatgaggaagacaaaacgacaaaaaaataaaaaacagttgggccaaaataacaaggcccaactatatgttcatcaataataaacccgttcatcagtaatgggtaacccgtttagcttggttttaaccagactgaattttcacatacaaataaacctgaacctgtttgtttcctaagtctagttctctaactttcaggtcttcttaaagtgggcatgaataaatcctaaggagatgcttcatgttaaatcctaagtttcttcttacttactgatacagaaaaactaggatctgtttcttcaatcacaaacaatcgatcaatcaaccaaaataacacttccgattaatattcaaggataacaatgagctccaatgttcataaaacaggggagactctagattcaccttgcaagaacattgttcttcacagaggatgaatcataatattcgaaacccagaaacctcaaagagaagaacaacaaacttcaacaactttcacgattatgataaaatgttcctgatccagcttcttttaaacgcaggcaatccactcgtttccatcttggccgttacttcatcttttaatcacagccctccacgtgtctctgctcccttattatttcccatatcacttactaacttactccactcctcatcctcggtcttgtcttcttatgaactgagctcattttggatcatcgtctttatagatgactttcttggggtgaggtcgatttcgaacttctcagctgtaaaaccagtttaaaacaaagcaagttacaaagacgacatcgtcggtgaagaaataaaacgatctgatcttaactcataccaagtcgcttgaggacgtcagcaatcgcggtctgtcaggaaataacaaagctattattagagacttatagatcaatttatcttctaaacgcacataaattttttgaggtttgaatcctaaccgttttcaagtccacaactttcaagatatcaacaattgcatttctcaactcttcatcactaggaggcaccttggctttgtcatttactagatcaaacaaagacagataaacacatggcgtcagaaacataaaaagataaagaaagatatatcaaaattgatgatgacactatactgtaattcttcatgtttatgaatctaaggaaccatcgtttaataagtactcagattgttctgaatcctagtcttgactaaagctatctttcgtattgaattgtatccatgccatagtaaatacttaagttaatattgaaagtagaaacataatgtaatgcaactagtaatgtgtataccgatattagttcagttttcagtcatgattcttggtttattaagactattaaccaagtcaaagcaaattcaggattaatcgactgttagttcagggcaaaacaaaatgcaaattcacgttgattttcacaaacaaaagcagcaacacatgtttttgtcacgacactacgatatataacccgaaccggtttaatcatacttgccgaaagtcaaaagatactacataatcaccaatcagttagcacaatccatacaaaaacctcttaagaattgactcagtttcgtaccaaatccatctaacaggttcagattttcgtcttactagtgcgaggagtagttttccattgggacttacctgatacgttaggtggcggcagaatgaccggtggaaacagtgtcggaactccagaagcttctggccaagctgctacttccgggacaggagaaaaagtggcagcataagttttgtataatcggtcaagagagtaacagtcgtctacatactgcaaagggttgattttcagcttctcgcagactgctagaacgtgcagacatggaaacttcttcaactgaaactccccacacgtacaggaccattcactcagctgaacgatccattcatcctcctgtaatggttctgtgacttgaaacagacctttctctaatggcattacaacgtgagggatggaatctgtcattaacttttcgagctggtccatgacgggtttggtgtacatatctccgcggttgaccctaccactgctatcacaaagacccgagtaaaaaaaaaatctcatctcatcaaacagaagcagtgctgtagctgtcactggcaaaccaagagactgaaagctttcacaaaatgcaaacaaattttctgcatcgatcgtcataactctgtatctccgaccactgtcatgagcttgagcccactgatattgaggaaattggtctaaccatttccgcgcttctgagttcttcttttcgatctcattcatataggaatcaaattcttccttctcacttgtggatccagcctcatacacaaggttcttcaggtagtcgtcttgaaaaacatagtgaaattgggtgcatatatcatccagacagaacatgtgataagcccagggttcttgccactgagatcctggttcgttaataacatcaagtatatcagggtggggtctggagatgaggcaaatgtctttcctttgtgttaccttctccctgattccactgagaaaccaacgccaggtatctgaggatacttctgtggtaaacgcaaatgcaagtgggaaatagcaatcgtcagcttcgactcctgaggcaatcatcaatttcatagggtacttacccttcaagtctttggtgtccactacgatcagaggtctacagtgttgaaacccttcaatggactgtggaaacgcccaaaacacactacgaaaggaagcaaattcaggatttggaaaaagcttgtattgccagtccacaactagcccattagatgagtgaaacgcagccattagattgggtaatactctaaaactctgatcccaatctccaaagacttttttgatcacttcttgttttgctgcttgcatctctgaagttgcaagcatgtcgccaaaattttcaaaccaccaatttctcaactcttcaattgttagtgtgggctgtaccctgatcagacattcaatctcatctgctgcgaattccacgtcataattatctggccctataggacaacaagtatgtggagtattacacttggttatctcaacaagtccgtgctcttcaattctagctgcctgaagcgaccacttgcatttccatctgatgcattcaaacgtatacttgtccttctcggtctctcttactacacacttttgccgccctctaatagagcaccagtccaccgtcttcttcagctcatccctgtctttaaaacacaaccctacacgcaattcatgatcatcaacccacaaactggacagaggccatgatttgaagtacttgactcggcgttattcgctgtcaaagtaacaacctgttccaccccatccgaacccgagtttttatttgtcatttctctatctacatatccatgagtgctaccatttcccaatgcagcatctgcctcgtcttcaatccacccgttactgttatccactccctgaacctttaaaccattaaccctctctaatttaacagatgaatgtgtcacataaccagttgcttcttgggtcctctgtcttttcaaggaactaccaagattttctaatggcgatgaacaagcagcaggatcaataactccttcagatgtcgatttcacttccaaatacaactccacaagtttaatagaaggataattgcttggaacctcaagcatagtctccaaactagagtcgtttaccaccggaaaatgtaaatacgtaaacagatccggtgaaagaactgcagggtacctaccaaagattgaaatctttgatctttgcttagctaatccaaaaattggataaagcccattcaacagtgtgttaaactcagtattgcgcttaactctgatctttttaggactagatccttcatagtatacgccatcagaaccatacttaatacaagcattcgtataacacagcaacataacatgttctctcaaggtttccatcgccatgagcacaacagtcctgaagtaaaatcaaagaaaaatgtaaactttttgggcctgaactcataacatacaaaacactagaaaactccatatctaaaaacaaaggctaaagatttttagggacagaagcagataaacccatttaggaaacataaaccctgaacagtgatactcaaactaagactagtaaagttccaagtacctgaaaaagaagggagatttaccagctgggtgtcgatatcaagctcggatttttcagaaatggaagtaatttcactgtcctctcaagaatttctccggtgatgtgaagacagctgcaagaacatcatatgacaagggaaactcacaaatattgcatttcgaaatttactacagttctaaaaatgaaaagaagaaaaagtacagaaataatgtacaattgggccgaaataaaaaagcccattaatgtttgggcaaaataacaagcaaatatttaaatcctattcccgcctaaattttcatgtcccaatgatttgatacttcttcttttcttaaaaatgaaataaaaatcaatagagatacatgaaaattagaaaactggtaagtacgatttattatacgtttttagaggttgattttatccacattaagcctcctcgcagatacaaactttgttgaatattagctgacaagatatgaggattagacggaaagagatcgtaaagaagaagaagaagaagacagtgggtttaagtttccgatcccgtttagcttggttttcatatcgcttcaggggatcactcaaagttgcagcactacaatatataatcaggactagtacataatacataatcactaattagttgacataacccaccaaattgcccgattaattttcacatacaaaagcagtaacatatcatgtctccgttcttcctaaatgtcaaaagatactacataactaacataaccactaatcagttaacataatccaccaaaatgccggccttgctttcaggtcttcttcttattactgcgaggagttgttttggctttggacttacctgctacattggttgggggcggtggcggtggcagaggaatgaccgggggaaacaatctcggaactccagaagcttccggccaagctgataactccggaacaggagaaaatgtggcagtgtaagttttgtataaccgttcaagagtgtaacagtcgtctacatactccaaaggattgattttcagcaacttgcagacagctagagcgtgtagacatgggaacttgcaactttgaaactccccacacgtgcagctgcagtcgctcagctgaacagtccattcatcattttcttgaggcgcggtgacctgaaacgcattattgtctaacggcattacatcataagtaactgaatctttccttgactctgcaagcttttccgtgactggttcagtgtacacattgccgcatttacgagaaccacggctaaaacaaaaaaactcatcaaacgagtgtctcagctcatcaaacagacgcagcacataacctgtcaatacatgattatccaaatgagagacattaaaatcttcaaacagagttgttgtctctatctccatgattccatatctccgcccattgtcatgagccagagcccactgattttgagggaattggtctaaccatttccgagcttctgagttcttcttttcaatgtccttcatgtaggaatcaaattcttccttctgactcgtggatccagcccgcttcacaagatcctccagatagtagtctcgaaaaatgccactgaattgagagagcagatgacgcagacagaatctgttataagcccagggttcttgccactgagatccggattcgttaataacagcaagtaagtcggggtcgggactggaaatgaggcaaaggcccttcctttgtgttaccctctctctgattccagagagaaaccaacgccaactatcagtagaaagttctgtagtaaacgcaaaggcaagcagaaaaaaattgtctgctgcatcaaccgcagaggcgatcatcaacttccattggtacttacagttcaaatttttggtgtccactatgattagaggtctacagtgatggaacccttcgatagactgtgaaaatgcccaaaacacaccacggaaggatgcaaatttaggattaggaaaaagatcatacttccagtccacgaggagtccattagatgaatgaatggcagccattaacttgggcaaatcttcaaaactctgatcgcaatctccaaagactcttttgatagcttcattcttcgcgatacgcacgtccgaagtttgaagctcatagccaattttttctatataccacttcttcagctctgtaaatgattgtgtgggatgtattctgatcacacgttcaaactcatctgcttcaaactccatataggaatcttgtggctcaatggcacaactacaagtatgtggacaagtatacttaattatctcgataagtccgtgcttttccattctagcggcctcaagcgtccacttgcatttccatctggcgcactcaaacatatactcatccttctcagcctctcgcattacgcaacttcgctgccctctaaaggaacaccagtccactgccttcttcagcccatcaatatctttgaagcacaatcctacccgcaagtcatgatcatcaagccacaaactagaaagacacggtttggaaacaccagaactggaatcttgattcaaatccttgagggagatattgttatcctgtgtcaaattaaccacttgcgccactgcatctgaacttggatttttatctgtcatgtcaccatctctaccgtttccaatgtcgacatcttcttcatcttcaatccacccgttactgttgcccttctctaacttaacaggtatatccatcctctgtcttttcaaggaactaccgggatttgccaacaacggcgaacgagcagcagacacaacaaccccatcagatttcacttccaaatacagttctacatttttaatagaaggatgtttgcttgggacttcaagcattgtctccaaactagagtcgttcaccacaggcaaaagtagaaaatgaagcattgattgcggttgaacagctgaaggaaacctaccgaaaattctaacctttgatctccgatcatttacatctaatccagtaagaagatacagctgatccaacaatatgcttaactcagtctttctcttaactttgatcattctaggagttgatctgtcatataccccattgctaccatactcaatgcgaccgttccagtaacacaacaccggaacctccatttcagccatgagcacaccaaacctgcaaggaatccaaagtaaaaatgtaaactttattgctaaatccttgttatgcacaacccaagaagaaacagcagccacctcctatcactaaaacaacaacatgaaaggcctaagtccctaaaatgtatggaatggtacatcaaattctacaaacaaacaaaaaactaaatacaaagcaaaataaaaaattcaggggataaaaccctaacatgcaaaccctaaaaattataaagaaccccgaaagatgaaaaatcaattttgatctctaaaacaacaacaacaaggcaccggagctgataaatccagcaaaaaattgttttaaaaaaccctagaaaacaaaacacaacagtatagtcgtctaagttatagatgtttacatacctgagaaggtaaaggagtattaggaagtttggattttcagaaatggaagtaatttgagttgcattaaggaatttcccggcgatgtcgtcacgactgaggaagacaactacactctcactctcgcacagctttgcagaataagaaataaagagttcggaaacatcaaagtgttgggtcgaaaatagaaagcccactaataaaattgcctgacttttgactacgagagagatgatctaacgggagatccaacggttatcaacgagacaagtcactctggggatgaaaattaagagagtcaacattgttctttttttttttttttggtaaaaagtaaaaacattgttctttttatcccacatttttatcatattattacgtttatgaatgttagcatggacaatccaaacttttgtatctataagagttcatgatttaatatgaaatcattgattcttacaagcaaggaatatgggaaaggtggagaaaatttccctaaattgtaaactatctataatagggttaatataaaaaaagagtcaaagactcaacgtatctttggtgtggtgtctcgaagtactggggggttgcttgttcgcatcgcattgttgttatttccacattttaggttatgaataccacaagacttgagacgagagctgaggacattggtcttgatcttactggttttagttacatcacaaagacatggttgttgctctttcaaaaatttacaacattcggtcgatatctttaatccactattaacaacgtccaagcaagtctgaatcctactttcttcacatgattctctgtccctcttggatctacttccgcctgcaccgatagcttttgttggaagcggtaatgatgccaagagaatgacgaatgtaataagcaacaatccgacggtcttcatgcatgtatatatagttgtttcttttagatatacctatagcaaatattttggattccttttgttttctgtgcaaaacatgagaatttgtttaggtatttcttggataatgaaggattccaattgcatggtattgcgtaatgaacgcgtttttccttgttaatcaacatgaacgtaattagttgctatgtaaataactaaatatagcctaaatgattggctaaatcactacatgaattattttcagtatttagaatatttcattggttaataataatacaccatgatttacagattttacattcaaatcatcataaattaaatgaaaattcagattgaatgaaaagttggatgatctagctaaccaataaatctacagtttattgtttcgtaataatatgccttttgatttcgctttccatttcataatgaggtaacttaattcaatggtagataaagtgtacctttattctttgatttgaggtatttttaaattaatgcacatatggaatcattgatcccttacaagcaagggaaatgataaaggtggagaaaattttctgtagggtaaatttatcactttgcatttcatacaagggtaaatttcgaattaatatgttaatcaacatcttcaaaatcatgcaatttttattttatttttctgcaaaaatggttttatttcaatattttctcaaacacggaattttgaaaatttggtagcaaatgtcaaatgttcccatttaatcatcgtcatactttgttaggtaaaagctcaaagtttccagctttacataaataatttttcttataattttttggaaaaagcatagaaacaaagatagggaacatatggataataaagaggtgaagtaatgtttttgtttgagattaaagaggtttcaaacaaagagatgataaaacataggaatctaacttatttcatggaagatccctatgtgaagaagtcctctctctttctctctctctctctattaaaaccgagtctgtgagggatcaaaggacacaaactttcatcccattgcatatttctgagtccagcttctcgcagtagactcatactttgctctatcggttttgtacatgtgagcaatctctggaaccaatggatcatctgggtttgggtccgttaacaatgaacatatcgaaagcaaaacctataaattcacaagagatttgattaaaataagaggagattcattatatatcatccactgctattggttaaagagtgctttttcaccttcgatatggtgagtgcaggactccattgttctttcaaaatgtcaaggcaaatgcttccattgctgttgacattagggtggaacacttttgtcctgaatgcaacctgcaagaaaaagagcattttgaattccagttcatgatttcagtttggtaacaatgaataatttacctttggtggtttgaaaggataatccggagggaagtgaatggttacgagaaagacaccgcctgaataaggactatcagatggacccattattgtagcttgccaatgaaacatgtcttcagcaactgggccttgaagatttcacaattgttcatagaaggaaaaaatagaaagattagtcttttaaacatgatgatctatggcatttactgaaatacacacaacaaaacatgtgccatagcaatgtcctgagacttctctagcagaagaatgcatgaacagtttgagaatctccgacaacaatcctctaactctattaagaccaacaatttcgacgcattatccacttatcatatattttaataaacaaaacaaacatgtataaacctgaatgcaatagataactaagaaagactatcagtgcgaggtatcaagtctgtaagatccgttatggatacttggataaacaaggcagcatacaacaccaaaagcttaattctaagaaaattcacaactttcaatagctatttcctagactatgatcataagataactgcaacgaccaatctcaactttgttctaagaaaaatctcaacttccaactgttatcttattaattatgatcaatagtatccaggatgggtaaatggatcccaatttttaacagctatcttctagactatgattattagaaagctgtaattttcaatcaaggatcagtacagccataaatttgttctgttctaagaaaaatctcaactttcaattggtatcttctaaactaagatcataacttagcggcaattaccacctcaagatctctagataacttcgttataaaattacgaagactaaaaaagatttcatttttttgtttgcttaaagataagattataagatctaacaacaaagctcaaaaatagatcagacacgatttacgagaggagaggtaaagactaaccagcactgcaggaagttggaggatccttctggagatccttgagctctttcaagatccttttcgaagccatttctcaaccaaaaaaaaactcctagatccaaaaaaccaaaccctagatagattcagcaacgcaacaaacaaaggaaaagcaaaggttgaaaatttccgataaaggattgagcttttttacctcaagacagatcctccaaactcggttttgacgattcacttcctgcagatgatttttgagaaagagacagagagagcctttgagacctaacgaataaacaaagagagagaaattttatttatgtatgcttcaaatataaataatgacagctattttccagcgagccagagaatcattattggataaacatacttttaataaaaaataaaggaccctctgagttagacagagtgtttcatagaggctttaaaaaggtgcttaaaccctttagggtttttgtcttccagctaaatcgactctgacacagagataagcagagagagagagagagagttctgagatcagaatcaatggcggctaaaagtacgttgaagatcaaaggcaaagcaaaaccatcaaagggatcatcatcatcttcgtcctcctctgcatcatcaaagtacaaggtcttcaaggattggaccaactggtcattacagaaagccaaagtcgcgactcactatggtttcatccctctgatcatcatcatcggcatgaactcagatcctaaacctcatctttttcacctcctctctcccgtttaatccacaaattggatcttcttcgtaatgttcttcttagatgcttttactttttttcccaaatttgttctgttttcttcgttttatgaaatggatttatatttgtttctgattctataattcaaagtctcattcttttttgcatgattcaaattcaataaaatcaaatgatctatgaagaaacaaagaatttgctttaatggttactactactagtttgtgttgtctcactctgcatcaactgatcgaatatcttcaatcaatttcaaaacttgagctatatgaggtctttcttgttgcttcagagcaacacaagccaatcctatttgcaacatctcaaccatctcctcctcgaaaccacctgattgactcaatatctccatatcaaacacttctccagtccactctttagccaccacagatcttatccagctagctaagtccatgttctcacctcctgttggtactaattctgcttgactcactggtgatttccctgtcaagagctccagtaataccacaccgaagctgtatacatccgaaaactgtgtgcttcttcttgtgtctgttatttcaggtgcatggtagccagaagtaaggcaagtggtttgaggaagtgatctcatgattgtcgtcaagccaacatcgcctatgcagccatagcattgtgagtctaagaagatgtttgaggatttgatgtttccatgtatgaacttcccttcgtggattttagctagccctctcgctgcaccggttgctattcgcagtctagcatcccaatctaacggtactcgatgataccttcctctgtttcctgcaaagaaaatggaaccttgtagtttcgatttatcatcagaatgagagcaatgaaaataactaaccgtgcagtatttcgaagaggcttccatgattgtaatagctataaaccgcgagcttatcgtctttggagtagtagtaagcctttagctcagctacattttcatgtctgatcataccaatgatctccatttgttgctcaaactctcgtcttccaacgacaacttccttcaatcgttttacaacgaccgtgctcatgtcctccattgttaccttataggttgtaccaaaagcacccttccccaaaacttctgcagatgagcttagcaaatcatctaaatcaaataagtggtttcttccaccaaagaagatgatcttcccgccttcttcagtgttatcatctctagatgtccagtttcctggaggagaagacgagtctctctttcgcaacttcccggagattctagtcttcccgaaacaagtgatcattatgaatgataatccggaaacacacaaaacgcaagctgcagacagaatcagcaagaaagcaagttggcttaacccgaaaggagtcttgcgttgtttcttcctctcggtaaggttgttgccagaaaaagctgaactttggaatctttgaagagactttggtattgtaccgatgagcttgttgttggacaagttgatctgactcagttttggaagatgaagatttggaatttcccctgagaatgaattgtttgcaagattcaagacttgaaggctagtcaatcctgaaagagaggttgggatgcttccgttgaatccattgttagacagatcaagaaccttaagattcttcaactccgagaagatagctagtagtggacctgagaggtggttatgttgtaggtagagatgagtcaagctcttgagatttgtgaaatcagaagggaagtctccggtgaaatggttctttctaaggcttagaaacttgagagaagagagacgactgatggtgaaaggaggaatcaaaccgttgaatccaaccgcaggcaatctaacggatacaattcgatctccgttttcgttgcaggtaacaccggtccagctatgacaaacgtctgagctctggttccaatggagacgagaagaattgaaactagacaagaaatgaagcaaagctttcttgtcgtcttcaagagtctgagaggaaatcagaacaaaacagagaatcaaagagaagaagaacaagaagatttgcattgtgaagaaactagtttttgtctctaactgtaaaacagagaaattttctttagcagaagaatttgtttctgattaaaaaaatagataaaagagtgattagaaagatacgccggcaggttttagccggcaaaaaagtcttctcttatataagctgagaaaactaaaaaaaccttggagccattaaaaccattgagaccgtttctctgagttttgatcgttgggtgtatttaattcttgcttcaagaaaattcataccaaacggctaatttctcttaactctattcctaaagcctgtaacgtaagcgcggtaaaattcagaggcttggcatacaattatcaacaaacaaaaagagctgaaatgttctcttttttttttttttttttttttttttttgatcaccaagagctgaaatgttctgttttgtggtattttaagataatgtcttcttcatttgtgcctaccaaaaaacaaaaagtcttcttcatttgtatcatatatgcgtacgtttgttaatcaatgtattatttaatagaaacatgattgtcttaagtaattttagaaattcattttattttgtatcattgtttgtctctcagattcatgtaattggttaggactttttttttctttgattgttggctaacaaatggatagagctttagagttctccaaagtctaaaattgattcaaaaaaaaagctcagaaagaagatactatatgaataacagaattacatgccctaaatgatttaatgtaacataaaacattatacattattcaaaaaatgtatgataaatataaactcttttttgggtataaaatcaataaataatatttatattggcataaaacgagaaacacgtgtgatgggatggttctagtacccaatcaaattggataaaaacaaagaaatatgatttggctgggtctactataataactgctgcttggtgaccaaaataagacgaaacggcttcttcatcaaatcattcatcctcatcctcagactttggttcttgtttctcgaagatgaacgacgccgatgcttccatccagatccagcagatggttaggtttatccgccaggaagccgaagaaaaggctaacgagatctccatctcctctgaagaagtaagtccatacattacatccactctcttttgatctcgatctttacgaatacgtgactctgttgacaattgcgtgactattttggtttgttcttttgaaaatatgttgactgttgttttacattgatcttcggatcttaagatcctctgtgagattatttctgaacatgaaaaaatggttttgagtctaaaaccgattggtcttttgatgtgacaggaattcaacattgagaaattgcagcttgttgaagcagagaagaagaagattagacaagagtatgagaagaaggagaaacaggtcgatgtcagaaagaagatgtgagagctcttttcacttctctatgtctctcttatctgtttgattttgttcttgagatctgttcctctttggctcattaattcctagtttaatggcattgagcgtttagatgctagttttgagctgactcatatcgttctttagatcttgttgatttaggccacttgttaattgtgagtttgctctgtttcttatgttttgtaaaaagtgattactcaatgcaactgaacgcatcgaggatcaaagttctacaagcgcaagatgacattgtcaatgcaatgaaagaagaggcagctaagcaactcttgaaagttagccaacatggctttttcaatcatcatcaccatcagtataagcatctcttgaaagatctcattgttcaggttctgtcttaagcacaactagctccctcgtttgtttctttgaaatgtgttctttatattgggattttttgggtatgtgttgtagtgtttgcttagattgaaagagcctgcagtgttactccgttgtcgtgaagaagatcttgacattgttgagtctatgctggatgatgctagtgaagaatattgcaagaaagcaaaggttcatgctcctgagattattgtagacaaggacattttccttcctcctgctccttcagatgatgatcctcatgctctttcctggtaaaatttcatcaaaccaaaatactaaaagctatataagaatcaaaaactctaataccaatatggcacttgtggatatataacagtgcaggaggagtggttttggcttctcgtgatgggaaaatcgtgtgtgaaaacacgcttgatgcgaggttggaggttgccttccgcaataaacttccagaggttaaattaaaatccccatttgctctcttaaatttgtagtaccatgttcctaagcttataccttcttattggtttcaaaactcttgaaacctcatttgtcttgtcctaagtatttttagttttgttctaaaggatcttttcttgaaatgtgtgtagatccgaaagtcgctcttcggcaaggttggtgcagcttgatgagtgactccaactttataaccaaggaaagtttgtggctccatttatccatttctttctattgtcaccattttttctaaattatgtgtaatttgttgatgggcattggtcttttgttgttaattgatataaatatttgtttggtttggtggtgtattgataatgataagagtaagttgctcatcatcttgtcaactttttatcctaactttgtcacactttttgttacctaagatttagaacttctccttcgtgacacatggttgattacaagaaagaaagcgtcacaggatggtcaaagtctcatccttcttcgtcaaattcacatacttttttttagatatacatagccatatttatttttagctgtatatgcctaattgcctatttatttagatgggttcaaagtctcctccttcttggctaaattcacacactgttatagtgttatttgtttgaaggaacaaaaaagaacttcaataaagaaaatggcgtctaacaaaatctccttctcctttgttctttgcctatatatgtgctctctattgttcatcattacattacacatcaaatagacaatagttcatagaaatcattgtttctaattttcttggtttagtaaatgaaccccttaactttttttcttattaaaattatagagttaagagatgcaaaaagtatgaatccaacgggaagacgatgcccagatcctaacggtgtggagaagaaaagtatgtgttacagttcctgtaagacacaaggttttatgggtggttcttgtcaaggccacaagggtaattacatgtgcgagtgttatgaaggataaacaccatctcattgataaactctgtcttgtttaattgatccacttagtctcctatcatcatataagaaagatacttggttatccagtagaatggtgagatcgtagatggaaagttgtccgaccattcaacatcgtcaaaaggctaatgtatcaagttgatgtaaaataattgaaaaacttttatagagactaaaaagaagaggtagagagtccaagttcgacatggacactaccatattgatcgtattaaaaaatgttgttacaaccaaaatatatattagatatgaaacatcattagagattaataaatcaaacagcccactagttggatattaaaaaaattaaacgaatgttattgtatgaattttcgtaagtcatttgcatataacgacaagcaaatccttaagctatgattaaatttttatgttagagtgtgatttgtaaacatttttaatttaacaaaaacattagaatcatatttgaaacaaaaacggcaacgtttgttaacatggagttctagacgagacgacaccgttttgaaaaacatagagatcatcgttttcgtttgtcccttggctccatcgacgagtccgtcattttcacagtataaatatctccacccactctctctcatcactcccactacctcatttttctctctctacctaaccaatcctaagctcatctctctatctccaatggagtccgccgcactatcccgaatcggtctcgccggactcgccgtgatgggccaaaacctcgccttaaacatcgccgagaaaggtttcccaatctcagtctacaatcgaaccacttccaaagtcgacgaaaccctagatcgagccgccgtcgaaggaaacctcccagtctccggccaatactctccccgcgatttcgtcctctcgatccaacggcctagatctctcatcatcctcgtcaaagctggagctcccgttgaccaaacaatcgacgccttctccgaatacatggagccaggagattgcatcatcgacggtggaaacgaatggtatcagaacacagagcgacggatctccgaagctgagcaaaaaggattgctctatttaggtatgggagtctccggcggcgaagaaggagctcgtaacggtccttcgttaatgcctggtggatcatttcaagcttatgataacatcaaagatattttggagaaagtcgcagctcaagttgaagatggaccttgtgttacttacatcggagaaggtggatctggaaatttcgtgaagatggttcataatgggattgagtatggagatatgcaattgatctctgaagcttatgatgtgttgaagaacgttggtggattaagcaacgaggagcttgctgagattttcactgagtggaattcaggtgagcttgagagtttcttggttgagataacttctgatatatttagggttaaggatgagtttggtgatggagagttagttgataagattttggataagactggtatgaaaggtactgggaaatggacggtgcagcaagcggcggagctgtctgttgcagctccgacgattgctgcttcgttggattgtaggtatttgagtgggttgaaagatgagagggagaatgcagcgaaagtgttgagggaagctggattgaaagaagagattggttctgcgtcgagtggaatcgataagaagagattggttgatgatgttaggcaagctttgtatgcttccaagatttgtagttatgctcaagggatgaatttgcttagagctaagagtttagagaagagttggaacttgaattttggtgaattggctaggatttggaaaggtggttgtattataagagcggttttcttggataggatcaagaaagcttaccagaggaacccggacttggctagtcttgtggttgatcctgagtttgctaaagagatggttcagagacaagctgcttggagaagagttgttggtttggctgtttctgctgggattagcacgcctggaatgtgtgctagtcttgcgtatttcgatacttatagacgtgctagattgccggcgaatctggttcaggcgcagagagatctctttggagctcacacttatgagagaaccgatcgtcctggtgcgtaccatactgaatggactaagcttgccaggaagaaccattgaaaaatccctttctgtttttgtaaaagccctatttgtcttgcttatttttgagcaattggaaatgggatttcaaaccacattgtttaacacgagtattttgttcagatttcagaataagaaatgcagcagcaccttgatttttgtttttgtttctgaacatctttgcttttaaatttgtaaaacatatctcccctgtctttaatagatcgaatgtctagacgattagttgaacaatcaattaacgacttttctgcgccggatatattagatttacatttgtcttagagctaagtccttaccaaacatccgattagcaaaattttgaaacattattcaaccaaaatcggatcgaaaaaaacaaaatcaaatccacataatccgaactgaatagaaaactcatgaaggttcatagagtccgagcacatgaccatcaagacatctcacagaagcaacctggttatcaagaaaaagaaagatttgaattcttatcaaaagaaatgttagacaatgagattaaagcatttgcaggaagtggttgcgtttttaccttgccatggacttcatatttgatagagccatcgagttcagctcctaattccataagtttagagattgttgtattaatgtctgctacagtgaacgatagtaacgaagagtatcctttctcactcatcacatgctcgctgcatcaaaaacaatgatggctctataatttaacacagattctctataagttccacattttcaatcagacaggacagtgaactgaagacaaccaagtaaaaaacaactctccaggggaaaataaagtttcattgaggcaaatgatcgaacaggttataggcattgagtcaatacctgggagcttgcataagagctagcttgaggggacctgactgaagttcagcccaacgtaaggtaacgacattgacggagaaatcgagacctttctcatagaatcgagccgcttttggtacgtctctgtggagctgcaagatccacctaaacgacgccgttgccatctcgctctcttcacagacgaagacaaacgataacttgataatacaaataggccccagaaccaataaaaaccctcaaaacgtcgccgtttctgctctttatagtctaccaattcacagattcacaactcttttttcttgtctgaaacaaaaatcaagaatacaaaattcacagatgatcaaatcaatataaaacagatatacattatacactagttacaatataagctctacagatgaacatatacacaaatggaacaatctcagcttgttccatcttcgagtccgaccatttccgccaaaaatggctcttacgatacagattacatcagaaactcaatccttgaatagcctaacccgtggccttgaactcgttgttctcgcttcgcttagtttagtcttcaaagtgttatcctttactcctcgtggcgcaccaagatcaggtgttacggttcgtgtattccattgacgaatcgggctctctcgtctccttgatgggtaactgcaagaagcttcatcgatctcccgagtttccgacgataacctccgatgagttctgatcatttctccaaccacattgttcgtttctttaccacacttctcagtttcaggctccatttcattggctctagttttctttttctcattagaagacatcgcccacgccatttgatcctcgaacttcacttgtaaactcgacgggctttgactccgtctttgtggtctttcactaacaccaacttttattagttccggtttttcagtttcatcgccacgtggtggctttgcaacatcactcccatgtttcttgagctcaaaacaattcgaaccgcttccgccagaatcttcctcctcctcacggtctacttcccaaatcggggcgctcatggcgttaaatggaaccgactcaagtgaagtacggcgatttctcgctatttcattagagtctgcgttctgattagtcttaagaaatgtttctatctcaaactcgagcttctccaaagccgatccgttgccactctgaatcctttcatcaagccatgattccgcaatacaaagaatcatatgatcttgttcatcccaacctttccagttcttatccaacttctgctttaaaccatgaatctccctttcgtaactcttgatcccttttgcaaactcatcacataatctctccagaattttctttgactcagtccctctctccatctccttaacgcagttagacaacgttgacttcacttccgagagctcttgtgccaatttcctatacagactctcagaacgtttccttagtttccgctcatcttctagcgattgaacagcagagcttaaccgatcgtgttccttcgtacctttcgacagcttttcttccgcgagttgcttcacaaaatcatccatatcgcgtttatcggcttgcttgcatctaagaaggtctttgatccgggcacgtgagtgagcaagctcggttttcaaagattttattaaggagatattagcggaatgctgctcctcgaggatccagattcggttcagcactttaagaagttcggttgatgtcttgatattgttgttaggctcaccagctcgtcttcttccacggaactccaatgagctatcgtagcttgtaggagataccggctgcaaagcatggtcatttctttcagttaaatgatgatgcttcatcagcatttgcccgatctgtctccttatacttcccgcactctctggctgggacacaagaaccatagcagaattgttaagatagaagaaccaaaaccaaacaaacagaattttctactaaacaactgcattgatcaaaatgaaaagccggagcaaaaggtctcttcaagctcagtgatgcgagagtaaactaatgagagaaacaagtaattgcagttgaactaacgatcacatttttaaatagaatcctccgttaccaaacttgacctcatcgtaaaagagaatcctctgcaggactaagaaaccaaaatctagtaacttagaaccaaacacaaatgagctcagaatcaatggcaatagtattgccttcagcttgcgaggttcgtgtctggcgaatcggattaagggctttggtgtgggtgatttgagcgaaaaaaatcagctaaataaacaaaagttaactctctccaaccaatgacttgcaaaattcttaacaaagaacagagcaattgggtaaacctagaacacttatcaccaatatgagaatccaaatttggccaaaaccctgaaccagaaacagaaacaaaacaatctagggctaagacattcagaaattcatcacaacccatgtcacaaaattcaaactttaaaaggcaaaacgatacattgtcacaagatattcaaacttgagcaatgcccaatcctaaaaccaatcagcttcatgggataatcaaacgaaaaaaaacaaaattaaatcaaggcaaaattaccagaaaagggtaaaaatccaatctctagaaagagaaggatagagagagacctggtgatcagtgagctcaataccattattgtctgcaaccgccgcctttccatggccgtgacggagacgacggctgttactaggaccagcagaacctaagggagctctgtgcattttagtagcagcaggaggatgaatcaggtggtcgttgtcgtaatactgataaaattcccagagagaagcagcaagctttctagaggaggcagaagaagggttcttattagggttgaagctaatatgcacaggagtggaaggtcggcgaaagacacttctatggcctacaaaaacagctcttctccttaacttttctataaatctcttccctttttgcccttctcctccatcatcttcctcttcttcttcttcttcttcttctttacttttcatttctttagagagcggctaactaaaccaaaagttcgactttttctttgttgcttttattaagaagaaaccttttttctctgttcataatcatggagatggaactgttgtctctctcgtttcatttattcagttttgatcattgagtgtttccttttcttcttcttcgttgagtggccgcaaaattgagaaattgttacaatcatctgagtttttactgatgcgtcaataaaaatttgttattttatgaagaagaatatgcggtgtcatagtctgtgtccagtgagtaaaactataagcattacacgtaggtacgttgtttgggatgatgctgtgtgatcttcccacaagtaaaacttttattcttagcttctgtgtttacatttttaacaacattttttatcttctccagtagtccctaaacgaattaatattctttcttgcaaacaatattttatttttaacgttttcactaaattgtatctaatgtttacaattacatagcctacgtggttacattctcggctaataacacaatgttcctttccaaatgatatataatgtatgttacagttccagtggcaaaaaaaaactagaaactctccaaaacggtgagagcagagcatgagggtagagcatggttcatgtacataggattctagcttatttggggcctaagcataaatggtggactggatcagacttatgatgggcttgtggtgtaaacctaatataattcagaatcaaaccctcagggccaaatggagagcagattcggtcacaagtgtttggggccttaactaaatattggctcattcaaatgattactggaaatagaaaaattacagtacctatgtttgaatttggggaaattaggctaatttaaaggagttttacttgacaggattaaaagagtttagcttttaccgttatacacaagtaaaagagttttggtctactgatcgaccatggtgcattgcattctataaaagtaatattttatatgtttcatttttttttctgtcaatgacacattaattaaaatatcaattctctgataatctaatttaaaagacaaaaaaattacaaataaaatttcagaaaataaacttttaggacaacggagtagacaatatgttttagcattacaagaataaagaatacaaaagaatgaggctccatctcttttgtataaaagcatcattagcggcaactaatttaaccaacaaaaaatatatggtaaaataaagttggtaaaaaatattaaatatatttagttttcttagaccaaaaaataatcatgtggtctggagaaaccatgttagaattcgaattggggtgatcaattatactacttgaacctagttggcagagatttttgtctcttttaccaccgtaccatatcgacttggtcaatatatttagaattttgacattaaaaattaaaaatatcttttaaattttagattttctacgaggttgtttgaaataatatgtagaaaattgtttttcttatggaatttaaaaagctatattagagtaaccgacaagtaacaccttgactttgtagattatatataatgagacgaccattttcatccacaactaaattttcttttcttgtttttgtttgttttacatttcttagacgtgggacctaattacaaaatactccaataatttaggttgaaaattgggaatgggcaataatacttgatagtgtattatattgtctcctacccgttttttaagaacattaatatgtattcacccttagcggaaattggtgtggctttgatcgaggttgaactttgattctagtgacaataagaaaaagaaatggctactagatatattttaatttctttgtttataaaaaacattgttttttaacatgttttacgcaaattatgtaaatttctattataataaaaatatgatacgataattttgtagaacaaaaataaaaatttaaaatgatattttttgtgaaacggaaaaaatagatacccttaaattattaaaataaaatattctttcttttaccaaacttactaaaactaaatctcattctcattaattaagactcatatctaagaaaaatgtacatggtgtggtttatatacaaactcatgtgtggactaaaccaaaaaccttaaccaaaaacaaaaataaaatcttctaaactggtttatacttgtaccattgtacaattgacaaatgaacctaagcattatacaggacggatacatcaataacatatttgacgagaccaagtcagtctagtcgtctcaacaataatagtaaaactcatttttttgtccccaaataataaaatatctacttaacttaagttgtggagagttttgtaaaacaaattggttttcgctgtcccaataagaaaacatttctccaaaacattgtataaattgaacttcgaagttctgcaaaacactaaacgacgtcacaacgtaaaatacaaaattaaaatagaaaaatgttattgtcaataatacacatacatacacagagaaatgattttagaaaatacacaagtttcagcttagaaaaatcgacgtgaaaaatgattaaaagacagtttgcaatcagagtaattgataaacaaatattttaaaacaacaatcaaagatatgaaccaatcaggatctaagacatgatatgttctagcaacggaccttctgtgtcaagctcatctatgtggccttcaaaaccagcatatacgagaacagctaacactatcaacaattgaagtcgaactttaaagtgaagaaacaggaaaaaaatccggacaatatcaaactttttcctctaaaaaatattagtttggattgcgcgacatgaaaactttctgattatagaatatgaaagtataacgatgacgttttgtttttgacaaaatacgatgacatctaatttatttatcttttatcaacacacacaacataaagcatagtccacaagcaatctttttttacaatgtgatggaatctgcttgaatattgaagtaacgaaccagtgtccggtttaaccacaccaaaatttgaaatggcataaaccggtgacattgttagtccactttataaggttttgtcttggcctgctctatcagatttcattagtcagaaagtaaatcgaaaaatcttatcacctacttgatataccctacggacactattttcaaaccaagttgttggtttgagatcttatgtatatatatattacatacatacacatatatagaccacataagatactctagggaatcacaataagtcaataatgattatataagtcagacacaaagatatttacatttttgcagacaataatgggtactttggtcaacggtactattccggcgatgaagtgtcccaagaatgtggcgatgatgaagacaacgtctaacggagtgttcgatggagagagtccattagatttcgcttttcctcttgtcattcttcagatttgccttgtcgtcgccgtcactcgctctttggccttccttctccgtcccatgagacaaccacgtgttgtcgccgagatcattgtaagtcctccatcaaccggtttaggtcagtcttatagtttccggtttaataaatatcctaccagactgaaatatgagttataccgggattccgttcagcttattactgtatgtggtttcttggttagaaaaaataataactacaaacctaattcctctttagtcacacatgtcaggttcaattttaatcaattatctctttaattttcagacaattggttcagttttttttggacatgtttttttttttatttttcgtttcatcactaaacaatcatgaagccatcttactaatttggtttagaaattatgtagattcgtttataaatagttaatttgttctttagaaaacatccaataaaattggaaagatacaataatacaaataagattagcatggtggatactgattttaaaaaattatatttggttgtatttatttgtattggtataaaaacatttcacttatccagtttaattcaaaaactaaaccagacagaaattgatttaatttgtaccgggatttagggcgggattcttcttggcccgtcggctctcggtagaatcacgtcgtacaagaattcaattttcccggcgagaagtctaacggtgctcgacactctagcaaacctcggcctccttctcttccttttcctcgtcggactcgagatcgatctgacatctctccgacgtaccggcaaaaaagcgatttccatcgccgccgccggaatgcttctccccttcggtatgggcattgtcacctccttcgctttccctgaagcttcttcttctggcgacaatagcaaagtacttccgttcatcattttcatgggagtcgcgctctcgatcactgctttcggagttttggcgagaatactcgctgaattaaagctactcacaaccgatctcggccggatttcaatgaacgccgccgcaattaacgacgtcgcggcttgggttctcctagctctcgctgtatctctctccggcgataggaattctccgcttgttcctctctgggttctgttaagtggaatcgcgtttgtgatcgcgtgttttttaatcgtaccgcgaattttcaaattcatctctcggcgttgcccagaaggcgaacccataggcgaaatgtacgtttgcgtcgccctttgcgcggttctactcgcgggtttcgcgacagacgccattgggattcacgcgattttcggtgcgtttgtgatgggcgttttgtttcccaaaggacatttctcagacgcgattgtggagaagattgaagatcttgtaatgggtcttcttctaccactgtacttcgttatgagcggtttgaaaacggatataactacgattcaaggtgtgaaatcgtggggacgactcgcgttggtgattgttacggcttgttttggcaaaatcgttgggactgtgagtgttgccttgttatgcaaggtaaggctccgtgaatcggttgttcttggggttttaatgaacacaaagggtttagtggagctaattgttctcaacattggcaaagacagaaaggtactttcatctattctaaaacaatataattacaagctgaaatgattttaatcaaatagttaaggatttaattaggatttatgtaacgcaggttttgagcgatcagacttttgcaattatggttctcatggcgatattcacaacattcatcacaacgccaatagtcttggcgttatacaaaccaagcgagacaacacaaacacatagtagcgtcagctacaagaaccgcaaacatagacgcaagattgagaatgatgaagaaggcgagaagatgcagcagcttaaggttttggtatgtcttcaaagcagtaaagatattgatcccatgatgaaaataatggaagctactcgtggaagcaacgaaaccaaagaaagattttgcgtttacgttatgcatttaactcaactctccgagagaccttcttctattcgaatggttcaaaaggtgagaagcaacggtttgcccttttggaacaagaaaagagagaattctagtgccgttacggtcgcgttcgaggcgtctagtaagctaagtagcgtttcggtgcgttctgtgaccgcgatttcaccgttgtcaacaattcatgaggatatatgtagctctgctgatagtaaatgcacagcgtttgtgattttgccgttccataagcaatggagatctctggagaaagaatttgaaacggtgagatcggagtatcaggggattaacaaaagagttcttgagaattcaccgtgttctgttggaattttggttgatcgtggtctcggcgacaacaattctccggtagcttcgagcaacttttcactttccgtcaatgttctgttctttggcggttgcgatgatcgtgaagctttggtttacgggttacgaatggctgaacatccgggcgttaacttgaccgttgtggttatctctggtccggagagcgcaaggtttgataggcttgaagcgcaagaaacatcactatgttccttagacgagcaattccttgcagcaatcaagaaaagggccaatgcagctagatttgaagagaggacggtgaattcaacggaggaagtggttgagattatccgccaattttacgagtgcgatattttattggtgggaaaatcttccaaaggacctatggtttcaagattaccggttatgaagatagagtgtccagaactgggaccggtcggaaacttgatcgtgtcaaatgagatttctacttcagtgtctgttttggtggttcaacaatacaccgggaaaggtccttctgtggtgggttccgtctctgtcccggtggtggagacgccatgaaaatctggaaacagaggattgtgttttctttaccttgaagcacaaaccatgatggataacacgaaacactcttatgtatcaacatgcatgaatcaaacgactcccctttttatgaatttgtaagataaaacatatttatgaatttgagtcactgattatatcatatccttaaaacatatgatttgatggatagattattcaagttgttaagagttcaaaattttgaccaaagatatttatattttggtaagtcgatccttttttcaaaggaatacttcatatagtaattttagatactacaattatattgactagtggtgttgtagaaatattttttcctactcaatttactatcatcccatgcatgtgtccattataaagctagattgaaatttcagtagtaatcaaaatctgatattgtataacactgtgtttggtttgtcaaacaacacatgacataacaaatcatatactacataattatcaaaccacatatcgaacagaaaacataaaattccaatataagattgttacacaccttttaaacttattaaattatcaaaaagtttcaaaggactcagcctctttctctttctctctgtctctggaaccatttaatggtctcttttagtaacattcatagagtttgatatccatcttgaccctaaaatacttagcaccttcaaaggtatcggtctcaaacgtaacaatccctcgagacatgaaaaaatcacctgtccctccgacaacagacaaatctctactctgcaccatcatgagatctgctcccattatgttcaacgtccctttgtgttgagtcgagttgaacacaagtgtgtacgcgaaccatgcattgtagtcattcttcatgtcgtagaaatagaacccttgagctcttgccacaggttcggactgaaagtttttgtctatggtcataggatcgtcgaagataacgagtttcccgaatttgaaattcccgaggcccggtgggttggtaactgctgcagaagtcgcgttttgcacgtcgtcgacaccgaacattatgtcgtggtagtagaggacaaagtttttgcacggttttggttgcgatttggatggttttctagctgatatgacggtttttgttagaacaaggaaaacgaataagaagagaaacgatttcatttggcctaccatattgaaaatatgtgtgttttaaatgaaaatgtgagagtggataatgagagagtgagattgacaaagaaggagtgatgggtttatatacaacttgggttactagtccgtgttaatattaagtataaacaaagtggactagctcacttcttctctcttgtttcttgtttatatatttatttatattaggttggtgataagttttgttgatgtgtataaagtgagatcatttaccatgaatatctgaaagttttccatgtaggcggctcaatcacctttcaaaactttccacaaaatgttatagtagtggagaaatcgttaaaaataacacgaatgaagtactaaaacaaattagtatatataatacatatttgatttaagactacataagcttaaagcttgtacataccttaagctggagttgcacgaattcatcaataatatctaaaacagcacaaattcaaaagcagaagagatattaaatcggttaaatatgcaattcatggctttaaatcatatatattgaatcaatgaataatctacttgttcgtctaaatttaggacattaataatatatatatgtatagtctttcagaactactaatatatgtaatttggccttttaatgatgggttggtggagcactaataataaaaactaaagagcatgaggagtttttccaataacttataattttacatgaatttatgtcaaactgccactgaccattagcatgatgctaaaaagtatcgttatagattttattttattttattatatataaatcatatcatttttttctataactaaaagtagagtcatctattttattggtaaaagtcacgttgaaaattttaattttagtttgttaagtaccctatggctaatataatttgcataccaaacatgtttttttcttaatgataatctagtccatttgtaaaagtaaccgttttatcatcaatttttttttaattaagctaagctttcgccgacttaatagaacattggcattcggcagccaataaagcaaatcaagttgcagaatttcaaatgtgacataactattcacattttaaaaaataatatcgtgaaacaaaagaaaagcagaacaatagtaaacaaaaagacaaattgttgaatgttgacaaactgtgaagatgataacaaacgaaggaaaagaaaaatactaaaatagtttgtcctaaaaagccttatctgcgaaggcattttaacgaaaacgggcctattgttggcccaatatgatatataggctcgaaactcgtcacgtgtattcaacagttgcttgagtttttcccacacgtgcgctgttactacgtggacgcgcgcgaataactctagttttgtggatttttttcactatcttctcagaacaacacagagccaaaggttttttgctcgcagtaaagaagaatcacactgtgaagaagaagaagaagcgaaatacaaaatcctcaggaaagaaatgctaagtttgaatctctcggagtcgcttcgcattccattccagaaccctaggcctcccaaatccgatttttcttctacttcttcttctccttcctcatcgtcgaggagatgcgtctccgcttatccaattccgatcgggttttcggttcgtaatcaatacttttctaggtaaatttgataattgattgttcatcggcttttgaatttgctatgcgaatggaatgtagccatgtaggagtttacgtcttttcacaattctgtgcagatgtttgactcaattgcgtcgaaatgaatctcagcagctaggttttcgatgcttccaacgaaacgatgcggcttgttacctcgaggtgattctgatttttgttaccttccaccaatcttcttttggtagatttttgaatttttttagatgagattctgttaaggcctagaggagatttctgaattgcttgttctgtgtggatttacctaaaatggtaatgtaggtttattataatgatgattgattttaaggttgaacaatagtggagagaatgtgtttaaatgcataagctgaataagttgttgtgtttgctttgttcagaaagctgagtctgaagagcatgatagaaatcttgatgttctggttgagtcatcgatagctcactcaagaagagagattcagagagttcttatgttcttggcggtatcaggttcggttgcattactaggcactgatccagcttttgcagcttcgtcaattcccaatgtgacacagtcacttgtcacttcttttggagaccttggagatattagctcaggttttgcttcggttagagaatcttccttttgcacagaaccgggaactatctcttcttcaattccagtactcttaaattttattttttgctctgtctatgtctgtgtaggctttcttgcttatctttttctctgaacttggagacaagactttcttcattgcggtatgatcttgagatgttaatctacgctttagaaactctctttgtcatcaatgattctgttgattgtgataagttttcatgtttgttggttaggcccttttagcagcaaggaactctgctgctaccgtattcgtggggacttttggcgctctagggtatgctttctttctcaaacagaggcgttattatggtccgtgaatcttgtctgaaaccaaatgttactttgaaatctgtagagcaacgttataaaacttggtaattttgcaggataatgacgataatatctgtagtgcttggacgcactttccactatgtcgatgaagttcttccattcaggtttgagtattctggcaaaaattattaagcaggtttaagttccatgatgatgctgaacgtcaatgcttgagaacacaggtttggtggaaccgatttgcctatagatgatattgcagcagtttgtcttctggtaaatctctttattcacctttcttagcagagtcgtactaaccacgggtgcttggtttggacctttcttatgtctagcaagtatatcttcctaagtatatgatgtctaccaagtgaaaccaaatgtagctgtaacccttttgttatgagttttgttttggttttggttcagttttcgattcgaagggtcttaaaattgtcatgaagtttataagtttcaggctctattgggtttggatttttatgtagaaaaagttactggtctaacaatgaagatgttgattggttttcaagcctggtttatggttcattttgggttggatcatattgtacagagcatagtcttaaccatgaaacagtattaaccacttttgttacatttaggtgtacttcggtgtttcaacgttattagatgctgtttcagacgagggtaaagctgacgaagaacagaaagaagtaaaacctctttagcctttcgttcactctttgtatatttccatgcaaccttcaagaagtcaatatttatttacttattatctacaggcagaactagcggtttcagagctttcaggtaatggagccgggatagtagcagccgcgaacaccatcatcagcactttcgcattggtttttgttgcggaatggggtgacaaatccttcttctcaacaattggtgagactcaaaaagttcaaatttcatgataaatcaaaacctcaggtccaaaactccaaaagtgtatataatcttctaattctttgaagctcttgcggctgcatcatcaccattgggtgtcatcgctggagcgttggcgggtcacggtgctgcgactcttgtgagttctttatcttttgattgaaacttctatgtgaacactttaaagatcctagctatttgggctagtcaaaagtatctttaagtactattaagacttaaaaccccatcaaagaaaagattttttcaattctcctgaaacttggaagacacaagaactctaacttgcagcttggtttgttaatcgcagcttgcagtattgggcggttctttgctaggaaatttcttatcagagaaggtaactaattccgttctttatctatctctatatacatacacatagacagtatatacatgtttatactttatatagatcaaatcaattttagaaaatcattatttcacaaaagcacttgaagaatactcctttttcatttatagtgtcaggtttagatttttgttacatgtcttaacctgcatcctgaccaagtaaaaggttaagaagaataaaactttaatggttgcattaaaaaagtagaaaacaattaatgaaatatgaaacaaatccatgtccttagattatcatgaaaatttagggtgaatatactaaatgccagcatatcctaggatatattcagcttttattacacaaaaacgagatactaatggcaaattactagctttaatcatggttttaaaagttccaaaccacctttttgagttttgttttagttagtcaaaggatataatttttaatctcgtattgtgttctgagatttaacatgatagaaagaaaagtgagagattaaggtttttattctttgggcaagtggcaaaaacaagcttctatgttcattgatctcaagtcttccacatcacttggtatctattcctccccaaaaaagagtcaaaataacatcttttattgtttttattctttcctatgtccgatccaatctgtcaacaacgcgttattattcccaaactaatgaaactagccgcggaaataaaaattaaatcacaagtatatactataattttctttaggttttaaggttcatgatttatgttttatggtttaaggcttagattttagcttttatgacttgatagtaggcttacaatttaatttataaagatttaagaccattttttttattgttttgatctaaagtttagactatttaaaaaacaattttgggagagagagtgtgttctaaagacggaaatgtttacatgtcgtttggttcgaaacaggcaattgcttatgtcggaggagttctgtttctcgtgtttgctgctgtgacggtggctgagatcgttacgtaagtaccgaaaaatatattttttctataccttcttgtacaaacatattcaagtttaattttatttttgtaaaatattagtatattgtttattttcaactgtttttctgcaaattataatgtggattttacagttctcatacgttaacgtttactaccacatttggtttttagtggttagaatttacttagatgtcaagataggtaatatgttatgttttgaaagatgcgtccaaacataacacgtgttcgggactggaaagaatataaagactaaaaagaggttgaacatggtagagcatattcttttctatattcttcatgtacaaatgtgtatttaaatactataatcgtgcatgtgaattaaaattatatgaaaaagttataaatttatgagttccactcacaaaggccaaaggagttgttacaccgacatgagaaataggaagataataccatctcctttcttttatagtaaggtgtaaattgttttggtattttttttttaaatggttttagtttcaatattaagcaagggccaaggtgatttttcttttttaaaaaggattacagaagtaaagctatatattgtgcaaaataagcatgcactgatgcacctacataaatagtagtttggatatattgtaaaaataactttaaaaatcattggttttgaaaaggcatatttcaaagtttctgaagacacaaattttttaaaattaattgaccgaaatatcttgcttaataataccttttctacacaatgactacacctatataatattggagcatttttttgttcttgataaataatagtatatcacagtgacataaacttcagcagttatcttcaaaaatattaatttgttctacaatatacacctttaactcaatatttagtgatttgattttaaagttgggggaaatttcacctgcatgttgaattacgcaaagcgattatttacctgacatataaatggtatttaacgtacttttacgaaattgaatactactagtagttttgaagtaaatagaaatctaaaaaaggaattagagaatctaaataatacaattgacctagaaaaagtaaaaacaaaatctaacgaaattgctgcatttgcaaacgtgaaccactcttttatcgtacgtggaccctttttaggtttcctactaaggacagcgatagccaaaaaaaaaccaagaaacgacgtcggtttatatatttttgaaaaattaaaaacaaaaatcgcaaaaaattacgctgtcgtagatttgtagaagaccttcccgaggggaatcgtgcgggacccataaaagacgcatgtggggaccacagtcataatcacaaaaccaaattgaacggtgacgagccgctgctgcttcagccgccacgcaccaaattaccccttcgttttttctttgctgctgatgcttccaaccgccacaaacaatcttggcttcgtttaaaccatacgtatcctaattaaactcttaatattaatatcattatctgtactcaaatctgcataacagagtacaatgttattgataaaaaaataccattaatcaaacttaatataaatttatggtaggataaatttgattatcaggaagtggaggacatatcatgtttggcagtcaaatacttcattttatttttgattaaatttagctggtgcgtaaaaatgaatttatgtgttctctgtttaatgaattgattaatgtgtttgtagcttatacttatgatcaatagtcagtcaatacaaaaacataaaaaaaatattaaaagggtataagtggcacgtgcaaaagattctgatggcacgtgtggcaaaccagtcgtcttacccttggtttttttatcctcctcacctctcctttcagattcgatatcatttccactcccttcaaaaaaaaaagcctctctctctcctctcctatttatacctctctcgatctctctcgccggcgctgcaaatccctaggtttttcaatcacacccaaaacatttgtagagccccaagtactcaatttcgcttattgatagagagagagagagattgagaatcgcgatttgattttatcaatcgatgccgtgaaaatctcgtaatcagattcaaaattgaggtaaattcattcttcgtttttgtttttcttcagttgaatttgcatgtttgtttttgatgagaaattcagagaaatttgacttctttttaattcgagacaaaaaaaatatgtctctgagatcgatgtctgggaaattgaataattctgttattctcgttgctttctttccttgttctgtttcatttatttctgaaattttgtgtcggtttaatctagaaagactcaagtttttgatttgaagtactctggtttggtctcttttgttttgatttctctctcttttattctaagcttctcatggaatcatatcgatgaagctagtgaataatccatcatttgtggtgtatctctttgacaaaaaattcttcatttctcaatctgtttttttagatctcttgttttgtttcatgttgtggttgactaacgaataaaaaggttgtgctttttaatcttggtttatggtgtttgtcctaaactatgtgtgttctggagatgttaagtgttctgtagatttgaggtgttaaatgatctgtgttctgtagatttggtaacccaattgaatttttcactgctctattgcggtttactgccactcacttgtttattatctgttatatgaagcaggatggttagctgctaccgtaatccttgcgtgaagattgagaagaactaattttggtttgtgagcaactttcgaatcagctctgttagatttgatttgaacttttatttgaagatggatcggtgtgacacctcaggatttgtaagcggcggtggagatgcttataaggtcttctaactcttattagagctgtggctttattctcttaacccggaagttgttgttgtcctcttggcttcgcgtctttgcttttggtgttcttgacgaaagttttcatttttaagttgtgaccatgcattccagattccagaacattgcttttgctggtaattcctcttcgaattcttataagattttgggacgttcccttcaagttgaagtccctgaggccgcggatactactctgcgtcttgattcccttgcctctccgttgtctaatgccaagggaatcaaaaggaaatggaatttgattgatggagctgatcctttactctccttaagactcggtcactcttcaagctcttctgatagcaaagggagttcggcaactgcttgcacgagtttatcttctgccagagaaactgaggaggcgtcctccatggatattgagctcgactttagcctccatcttggcaacgagaaaccgacggctagcaacaaaaaaccagctaatttgaaaatgaaagggttgcaggtcccttccccgaaatttgatcttgaattgagtctttctggtggaggatcttgtcaatctgagatcactgcggtccagcagcacgccaaccgatttcaatctcttgcggacatgctgcgtgcaaataatgaagaatctgcaacgtgtggttggaggcaagggtttggattaccgacattgcaagcctcttcaagcaaggaaacaagctccttcttaggccatattcccaaaaatgtcatcattcctgctgctcatgttctggaactgtcatctaacacggcagcaacaacaccaataagctcgggtacatgtacttccggtttatctcagcagctgaagccacagcttaagaattcttctagttcaaagttatgtcaagtcgaaggatgtcataagggagcaagaggcgcatctggtcgttgcatttcccatggtggtggacgtagatgccagaaacatggttgccacaaaggtgccgaaggtcgaactgtgtactgtaaagcccatggaggtggtcgtcgatgtgagtttctcggatgcaccaaaagtgcagaaggccgtactgacttctgtatagcccatggaggtggtcgaaggtgcagccatgaagattgcacacgagctgctagaggaagatcaggactctgtatcaggcacggtggaggaaagagatgccaaagagagaactgcactaaaagcgctgaaggcctttcaggactctgtatctctcatggtggtggtcggcgatgtcaatctaatggatgcacaaaaggagcacaagggagtacaatgttctgcaaagcacacggtggtggaaaacggtgtacacactcaggttgcaccaaaggagcagaaggaagcacgccgttctgtaaaggacatggaggaggtaaaagatgtgcctttcaaggagatgatccttgctccaagagtgttcacggaggtaccaatttctgtgtggcacatggcggtggtaagagatgtgcggttcccgaatgcacaaagagtgctagaggaagaactgatttctgtgtcagacatggtggaggaaagagatgtcagtctgaaggctgtggcaaaagtgctcaaggtagtaccgacttttgcaaagcacatggaggagggaaaaggtgtgcgtggggtcaacccgagactgagtatgcgggacagtcttcttctggtccttgtacctcgtttgctcgcggtaagactggtctttgtgcactccataacagtctggttcaggataaccgggttcacggaggaatgactataacttccgagagccaagaaccgagagtaagcagcagcgaaacagagaacgaggaagagtttagcggttctcaagacatgaacatggatacaatgaaagcgagaagtgctaccggatctccagagactgatgttgatctcaatgagtatgaagcaggattggggttagctccggaaggaagagtccatggtggaagtttgatgatggcgatgttgggtagagatggtggctctggctctaccggtgggccaaagaggtggatgtaagttgtcttcagtttggttccagtcttgaattcaatgcgtgtgggcaagtgagagtgaaagagtctgtggttgttctagttttaggtttgcttagagtaaaaaaaagggtccaaagtctgtgtcttattggtctttgtagatattgaattaaagggtcgaagcataggttattgtgatgttgtgaattatacaggtaaaagcccacctgtggaaattgtcaaaaacagtcttatgatgatgatgataataataataaaactcatgtcttttgtttgcaaattgcaattttatcggtagggcaggtttgttgggatcatgctgagtcgatgccagtgtgtttttactttttagcagttacgttgaaacattcacaagtaggtacttaatatgtagctatatattaaaggactggatagtacaacaactcatgggaggttctatatctattttatcttcttagagatccctttattgtatagacgcgaggaacacttgtcatatatagtttggatcgattttacgtcccacgggaccattacttaagacgtcgtaggagctgaccaccagtacgaagaaccaactcattgatatagtccacaaggaattggacttggtcaaggtctttgatctcagggccagtcttatcgtactccacactgatatcgacgaggctatacaagccaatggcggaatcattaacttttgtagttgatgtaatcatcttatagccttcaaagaattcaggtacggtaaaccgttgcgtcatgcttctcgtttcgtgatccactgactcaatggtcatgtgttctcgttgccaaggccttatctctaataaccaacataaacaattacgaattatgaacaaaacatatgaataaggtgagagttattataaatagatacctgaagggttctaattagatatatgagtcatatggtagaaaaaactatcccagaatagttttggtggaagcgaaaacagaaactgcatctcacaaagtcgtctcaatgccatttctctagctacttgatgtttgccttttgtgagttttataaataattatggtcttgatctcaatgtaacatgcatgtttatatagccaaatgtttatgaaaaacatgttgcattaatttttcttcagcagattacccattcaacttttcattagatatgccatttttctacatttaacaaaattcgttggccatttgcataattgcattctctgcttcacttaatcaaggcaacaacacttggatggaagaataacttgagcggaccaaatttatcaatgaacttgaaccgatcaaattaacattgctaatttttcttcattaacttattttcttagcaataatatataacccaaaaacttatctctgaacaaattaattaggaagtaacgcacaaaaagaaatgcacaaaaataaatgtcagaagtgggatttgaacccacgccctctttcgaagaccagaacttgagtctggcgccttagaccactcggccatcctgactttttgttaaacttatacgtatatagtgtaaataatcgtataattttcaatatccataccaatcttcagactcttttttttggtgacaaagtgtatgtattattttcagaagctatatgtttttcctataaaacatccaagactggcccatacatatttttaagaaaccctatagtgtgtatatgacttcaaaatttcgaatggttagtttttctttcgaggaccaaaacaaaaagcccattcaatcactagaaaaatatcactagtcaatcaatagaccaaaagattgaaagtaggatatatttgtttaataatgcctacgattctgcgaagacaggagaagccatacctttcaatctaagccgtcaacttgttcccttacgtgggatcctattatacaatccaacggttctaaatgagccacgccttccagatctaacacagtcatgctttctacagtctgcaccccttttttttttagtgttttatctacattttttcctttgtgtttaattttgtgccaacatctataacttacccctataaaaatattcaattatcacagaatacccacaatcgaaaacaaaatttaccggaataatttaattaaagctggactataatgacaattccgaaactatcaaggaataaattaaagaaactaaaaaactaaagggcattagagtaaagaagcggcaacatcagaattaaaaaactgccgaaaaaccaacctagtagccgtttatatgacaacacgtacgcaaagtctcggtaatgactcatcagttttcatgtgcaaacatattacccccatgaaataaaaaagcagagaagcgatcaaaaaaatcttcattaaaagaaccctaaatctctcatatccgccgccgtctttgcctcattttcaacaccggtgatgacgtgtaaatagatctggttttcacggttctcactactctctgtgatttttcagactattgaatcgttaggaccaaaacaagtacaaagaaactgcagaagaaaagatttgagagagatatcttacgaaacaaggtatatatttctcttgttaaatctttgaaaatactttcaaagtttcggttggattctcgaataagttaggttaaatagtcaatatagaattatagataaatcgataccttttgtttgttatcattcaatttttattgttgttacgattagtaacaacgttttagatcttgatctatatattaataatactaatactttgtttttttttgttttttttttaatacatattttgcttttggaagatcaaatggacagcaaacagatgttgttgtcggcgcttggcgtcggagttggagtaggtgtgggtttaggcttggcttctggtcaagccgtcggaaaatgggccggcgggaactcgtcgtcaaataacgccgtcacggcggataagatggagaaggagatactccgtcaagttgttgacggcagagagagtaaaattactttcgatgagtttccttattatctcaggtaatttaaaacatataacatcgaaagttcccataattcgcatgcattcaactagactttaagatcaatcaattctaattaggatcttaaaacaattcttgtgatggaatatacatatgttttgatcgtcactttagtttatagtttacgagtttcaagacgataatacaagtgagaatatagaaatgataaggaaataatatgagtcatcacatattttttggatagtgtttttatttgttttagttattaaatgtagttttacaaaaacggataagatatttgttggagtgataataatggtgaagcatgtgaatttctgtttacatacgccgataatgatttcattgtttttctagttccgacacgtgtcactatcatttagattctttgatctttatcccaaaatgtttggatttattcttttgatcactgaaacatacccacaccgatcgatacatagtacatgtagtcttgttcatcaatgtttttacctttttgggattgtgcagtgaacaaacacgagtgcttctaacaagtgcagcttatgtccatttgaagcacttcgatgcttcaaaatatacgagaaacttgtctccagctagccgagccattctcttgtccggccctgccggttagattccgatgattcgatcttgatcttgaaccaattcgtttgtgttttgaattttaatatgtttccttgcagagctttaccaacaaatgctagccaaagccctagctcatttcttcgatgccaagttacttcttctagacgtcaacgattttgcactcaaggtttcttgaactttaaacaaaaacattgaaatatgtttcttactttgagtcttctccattgtgaaccttaaatcttctttattgtgtttgcagatacagagcaaatacggcagtggaaatacagaatcatcggtaatcggtttactgatttcgtttcatgaattgttactagtttcttgtaaatgatctaaatcggagagctggttttattttccggttgtcttagtcattcaagagatctccctcagaatctgctttagagcaactatcaggactgtttagttccttctccatccttcctcagagagaagagtcaaaaggtaaatcaaattttgtcttggtcaaatattaagttggctctgcttaaccgagtaatcgactctgtgaccaagtagccttatagtttggattttcatcggtgttatcaacattgtttgttgatgaatctgttcagctggtggtaccttgaggaggcaaagcagtggtgtggatatcaaatcaaggtttgtgtttcggtgtcctttacttcaaatttatgcaatgcgaatatatatccatcaatgttttgcaatcaacctaatgcataattttaatgttcaccgtgtgatctgtgatatatgcagctcaatggaaggctctagtaatcctccaaagcttcgtcgaaactcttcagcagcagctaatattagcaaccttgcatcttcctcaaatcaaggttattatatatgcatctcaacaaagaaatttaaaactataactctttgttcattcagacgcgtgactaatatctgatcttagtttcagcgcctttgaaacgaagtagcagttggtcattcgatgaaaagcttctcgtccaatctttatataaggttatgtgtaaaactataaagagtataaaggtaatgtgttatgtgtaatatcttgtttataatatcttgcaaatgtgaagtgcaggtcttggcctatgtctccaaggcgaatccgattgtgttatatcttcgagacgtcgagaactttctgttccgctcacagagaacttacaacttgttccagaagcttctccagaaactcagtggaccggtcctcattctcggttcaagaattgtggacttgtcaagcgaagacgctcaagaaattgatgagaagctctctgctgttttcccttataatatcgacataagacctcctgaggatgagactcatctagtgagctggaaatcgcagcttgaacgcgacatgaacatgatccaaactcaggacaataggaaccatatcatggaagttttgtcggagaatgatcttatatgcgatgaccttgaatccatctcttttgaggacacgaaggttttaagcaattacattgaagagatcgttgtctctgctctttcctatcatctgatgaacaacaaagatcctgagtacagaaacggaaaactggtgatatcttctataaggttagaaatagtaccctaacttgtttcacaaacaaacctctacaagaacattggtactgatatgttctttattgtgcggttagtttgtcgcatggattcagtctcttcagagaaggcaaagctggcggtcgtgagaagctgaagcaaaaaactaaggaggaatcatccaaggtctctctctatatactctgttattagctgaaaacagaggattaagaaacagagcagaacccttgctgaaacatttgtattttcttcactgcttcaggaagtaaaagctgaatcaatcaagccggagacaaaaacagagagtgtcaccaccgtaagcagcaaggaagaaccagagaaagaagctaaagctgagaaagttaccccaaaagctccggtaagcttactctttctgctgttttatctacataatgatccaatctacataatgatccagtagtggtcaattgtgttaacctatggaacaggaagttgcaccggataacgagtttgagaaacggataagaccggaagtaatcccagcagaagaaattaacgtcacattcaaagacattggtgcacttgacgagataaaagagtcactacaagaacttgtaatgcttcctctccgtaggccagacctcttcacaggaggtctcttgaagccctgcagaggaatcttactcttcggtccaccgggtacaggtaaaacaatgctagctaaagccattgccaaagaggcaggagcgagtttcataaacgtttcgatgtcaacaataacttcgaaatggtttggagaagacgagaagaatgttagggctttgtttactctagcttcgaaggtgtcaccaaccataatatttgtggatgaagttgatagtatgttgggacagagaacaagagttggagaacatgaagctatgagaaagatcaagaatgagtttatgagtcattgggatgggttaatgactaaacctggtgaacgtatcttagtccttgctgctactaatcggcctttcgatcttgatgaagccattatcagacgattcgaacgaaggtataactaataataactctatgcgccgcaacattcatttcggttttgggagcatgttttcttgattgaataaaaacattcgtttaggttctgttcggtttagttggtttacagggtttattcttccgcaggatcatggtgggactaccggctgtagagaacagagaaaagattctaagaacattgttggcgaaggagaaagtagatgaaaacttggattacaaggaactagcaatgatgacagaaggatacacaggaagtgatcttaaggttcgatctttttccttcttttcttgaatatgtagtaaagatgtaaaagaagagatcttgacagttgttgatccgatgaacagaatctgtgcacaaccgctgcgtataggccggtgagagaacttatacagcaagagaggatcaaagacacagtaagaaataatatttctctaaggctttttctttatactagtatctttattttggttttaactgattgtgttatgcatttttgatatttgaaggagaagaagaagcagagagagcctacaaaagcaggtgaagaagatgaaggaaaagaagagagagttataacacttcgtccgttgaacagacaagactttaaagaagccaagaatcaggtgaaaacacactgtggtttatatatattattacatgtatgcctacactgtggtggatatggaaatagcgtttgcgttttgaaacgttttaaattgaaaacgcaggtggcggcgagttttgcggctgagggagcgggaatgggagagttgaagcagtggaatgaattgtatggagaaggaggatcgaggaagaaagaacaactcacttacttcttgtaatgatgatgatgaatcatgatgctggtaatggattatgaaatttggtaatgtaatagtatggtgaatttttgtttccatggttaataagagaataagaatatgatgatattgctaaaagtttgacccgtatgtttggtctgtcattatgaaatcatactatatttgagtgactgactatgcacagtattccacaatatgtacataatataccaacttaaaagattacgtaccttatttgacgctttggaacacaatataaatagacacaaagaccataaagaatctcatcagtcaaattaataaaacacaaagagatcaaagttgaaaagacatggcagtatcaaagacaacaatgctcattgttcttgtcgcaatcattctctcatgtatctcactttacatttttttactttcaagtatgaattgatatattatatgattgaatcaatgaatgtatgtataggtgtgtcaatatcaaatgcgaggcaaatgcaacgtccgcaaaatgtagagtgtgttggaggagaatgtcaaccgaagcatccacaacagtattttgggagttgctttcgcgatagcgattgccgaaatagttgtttcccatattgcagatatcaaaaatgccatcatcatgaatgtatttgttcactatgtagcagtgaagtggctccatcacctaaatagtgccacaatgttagaaacaatgctatgcactttcttaggttataagttacaacgaaatattatcttacattattgaataatttttgaagaatatgagcaatgagaaatgtattagatatatatgaaaaacaaaccggaaacagttttgatacttatgtcataaggtaaaagctacaaacttttgagtacaaggtgaacagattagccaagctattccaaacagagctattcaaatttcagaagttggcgtagggatagatctggtaggaatgattttaatatgctgcttcaagcagcttgtatttgttttagtgtgatgaccaacgttggtgttgcattaagtgtcttatggatttgagactgaaatgagaggaaggtaaagcagattcaaatgatcacttgggattaggcattgcaaaactcactcatcttagttcagttctctctgttctggtcattcataatatcttgtttttgtctgatctatgagaagcataaataaacccatcttaatattgtgagtttgatctcaaagtataaacaagttgaatcatcagaaagcaaagagttataattatagattcaaactcataattaggatcttaaactatggtatcttagaaaaaaaagcagagagaattattcgataaaatgttcatcattacaagtgataatgcagaaaacctgacgtccattgaagactctcctggatttgtaatagagacgatactctctcataaaccaattgctcatcttcagacgactctctttatcccccttgttcctatagtaatacctaaatctcgtcgttccaccaatttcctcacccgtctccttggacaggactgcgatgcaaccgtcttcgagtatccacgatccctcgcaatgaacaccttccaagttactatactttcgattgcgtttcccaaagtagaaccactcgccagggttgagaattggagctgtttgtcgaggaagcagccaaggctctacagtgtacagctcctctgccaattccacaacatatctcgggattgaagatgtttcaccgtttatctttggcctcaggtaattctcgatgatctcttcgtctgaaacacggcatattatctcctccgcctgcattctcaatctcacagaaattcacaacaatagtcaaagatcatcaacaaaccctaatttataacctgcactttttgccgacattttgtttaccggacctaatgattaaacaaacgggcctttaaagcccaatacttaacagactgaaattaggactctttaggacttcttacggatggggcttaaagccttaaatgggcaattgaattgaattgaataaatactttaccctattttcataagaattcatgcaaatcatccaaaaaaacggcgatttatgtaaatgtggccaagaccatatctcagagtcagtcataacaaggtttctgaagctttcaagttggtgcacatgagagggactgctttgtatcttttttcagccaagttcaaaagtttgctacagctaagagagagaaaatagacaccgatgtccaaaaccattgatgcggtggactgaaagcaaataattacaaacaccatagaagaaacaagatcaagacttcatcaacacaagaccaaacaccgaaacaacatgtccaaaaggatttcactttaaagaacatcaagcatatacgataataatcaataagacaaatggttcttactccatgaactatgtttcaaaagttttagcacaaaaactagtagccaatcattttacaaacagacttttgtcttgtaaactagagaaacccacaggaaaaaaagacagattactcttaaactgactctcaaattgcacagctgaaacacagtaacatcagcaaacaacatgcatattaacatctgctacgtttttactaaaataaaacacagaccagatctatccctatgatactacaatattttgagttctgaaatttgaatccagagggtccttaatctcgaaagatccactccaaaaaacctttcaatacatacagataaataaacgtactatattaagctcagatgcaagctgctatttaacaaaggaaataattcctagacaatagactaaaaacgaaactattttgctcagggaatgtcttttatctatgctaggtttaattcttattccatgagtaaggttacaaacttacgataacaagacaatgattcaaattccatgaataagaatttaaactcatgataacaagaccaattcctaaatcatgagtcaaaatattcaaacttacaaaaaactggtagccatgttttgttatttcttcctcagacactcacatgtcgttgcttttttattatgatttcttttactttctcaaacaacatcttgagaactcgcagaacctggaacctctgcaaaaccctcttacatgttacatatagcattgaaacatccgcaaaacaaaaacaagcgaagagagtacaacataccacttatgtgttacataccataaaagaaagaagatcaagagaagaccttttcaccagaaacactaggacagcatatccgaaaagctcttgtccaatctaccatcagttatcaagtcagcaaccattttaatggtgaaagcatctccactgaacccgttgcttcgcatctccgagataagttcaatagatttatctatttcaccagctttaagacaccctctgattagtgtattgtatgtgctgttatctggttcatgtccattgtccttcattttatggaataacacatttgcgtctgagattgcactttttccacagaacccagatatcattacattgtaagtttgaacatcaggttccacaccatggatgggcagactacagaataggtcccatgcttcgtccaccttactacccttgcacattccatggatgatgatgttataagcaacagtatcaagatcaatcttactcatttggataacctcaaacaattccagtgcctcttctagtttctcattttcgcagaaaccgtacaacaaaatgttacaagtaatggtatcaggacacacaccatgagaaatcatctcctggaaaaggtcttgggcagcattaagattgtccacttcacagaacccgtgaataagagtgttgtaagtagttgtattagcaactaatcctcttctagatatctcacggagaagttgcattccttcatctaccctcttagccctacagtatacgtcaatgatggtattaaaagtaactacgtctggactagccatcaaatcaaacatgtgtttcgcatcatcgaaacgattatgcttgcaaaatccataaatcattgagttatatgtgactgtatcaggaaatatacacctatggagcatctcgtcgcacaatttttcagcctcaaacaacttcccttctttgactgatgcactgatcaatgcattaaaagttaaaacatcaggattgatttccctttcaatcatatcacgcaacaatctttgggcatcactccatctaccaaagctacaaaaaccgtctatcatacagttgtaggtaaacacatttggcgcaattcctttctcaagcatttcactgaaaagatactgagcatcgctatgatgcccatctttgcaaaggcgatcaatgatggcactatagatcacaacatcgggtttgatgtgggtttcttccatcttactaagcagattcaaggcagacttagtgtcacccatcttacacatgccattaacaattgttccgtaagtgacaacatcaatgtgtagaccttttcctaccatcttattgaccaaagctgctgcttcgagaactcgaccttctaggcagagaccatttatcagtgtgttgaatgtgatgacaactggggttaatccaatttcaaccatttgatcaaacagagctacagcttcgagaactcgtcacggcaaagaccgttcataagtgtgttgaaggtaacgacatccggttgacatccagtttcaaccatataaccaaacaaagctaaagcttcagaaatcctatcttcgagacataagccgtggagcagcgtgttaaaggtaacaacatcgggctggaaaccaagtttagtgagcttgccaaatgtagacaaagaaaaagacaacttatggcagtcgcagaaacattttatcagaatattgaagctgtagatattaagtggaatccggcgaatttccatcttccggtagagagaaatcgcaacatcgggacgattcattctcacgaagacaccaattactttattgcaatcaactgccgtatagaagggacgagatctaaccatgtaatcgaagaaatcaatggcatcatctaagcttttgaaataatgagaaccacttttcaatttcagttcctctccttcaaaagtaacttgggtcaaagaaggcagactctttgtacctttctcggcgacacgaccatgaatcagtctcctactgttcaatctaacaccgcctgatttcgtgtttttcttctcgatatctctctttgttttttgttcacacttctcgatatctctaaccatagaggagtgtacatttaaacagtgtgagctctgagactgtagagtcatgagtgtacgtactataagagataatcagaaaacgacaggttccattaattggtcggtacattgaccggttaagattaatctagtcggacctagctgacctctggttttgccaactgaataaagttttttctcttttccttttaagtctagttaaattttgacatcagttaagttggagctactgaagttaatatcgttcttatttctaaattttagtgcaattaaataacctcttttcccccacggatcaaaattattgggctgtgtaacaagtttcacttacaagaatctgtcaaatgtatattcaagtcccaaaatgcagaatcataatagaatgtgtctttaaactacaaacagaatcatccataatttgatcccttagattacatgtcaaaaataaacttctacatatgtctacgttttacattaatggttgcacacttgcactaaaactaggggaactcatttatttaaatacactttatggaaaacggagataaataacaatgtgaaagatgacaccaaaatcagtgcaacatgtaaatcttaggaaaaaactgtaaacattctacgaattcatagttctaaccaactttgcgaaatcaatggcagaaacaatcaatttctttacaaaacaatcaacttctgtaaacattaaattaagttcggaatatttaaagatttatcataataacattcatgacgaccatggtatccgaaaaaaggatcaattcaaatttcaatcagattcaatattgctataaaatttggttaaaacccgaataaaatccatatagcagatatttgagagaataaagggttattaaccaacagccaaaaaaacaatgcttcgagatttatatatcaatcttgaataatctcggataatgatgatgagagaaacttacacactctctaatctttcttcttgataaaggcaaaggctcctttaggaattttgctcatcaccttactcaaaaccttcacgtcgaactccacgtattgcttcttgatctccctcatcgccttttcaccaaagtcatctactttatcttcatacttctcgtaaagcacgggaatcgtgaagagaagtacagttgctggaagcagaacaaaagaggattatatattacgaaaaaaaaaaaacacaattggtgaagttaatcgattagatgcaataaaagtatggattcgtaccgatgtagattaaggtcaagaagttgcaggagctaccaactttggacaaaacccataaaccagcaatcacctaaaacatatttgtgaaccaatgttaaaaaaaaataacaagaaaccagcaaaatcaaacaacaacataattaacaaaaaggtttaccaacagaaacttcttaagatctcttcctgatgcaatgtccctaagaacagtaaatccacgattgatttcaatccttaatccagaagcaagctgaagaacaacatcctcggggatgtgaacttcagggatatgaagaggtgacctgtaatacaacaatcagctttaacataccatggactaaacatcaatctcacaataaacataaacattcatccataaaacttacttgtgaatgaaggtactagcactagaccacaagaacaatactgcgagagcaagaattgaaatgtggccgaagagtgtgagaagattgtactcaagtaactcgaataagatccaggaaacagttgcagcacccaatactcctcctgataccttcttgttcctccacaggaaaatgtcggcagctgaatcaaacaaataaatgataataagcttacgaaattactcattccatagatactctcagattccagaaccagcaaacaccaaaccaaatcgttcgtttatatcctgattttctgaatctatactcaatccaagcaacaaatcaaatcctaagtctcaatcaatggctagattccagatccgataagaaatagtaactaaaatcgcaaatcggtgaaaaagagagagagatccatacgttttccgccaccgaaaagcttgtgaagaggctgttctcttccgaaaagacgataaatcttggttttgagagacgcagagttcttatcgtcatccgaatcggaagaagaagaagaagagtcatcgtgaccatggatcttctcagagatcttctccatgatcgattcctcgtgcttgtgctcttccgccattgttaactttgaaacctccgcaaaaaccctaaacttgtttctggtttcagtaagcgatgagcgagaaacggagaagaaaacgaaaagtctctttcagtcatacctctctctaaataagagcgtttgatacagattcaatctcacccgtcgatttatttaactcaatcttggccgttgggaattaatagcttactttctaagaaaatcattaaataacagtaacatctttgagacggaagacagacgacgaattcttaattaacgtctccgttagtgtagcgttcaatggggtcagcacgtcgtcgtcgtcgagaaggtagatgcttgactacgacgtcgtatgaaatttaagggaaatttgtttatagggatcatagaatagacgatgctatgatgagattttatttgggccaataagaaacttgagggaaagcccaataggttaagtgaagttataaaaataacagcttttttttttttttttttttgacaaatatagatttaagtctaaaatataaaaataatatagatttagtattaattttgtcactagaacacaatatgttatttattttgtgatgctatatatttatgctttctgcctggcatactcatcatatttattgttagtcatgtaagacaaaatcatattctggttattggtctaatcacattggctggttgtttccttgatttttctataacccactgtgcatttaaatgtgtgttttcggaccataatccatatcatttgaaacgatattatatacacattcgaatttaactaaaaaagtatgtagctaccacctagccaaatcaaatctctagggcttactattgcgccatcatgccaaacaattagcccgacaagatcagattttcttagggtagtaatattcttctcgtgatcaataggataaagagaacatattgtataactatctgaaatgatttgggatcgacgtttagttaaaatatataattaacttaatcattgagtttgacggaaatagctaagctgcaaatgcaatgaagcgtttttcttttaccagtaaattataagatttgttaaattcgttggagtcaaaatatggatcactctcatccaaattcattttaaaacttatacattatgctattagtgtatcaatctcaaccaaaaacgtaatagcttctttatattttggaggaagtccactaaagctgaatttcggggaagcctatcaaacaacgagtgactagcttctttgacttgcttttgaaagtgctttgcccttttgaattttagataaagcgaattaatgaggagaaagaaagaaatttttgttttattttgacgagagtgtgtcccattcatttgtttaccaactcaagctctataaacttattttcagaaacactaatataagaattatacatgattgcagtatgaatccatgaattggattaagaaattaaatggaatagaaaaaaaggattaataaataaataaatggatcatacgaaatcacgtacacatgtacagtgtaaagggcccatcatctttactgattttgggaacttgatgaggcccattaaagaagggtgataatgggactttggggtctacatccattgaatctgacggcctgaaattttttggcaaataatgatgatgttaataatacgtctcggaactacaaactttacacatatattgtgcatattttttacaagtagtagtaatattaaacattatccagattctttcagaatcagtttagtttttttaaatgctttgtaggcgacaccatcaattttgtcgattcccatatgattaatatattactacttagtagtataatattatgtaacataatctcgtaaacataaaacaaaattgcactaatttgtgtttcaaatgcaagattttctttggttcaaagtagtgccaaaaagtatcactattatttatgtgtactatgtagaaaataaaagagtacgtatataaatactttaatgatctctgaccttttggtctgactgtctcagtctgaaagtcacgtgactcagctgctccctacgcttagcaacgcaacgcaacgcaactctttgccacgttttttcttatttgcctctgcttcttttgttaaaacatggcaaaacaaaatgaatttacaaatttataacaaaataaaatttgttttattgtgaataatttcaatttttaaatacatacaaaaacagtatccaaagcttttttttttctttttgtggttgtggtttattttctttcagccatagctttgtttgtaaaacgtaaacacaaaatttaaaattttgcctaaaattttagttttttttgtctgtcaactatatacgaaaccttttattgtatcaaatcaatattaaattctactgtattagttttattatggtttgttatatttttcttccttgtaaaaaccaatgtttcacaccaaacagtaaacataaaaatattgtcttgcaatgtaactaaaattactaattatagacttatgaactgtaacctatggttattaaagacagataaattagcatagtctttaagtacgttttcttttgtcataactatttcataccatttttatgaaaatggaactaaaagcaataaagaacattatatatatcaagaaaaaataaagtaataatttttatatatatagctttcactcttctcttacaagcactgttattaacccttctttttcatctaaaaggagaggagactttgaagaagaaagaaaacattcaaagctaaaaaacgcagcgttttaggaaaaaagaggtagagagtgattctggctttcccaacaatggaagctttcagtctccttaactactggaaaaacagtggtggtgctgttactttccttcctcactcctccgaatcttcttcttcttctctttgccgttactccgccggtgaatccatcggaaccaccaccattgtcacctctgttaccgaaactgaggacgaagaagctgatgaaaacgacgacgaaggaccgttcttcgaccttgagttcgctcttccagccgaagaagaagacacagacggaggagtcggaagagagggagactccgattgtacggacggtggttgtgagtttaaattcactctctcgtcttgttccggaggagaagatcgagtagatccagattcactcgatgatgttttcttcaaggaaacgattgttgaagaggttgaaccaccgacttcttcagagcagcagacatgttctgttaaagctcccgcggcgcagttatcggcgtcaattttgaaaaccgccaccaagcttcgtgtgttcatgctcggaatgaagaaatcaaagctaatccaagcgaaatcagaagctaatttcggatctgaagacctcgataagcaaactcatcctcctccgccgttatcactttcgccggaatcgcaacagaaaagtacggtgacagtgaatttaaaagttgaagaagttccgataatttctctattctcaagagaaaacagctcgaagaactcatcttcgtcttcttcttcatcttcttcttcgtcttcctcattaaagaagcaaaacggcaacgaatctgtcgtttcagatgagaaacgattcgtgatgatgcaaaagtacttaaagaaggtaaaaccactttacatcagagtttcacgtcgttacggcgagaaattacgacactccggtcaactaacagctccatcgtctgcgagatccacggcggagaaagcagattcgccggtggctacgaagactaataataaaccggggaacaacatcaacattccagctggtcttaaagtagtgaggaaacatctcgggaaaagcagatcgtcatcttcaacagcgactacaccgtcgtctactacggcgactgtaacgactcagtctgagtcaagaagacgcgacgactcgcttcttcaacaacaagatagtattcaaagtgccattttacactgcaaaagatctttcaattcctctagaggtaattaaatctccattaacaattctctcttaacattattatcttccaaattttcgttgattagaattttgtttttacatgaatattttcagataaagatccgtcggtgttaccaagatcggtgagtgaaccttcctcttacgagaaatgagataatatcgtaatctttttttttattagtttcaagagaatctcaacggtattgattttctcgcattaacaacttcataataattatgggttttgtaaatattttttaggagcttatttcagaatttgtaacagtaatgttttagatgttatgtttggtctgttatgaagactattgaaactttcgaacataaaaagattattaagaagaaacatagacttttctttttgtcatttttatgttcagagacaaaaactttacgatacatagttacaaacacacacaaaccatactatatttaaaaggaacgttattatgcctaatttcatatggaaaatagtcaattggtgttactagtctatataattttttgacattattgaaaaagaataaacaaaaagtagtgttaaagataggaaaagatgctaaatatgtcatttacgtcgaatttgtttatatttatgttttcttgtgtgaatggtatattggtaatttagaatgacggaaagagaagggaatgtggggctttattggtaagtgagatggtgaaagttgagacagaaacagtgaaaaatccaaatttacttttttccctttatattgtgaatctctctctcttttctttttgtttgcgaatggagtatgtagtacaaaaagatggaagaaaacaaatccaaaaatttcaagttcccgtaacgttagtaaaattcaataatgtacagaaacaaaacttggctcctccagatcaatacaataattcacaataatattgcacacgggtacaaaatgcattgttatttttcattgaagtgtcttattcaatgcttgtagacaaaaataaattactgtacgaaaaatcaacaaaattaaattacgtacgttataaattgtagttcgaagattagggtaaaccactatcttttagtgttgtaaatcaaagaaacgtatagagagaagaaatgtatattattaattagaccatatgtgaagtatttgaattttctgtgccaggttgatcgaaaaggcccaagttcaattataactcttttaattggcccaccaccggttttaatattgtcaaagcttcttttgttctctctacagagaaaacaaatacccactagtatatcaaccgaaccgagttttttgaacactaaaccaaatcatatcggtaccaaagttcatttaaaaccatttgataatcatgtacatacacctaacaaaccaaaccgaagccaaatttagtccatgaccatctatgcaaaaaaaaaaaaaacagaattgctcaaccaaattgaaccaacccattaccccaaccccaaatccacttcattgacaaagcccttcactaaaccggggaaaagttgcacatacatattgacagaatgagtcaaaatatggaattggagtcaatataattcaccattaaatgtgtattaattattgagaaaaatcttattttgtagttcacatcaacataacacatgctttgatatttgcttcatatgtaaacagaaatcttcttaaatcagatcataaaaccgatcaatcaattatactattcacataacaaattttgagtaaacctaccggttaaattaagtttcttttggtacataactcatcacactaccttaatccttcttctaatctcagcaacacttctcaattccaaaaccctaatccttcgtattcaattaacacagcatttacatgagattgccaagacattaaaaaaggaggctctctatggattctgtagcacgagttatcgtaaccttcattcactgcctccgtcgcagcttcttctctccggttcgttcgtcaagatttgcaccgcacattcactaatctcgtagttgtccaatggattgtaggcgctgattttgaatacaaaacacaatgcatcgcagctaacttcagtcaagacaccattaaaaaaacacagatgtttcgttcgaatcccggtagaatggttagggtgttctaaagaaacaactttactgccaacaaaccgtccccttccgtctgtgacacgacaccgtatctttacacgtctttggtttctttcgcattggagctgcctaggcgaaatcaagacgcaagccttaaacgcgaaagatgcagaagatttaacaagaattttcaaggaatttcctctggctctgtgattaaactcactaggcattacacttccagggaagcatgcgtgcttcacaagagactgttggataattactctctgtgcttcttcaccaagtttcaagcagttggtgaaatttagctgtcctgttggagtgtttaaagggtaagttactctctccagtgattcacaatcttctgccgttaggagtctaagagatgcaggaagctctggcaatgatttaagttttctgcagcgacatagacgaaggtggtctaacctctgtaaatctttgatacaactatctgcaatcatctcaatatcagtagagctgagatctagtgtttgtagactcgagggtagatgtgttatgctcttgagatttcgactgccacttaaatcaattttcaaaagtcgagagcaatgcgtaattgatgcaggcacttcttctacccctgttctgactagataaagcctcttaatttttgtagaaaatgctggaaaagttttcaactgtgggcatccagtcatgtacatagtctcaagagacgccaagttgatgttagttggtatcatatgaagactttcgcagagatccatatatatcacatctagtttatgaagattcttgatagaagatggaagctctgccaaagcaaggcaaacactcagatctaacatctccaaatttgtagcatttgaaagatctgggagttccttcaaattatatgaaccttccaaatttagcttcttgagtttcgtcagcagctgaatgttaaaaatccacaaaacagaacataaaatgagaaaccaaccctcttgttccatatgatatgagtcttattatttcctttgcaaaattattcgactatgagaataagcaataactaacctgagttcctggccagaggtactcgagccggctatctttcatatcgagttcgactagattttccgcccgaaatttaagaggaagacacttgcttgggtatgcatcccaatggagtaaccttaggcgaggtggaaactccatgtcctctggtatatccattctattatacccatcatgttttgtcttgtaaacacttaggaatctaagattgcacattcttctaagagctttattgcttatactcacttcattaattcctgatgtatcaaataatatgccagacacagctccggtacccttaaacaaatttagtatataaataacttgttagctaaataggtaagatttgtttgtctttcacttggagtttctaagcgtaaggagcaaagaaactaaccgaaataaaaaataaaataaaaatcacttactatatcattttcaaggacatgacagatttcttgagcatcaattaagatccgacgtttccaaggctcttctctttgattggcttgtctacccactagttgaagtaacttgtgcattcgtattctcccatccgtagatatatatatgagagatttgtttactaggatattcaactcgtgttcgatatccaagtcattttcagcgagcatggctttcacaagatcaccatcttcatagttgaagaagattgcaatgtggagaaataatgattgttcattctcatgtaaactctcataaccgactcttagtacttgttcgatatctcgatcaatgatagtttctagcctccgtattacatattcccattcttcctcattcttcccatgtaaagatgaacccaccacacgtagacccaacgggagcttaccacaaagctctgttacacttcttgtaagctttttaaaaccatgacgtgaagagctctgtctaaaagcatatctacataagatcttgatagcttcttcatcagaaggaaatcctacatagtaggtattgttgataccatgttgcttcaaaagctctttgttttcggttgtcacaataatcctacttccaggaccaaaccaattactttcattagctaaagcctctaattgcttgacatcattcacatcatcaagaatgataaacactttcatgtcgcatagcctctcttttattgcacctaaatggcatatcctcgaaccatcttggttcaaaatctttgaaagaagttgttcttgtaagcgcaacttcaaaccatactcatcaagaccaatgggatggcttcccctcaggttatccacaaaacaagtatgatgaaacctattagagagtagactatgtaaagctctgccaatggtacttttaccaatgcctgcaggaccagagattgcaaccatcttaacttcatcattatctaaatctagcaaagactgaattttcctcaaatgagcctcaatccccaccatgccatcaaaatccctacatggtgtaacattcagtttttctgaaacatctcttgcaattttctcaatcattttcgcttcattgtccctaataaaagaaagaaaaaaaacatttccattaaattgttgtgaaaaaaaaactaatcatagatataacattcttcttttgccataggctactactctattttcgaaaattcattcaacaaacattcccttcaatcaatgaaaatctattctactcaacgtagttcctattaaccattttttgtgcttgtttcctctattgtggttaccacttggaacataaggaaataattcaatttcatcaaagacataccagtttagcaagtgttcgccagctatgttgcccacatagttcaaagcttggctccatttttgcctctcctcctctgttctacaagcacatgtttcattgaaagcgatcccgaactctccagtttgtttccgcacatcagatggatctactccatagaagacagtcatcactatttgacccatatcatccttgcacttcaaaatctccaacaactcatccaaacaccacccggaagaagcatagttcttcgagagcaatacaatagagatcctcgattctctaatcgcttgagtgagcgcagggctgatggtttcgcctctcaagattctttgatcatcgaacattgtaatcccattgttgttaaactgtttgcgaaaatgacttagaaagcttgtacggacgtctgatccgtggaagctcgtgaagacacgatatctccaagtacgactcgcagaagaagaggaagaagccatgagattagggtaacgataaaactttgacgattagataaacaaaaatgtctctggaggagccatatatgttggagaaaatgtaaaaagcatattcactattcaccgtttacttttgagaaggtgagtatgaaattttctccacttttacggtccctcaaaaattataaacaagagaaccggtatacctcataaaacactatttagttcttcttctttttgttagggtaaattgtcgtaatgtctcagtagatgtcgaaactcaaaagagtaatattttgataccaaaaaaaaaaaaatttgaaaaaaaactattaatatagtggatgtatacgtatgtcgatttgatgtgtacatgcatgaatgggtcaacatgtggggcttgagaagtttccaactttatttcaccatttaatatattaaattattgagaaaattcttagttttctcattcgtttttctcaaatgatgatcctacaaattcatactaatcaatttatttatttattttacaaatcaattttgtagtgactaattttcttttctacaatattgatgttccgttcatatacaaagaccatagcaattacaataccgcaaaaacacaacacccaaaaaaaaaacaacaaacaaataaatcttcttaaaccggatcatgaaaccgatcaatcaatcactactattcacataacaaattttgaataaaccgaccggttaaatttagtctcatggtacaactcatcacactaactttccatctttttcttcccaaaaccttaatccttcctctaacctcagcaacacttctcaactccaaaaaccctaatctcaaatccttatccaaatccttagtatccaataaccgaaacgaaccgatctcaactacaacaccggttatcctaaccgtcttatgagcttccactcttctcccttcaatcttggtctctcccacaacaccatgatcagcgtaaacaacacgtaacgtactatcctcaaattcaaacgcgccaaaattcgagtttctgatcgagatatcacttactagcgtggcgttgaagtaagggtttgttgaattacctcccgatcgtagatctcgagtcgatattgatcttgtttcgatctctggttttgagatacggagaaagattgaagataggatgagacaaagtgcgaagatgatgacgattattgttaaggaatagactagacatttccctggtggttcctctgttttccgacgccagattcttggtccgctctgttcttcatcactcctgccatagatctcggtaggagctagtgttatccgatcttcgtccaccattttttgttttgttgtttagatcagaggaagaagaagaagaagatgaggaaagttaatgttaatggaagagtgggtggtttcttttttggcggttaaaagagggatttctggaggacacgtggcacgatcgtgttaagttagagtcttacgcggtgttttttatccttaataagtcttttccggagggcttgatttttgtcttttaattattttattcttttttgtgtgttaattttgattttatttttattcgtttataaaagcgagttatagcagaagagtccagtgaaaaaaaagaaaggagaagagtctttagatgaagacgacgtcaaagatttaaatgtttcaactaacatcaattgtttttagaaacctttgaagggtttcagttttcttctttcatcaattttgggaaacttacaatacctaaatagtattagttcttttgttttgaaacctatcacttgacttttatttctcttttaatgtctttgatttaaagttcaaaaattagaatccgtacggagaaatttgacgatgattagtggaccaatgtgctcataataaatactattcgcatttgtctacgatcgggcgaaatggaatggagaaaggttctcaggggacctagttttaagaacaaatcaagatatataggtactgtggtgatgcttactacttactaggtctcttctaaaactttctcgttaagaaacaaaaataaaatgtgatcatgttcgatacttcaacaaaagtttgagaaaaaaagaagatcataaagcacaatgatcccaaaataaaattaatttcagtatttttggtgatatgagtaagcggggtttaagaaaccatagacatgatcaaagataaagatacgcaagcaaccttacaaagtctcttttttttttttttgtatgaaaaccagccttacaaagtcagtcatacgtatgagaaaacaactcttgaggcaactctgaaatcaaacagttgaaatagtaatcttatggtaatttgttcaaatggttgaactcaaaattaactcaagaaaatattttaccttgacgtattcttttagacgacgtcaacattgatatggcaactgtgaaatcttgcaatttaggtcagacttcagctcaaaattttaggactacattcaccaaaatcttaaatcgatgttcttgaaagtaaaaaatcttacaaggtttggtcttaactcttaagtcttagttattggtttaaaaaaggcttacagttattgcaacaaaggtccaactcctgctgagtcctttatctgtaacaatagcagtttctcacatagataccaccactattggattggacctcctttgattaaatggttcatacactaaacttctttaggtttgtgatcacaaactccactgggccttttaataattttaatttttgggcttagtggctcagaagcaatgacaattaggtccatcaacaaatgttccaacaatgaaagagaaatggtacatgtttgttaagaaaaatatgaaaggtattacagagaaaaataaagaggtgggtacattatttctcatgtatgtacatatactcattcattttctatatgatttttgttttccaaaggagacaaacgaagtacaaacattcttgcagagatgatcacactcacacattcttaagatttaaaagagaggaaacatatagaagaaaggaactatcaaattttatgctttgtacaccttacattagttatataatacaatgatacaaaaatattataactcccttattcccaaatattcttccaatattctaaaaactctagtctctctttcaccgactccactaaaaaaaaaaaatagaaaaaaatatcccccaaaaagagtgtcatcttcctaatcacatggaccttatcaacgcattatttgcttccatcatttatcttccctgcagctgtattgcacttcctctacaatcgaatacgacgtcgtattactgtcgctatccctcaccaaacctcacctctcttctagagtctccatctcatttgcttactatacaagaaattttaaaattttactatatgcttctatcaaacccccttgaatttcttctgtctcgtatatttacacgtatgcctcggtgtatataaacctagaacgtgtggagctaaacgttaacacactcacttttgacagtgtgttaacgtttaatcactttgaattaaatagtgaagagattgcctttatactataagtggctaaatttgagatattaaagaatctagagggcttttggcttcttccttcttgtcttttagaaatgctccttgtgaaattcaaacttggttgaacctttttgattgaatgtgttgcatagtttgctaagctccttccctaaaaccggtactccgcaataaaacactcctgcgaaagatcaaagatttaagaatcattttgatcgaaacccgaatcttgattgtgatagaaaatgaaagcttctacaaaagcatgaaaatgaaacgtattgcccacggatactgaaaatgaattgtggggactaaattgactgaatcttgaaagaaaattttactttttgtgaagattagaaatgtatggagcttagtgattgttacctattcttgcattgcaatgcttggaacttagctttgtgagaaccttcttccaattaggtcttgcaaagtgtgttctgacctgaaaaatgaagattttttttaagaatcatatctttatgtgtgggttcatttttccacaatttataatttggggaccgtgttaggaaatcaaaagaatcacgacttaagaagaaagtaacgtaccctagtgccagagacaatgtcgacaccatttttggcatgattaagagcttgaaccattgtaatgagagcagaacgagcatcaccttcttcatacacacttgttaaatagttatgcatctctatcacaccctgttccacacaatttttttttttgattttctcacattgaatcttctcgggaaaattttgattgtgtctgtcaagaaatgttttgagtttgtttattacccgttggtcaagttctgcaacttcgttcatgacacctttgaaccaatcaaaagagccttgttctcttgtgacccagtagaaataagcatttgtggtttttagtattctctttcgtcttggcgtgtcaccgttgcttcctgtgctgtattctgatgatctactgaaatccgagatcgaatcctgaagacgtaaaaacatttttatcaaacttgacatctttatttatttgtctgcacaagagagaataagataagacttggtttattaccgcatgctcttccattttaacaatgttgttaagcaaatctttcaagatactgataaatggagttgcaccaatgccaagaccaactaataagagaacatcatatttcctataatcttgtgctggtgcaccgtacggtccatctatcaatagctttggcaaactgaaacaacatttaactaaacatatcagcatttggttaatttataagtgtttggttttgttttcgtgttataccttttctttgttgtttcgtcggctctgagaagtccgcttttaccgccaaccggtggctcacaaacttcagagaatactcttttgagttcttgagtccaatcaccaagttgtctaatgtgaatgctgatataatcatcttcaggtgcggaagtaattgagaatggatgcctaaaacgaaatacaaatcagtaagacagatgatttggttggtatcaaaaactgttatgaataattcttaccactcgaatggcgaaaccgcaggacattggacaaacatgtattgtccgcttttgtaacgaaattgagttggtttcgacatttgtagcgttagaacattaccaggatatatagcaacctacaaggaaaaatcaaaagaagttagcttattctacaagacaatgagaaagtaaagaaaacagagtcctctgttttagtttttgtttttcacttaccttaagcagtcgaaccgaataagaaccagaacggaagtacctaagtgttctttctccaccatagagtaaaactggtactgcaagatacatccatgtctgcaaaaaacaacatctcaaaatcaaaatcaagattatatatggtcaacaattactaagcttagaatcatggagacttaccgtacgaacataccaaggcttggcgaaatagaggaagataccatgaagaataagcaagatataaacaatgacgaacaaatgatgcgaataccaaaaggcgttaaaaccggttagtcgatcaaatggcttaggaagcttgactaggttacgcctaaaccatcttgttgctaatgtgaatgaaataatcatcaaaatgaccattaaaatcccagtgattccttcaggtcccttaacgaggtcgaagtatgttggctgttttgtttgaaagtaatgaaacagataccgattgtaatcgtattcggtggctctaacaattctagggaaatcacaagcaagatggtctccaatatgaaggatcacagctactacaatggctccagcaattgtctgcacataacaaaaaaaccaaaaaaaagagcagtgagttaaaattttctatcaaaatagtttagtgagtagagcattggtttcttactttatgaaagtttaaaatgatcaaataagaattttttccccactacaacacaaccttcacttttaaaggtgagcatttctaaaaccaaaaccaagaccaaaccaaaattaatcttagtttatttactgaaaccaagcttatacaaccaaagcaaaccaaataaactgcaactaatgaaaaatttaatttgttatttaaatataccaaaaccaatcttactatatgtaatgtacttaactgaattagaaaataaaaatttgcatgtgaagttatctttggtgcaaaaccgaaccaaaccatataagaaaaccagactaattttattcgaactaaacaaaaaaaattgattttaattcggtatagcttttcaaaattttattcaaaacagctgtatatgaagttgttttttttgcaacatagagacaaaaaatttcaaactgaattaaaagttcagctctaattccgtataagactttcctaaccaaacctaaattccacatgccttaatcttattcacttttctttagtggcaaaaaaatgtaagaaatgagaaagagagaaccaaaaaaaaaaaaaaaaagagaaagcgaaatagctgtttagctgtcatgtcaatgttccagtgcgtgcacaaagaatatgagccccacaacaatctcagcttttttgacagcacattgcgttcgatgaggattttgtatctctaattagtattggttttgacttctatagaagcacgaaaagaaagttcttatgggaccctaaaaagtagaaatcaaaagtaaaaaacaaacaaacaaaaaggtttatagctcactaaccttgtggaagttgatattatcatcaaaaggaacgaagtaagagagtcttgtggatctaagccaagtaatggtgtttctgcaaactgggaaaagtattagagccatgttgaatttaagtgtttcagctgctcctttggctgtgagtaaacaatatcccatcacatgaaatgcatctttttgcttgtattggaagaatttccacaagaataatccgatcatgatcatgatccataaggataaaacccatatccttttccaattctcttgcataatgtagacgaaatccgaactcattctatgtattcgactctttccccttaacccttgaaggttttggctcaatgcttggctcgtatagctcaatgcttgactgtaattgaggtatgtgtctttttgtagaagcaaagtctctagttgccatagctacacaagaagaaaataaaagagcattaaaatgtatgaaatatttgccttgatgaatcatttaacttctatagataaatataacattcaagatgtagcagtcacatgttttttttttcttttcaaactctatcttctagctagcaattgaaatagtctattgtaactacttcacctaccattgagttgatgaaatagaaaaaaaaaaagtttttatactatatttgagctactgaatctatactttataatggacaactattctaggtgtcagcaaaatgagataagagtagaaaaaaagcaaacatgaaataatttaatgctatagtaaaagaaattggctccttttttcttataacatgtgaggtcatacattatataaaagaattattgaattcctatttatgggcggcggttttacatactttattccgtttgggtaacgaaagtattgaaaatattttgcaataatataatactcacatcatgcaagcacggaaacaaagcatgtgatggtggaaaaagattcaaagatttgtacagtgtgtattaaaaccaacctctatgtagccaagtctttcaggatctaactcttccataatcaaagctgcatattcctctgcttgttcctttaatcttgatagcttatttgcagatgcactcaacattattatctaacatattcaaagaaaatacaaaaaagcataacgataagaaggatttttttcttcaaaaaatgttaagtaaaacatctctattgtatcttgtgtcaccgtcaaatattagattatattaaaacaagttgattattagtcaaaactaattaaacaataacatatttcagcataattgaaaacttagttacagataagaatctaaacgaacatggtttaaactcaaatcaatgacaagaaaattcgtattttggttctttgatatttttaaaatttaaatggagtggttagtatatcagcatttcatgagatttaaggtcaccaaatccccgcctaactttgattataaatttaaaaaatctattttgactaccagtcccagtttatattttattcttaaaccttaacgaaaaaatatgacattaatttatgtttaattaaatagtgacagaattgataacactaattgtgttagttagctagcatttaattacctcttttacttcctcttctgtaattctcccatcttcattcttgtccactctgtaaaaatgattaattatgtaattaattatcttcaatgaaagtcaaaggtttatatttaaaaacaatagttacaaaaattaaaacatacgcatcgtaaggaacaataatttctgcacacatgcatcaaattaaattactagactgtttaattaattaggaagactgatctggaaaaacgctgaaaatatgggatctctttatagtaaaatgactgttagaaacctttctaaaataatcattgattatcagtaaaaatatgattaagagagtaattaaattaaagtaattattaagtttaagtaactttttctgttacgtacatgtcgaagaagatctggagacgagaatcaaaactctcgtcgttgatttgtgaccaatactcataaagctcatcgtgattgattttctctacttttaatcttcttcttctactcaatgcatcgaacagttccaatgcaaattctttcgaatctttcattcctgtcaacaacaacaacaaaaaaaacacaaatcaagatttgagtaaatttcgaaatctctagagtttcttctagagtttttacgaacctatgcattgagcgaaatcggagcgatagatgtaaccatttttttcgaatttttcgaaatttgattgaacatcgttccaaccatcaacgttcttttgcttattgctaatgaatctcaaaccacgaagagctctttgagcactagaccgagtccgatctaactgagcacgttgctttcgcaacgctcgcgcttctaaagccgagttcaccaaaccaccaccagcaccgccgctttgattagcggcggtactagtagtggttaagttacctgagaaagaacgagaccatgagaatcgtttcaactcctgagataactgtttcgctttcgccacagcttcggctttaagctcttgtgagaattgtcggaaccgattagatgaagttcgtttcatcgtcggagatctcgaaatcgaaaccggagtcattattccggtgttgtcgtcggagatatctccgatgacattaatggcggttgctggctcgacgctacgaagaacgattgtgtcatcgtcttgaagatcgattgtgacttcaacgaactcttgatcaccgttaatggagtattcagttcccggtgaagttgatgcacttccgacggcggtttttccggcggaaactgaatcaaatgaccaccgtcgccgatcgttctttgagaacggtttcatagatccaaagtcggaattcaaagagttggttgaaggatatcggaagtatatacacgtagcatagattatatataagtatatgtataggttggtggaatctttgaagaaagagagagagagagggagagatggagaattgaaacgcgtcgttgtggctaagtgggaaaagccatttttcacgcgctgtgaaactctctgctttatagagagaacgttgacggagagagagagatcaacgatgatggagatgattgaaccggactgagaaaaagttgacggaatatacttttttttttttttgagtttttttaacttataatagtaatattattggatttttgccacatttattttaatgcaacgaaaagaaaatcaaaaagtattattggagttgttttttttccttttctcaaaattggaaatgatttttatctgttttttagacaagtgagactttgagagtatctttgttggtcattctagtttatgcatgggaaaatgctatgtttcttcaaatatttttcttatagtagtttgctcttcaataaaaaacaatatcaaaacgatttggacttttaaaaaaattgaacatttgatgtgttaaagattttttttttttttgattagagtaccaatttaatttttcattatatatttttcaatagatatcttattcaaatgcaccataattatatgaggtacaacacgattttgtatatatgtaactgttattagtttaaatttctaatcttatataggcaacttagtatcagattttgtgtccaattttcattagaattaaactcgttattaattagtagctagcaataagcactaaaaacttccaattagctataaataacatgtaaagaatatatgtacatatatatagaaacaactcggatgacgttagttcaagtaataccaaaggaatatttttaaatctgaggtgattgtgtgtgtgactgttgtttctctgcaagtcttctttttttcgtacgtccgacgcgttttatccaaagttgagcttgtttgtgaactgatgagagaaaaaacaaggacgacgactttgaatatagtttttatacatcatttgtggaagccagtgttttattagcgattgatgtattgttgttaagtccacgactacaaatattttgctcacttttgaaaagaatttattgttaacaagaacaaatcaaatttgataacaacattttgttttcagtgcttcactaatatagactaaaaagattttagattagatcgaacatgtttaatcatgggtcgtccatcataatcttgtattgcccgttggacacttttgagtaatgacacgacgttgtttaagaagatagtagatacatttcctcaaaaatatttatattcgagtggggtaaactttatttgtatttgtttagtctattaataataatactcaagaaaaacgttgtggttattagccatattttttttataaaatcttttcttagtcaaaaaaaacttgaaatttttgaaaagtaacggaatagaaatgagatatgaatagttttttccataccttataaaattgtagcttagaattagagatttaaggattgaaagaactaagtaaacttagttttgataaataaccaaaatcaagcatgtaatattatctacctaacgaaattaattataaattaaaaaacagttagggttaatggttcaaaccgaaccattagggttgaaaaaagtttaaccaaatgggttagatgtagactacgtcactacggttcggttgtttggtttggttcggttctgtttggtacgattaaaatgcccatcattctacatctctcggaaatttgtatggttttggttcggcatctaattcagttatcagaaaataataaccaaactcgaatgtgaaccatttctattttaaggggttgagtgttttcattttaatatataaagatttcaattcaatgttatgttgtgcaaacagttgtagtagtaaatacacaagttataaaacaaaacaaaaactccaagtatgaaagtgaaatgtgaaaagatttgattttcaaacgtaactaatctcatttttaaaaaacatatacgtttttcacgttatacctaattttggcatcaatttcaatttgacgaaatatattcactaaaaagtaggaaaagttcgtttaacattttatatgaatgaacaaaagtcagatgtttttgaacaaactcgtatttcatagaaaaacgtgtgtattagtgtacacatatatatatgtacacacatgcacacataactgggtataacatatataatacaattctgcaactatcttcactatcttctgcaacttttatagttttcgaacgaaagtaacttctcccataagttattcttgaagaatagaaatgtcaaatgtgatatgaatattctaccaacccaagttacaaaaaccaatcatttttctatttgtgtatatatagatttgaattttactgtaagaaactatttagaatatagaacattgtttcataaatctaaagaaagttaacccactgcttgacttttcaagttttaaaatttgacgtatcgtttgcggtttgcttttcatgactgttaattatatagtacgtaatcactaatcagttcatttatccgatccattgattaccaaacgatttggaaatatgatggattaactttaagtttagaaagtagtggcctagtggtaatttttttatgatatagcaaattcgttttcttcttgattaggttcgatttttattaggattctttgtcaaaatagtttcatagtttagattcattagaaaatatgataagtgttactactcgacgactacacacatcttaaatatatgtaggatgattaaaacttgaagcataccgtaccgaacagtaaagaaaagtcttaacttttggtttgttcgttttcttcttctttggttttcctacacataaaaatctgatatcttgccgataattatatattagttagattttggttattcactcaagttaatgaaaatttatcatatatgggaaatattcaaagtcaagcggataaaaacaattacgaataattgtctagtatttcatagtttacttttgtcaccaagtccatagaccatagtataaattcgttgaactaatagtaataatttttgacgttcatgcatgtatagtacacaaaaacttttgggcttctagaagaaaaataacgcgattgaggcccaatatagtgcgtgaaatgggcccaccatatatcttccaagtcaatgaaacaaccacttcttgtacatgggagagaaactatgtcatctatgaaattatttattgtagttacttagttgactttgaattgtcatgttctctttaccatcctaactccttcattagagtgaaaatacaacaattgtccctttaagacaaccatttttctttggttgttaactaacattctcaaactctagtagtgatatacaaacaagatttttttgtagtaactttacatcaacaaaaattatcctaatttcacagcaaaatatagaaaaataaataaagcaataaatggaattaagttagaacaaaattattattaatgatttatcatgtgttcaaagtgttttcattaggtataaggttttaaatatcatttttttctttaaatagattagaattgtttatctcgtgtactatttgataggagaatacattttaaaagaaaaaaggttggtaaaatttggttgattaaatttatgttggctatagaactcatatattaatctccgctgttcctttgcgaaaaactcaaaagtaaccaattaaacaaacaataaatttaacaaatcttttgaaaagtatataataatagaacacttgagaaacacaaactaaccgatcgtgatcggtgtgacaccacatacataaacgattaagtaagtttgaattagaaccgacttcatgatggctttccaaatttaatatattatcttaggttataataattattttcatatacaaccacattagtacattacacatgtgtggtacgtgcattttacgtcctcaacaaacacaaaaattttcttgtttgttatgcctagcaattaacttcgaagcagacggtcagggcatttagcagcagccaaagagcagagaagaagcggattggggtcgagagttcgaacctttcccacccaaaatatacaaacgacactcaagttgagaattttatcattgacctcgtagaattaaaaatctttaaacacaacagaccttaaaaagaactgtgtggctacaactacaactgaaaaaaaaaaatgttacaacattgaaggcaatacaatatatatagtcttctgcacctaaacactgtccacatagagaagaacttaccttacaccgtgacaccattcgtatttacagacgactcctacgacgccgttatgtccccttgtaaaaccaaaccggtttcttttgagtaatcaagattggtttatatggatccaccactcttattttcaaccggttcatggaaatttccgagctttctgaggatatgtggatgacttttggagtgttctcgttggtggtggaggcggcaacatcatacgggagtgattcttgaacttgcttgaagatgaatgttttctatctgattctattggggatgatgagctcgggaatgatctcttcttgttctccattgttgatagtttcagtctctttgaaggcttaggatgatgatgatgatggtggtgattatgctctgctgctgaatcttttctcacgtggttcttgttattgttgttgttgcttgagttaagatctatggatgaaaccgttgtcctgtgcctttccagaggcttttcgattagtttggatttgcgggctttcatggatttctgagagagcttctttggccatctgaggattccgtttgggttgtcgtggtttgcggactggactgcaatgtcacagagcgttcgtgcagcttctaaaagctgtggacatgaaagagctgtacacaacatatcatcatcatcagaagaggattttcaataaaatttgaggcaaagagatattcagtaatagtatttgtgaaaacataccatcatcttcaacatctggggatccctctggttctgcatttgatgagagataaattgctgttatatagttttcgttaggagtagtataaagagggtaacggatccttacctttgggaacaaagaaagaattttgaagggtagaaacagatgcttctgcgcactggcatgaaatggtgttagcgaattttgtttgagaggtcttaactccagtaatagtctgtttcagtagtggagggactaagttttggttgaaagtgagtgattccagatttgcgaaattatcggttataccctctggagaactcatagaagtgtcggctattcttagccatcgtccttgacaaagtgtcttgcaggtcacaagctttgctgcttctgagttggttctagagctcccattaaagggctgcgaccaagggaaatgaggcaatccactatgaggaggtttagctgaacgctgctggtccaaattgttcttagagttatgagaaggttttgatgcatcttggagcagagagtctaaatctttcgacggaggaaggcctaatcttttcaatacatcgccagcgtcgcataatggaaaactaagtggagtggaaggaatttcagagttgatgcaatgatcctgagaagtcaatgagtgtatcaattttcagttaaagcaacaaacctatttaaagtcatgtatacttgcttacaggtcaaatcagaatatatatatatgaaacttctaaatgttagattaagaaatctaccttggacgatgacgatagatctccatccagggcatttactttatcgatgttttcactatttggtagtgtagcagagatagagctaggcggtgaacccagagttctgctgagacaagtgtctaattcagtagagctttgtgattgaacaggcctctttgttggtagaatggaccaaacatttttgactacactcaataaagtgttgttagtattctccgatttcttcatcttgtctttgcccaaagaaggacactcataagagccttcaagaagacttttcaatgaaaaatcttcaacgagtttggtaacatcatttattgcaggcttcaggccataggcacctgcatgtaaggtaaggaaaattaagaggtaaacacaacactagaaaaagatcagaccatttcacgtgaggagaatatactgacgagaccttgtcatgtcaacaaggtcgcattttaatgagatagtagtgaaatgcactggtgctataactcttacattgtccctttggtaccttagcgatgcaaagaatatgtcagccaatgaaaccttttcaatgtgatgtcagggaggattcaaaataaactaaaaatcataacaagtgaccgaggggacctctaaagctacctcagaacagatttcacttgtaaatcacttcaaagttcagacgaagcaatctatagaactgaaagtataaaagaaaatataataactagccaaagtaaatcgaccaggttgaggagtcaactgttgaattagagtacactattggataccacaggacaaggctaattcagaagcaatcacataccgaaaaatgcattctcgccagtcgctgaattgatggttgataaagttctcaccggaactttggaaatcctcttatcacctcgcttgccgttataactgctccgttgcttcaccacaaacggtttatctgtttagcattcaacagaaggtaataagtaacctcacaaggcaaaatgatacacaggcactttttcagagtgtgaaacattaaactttcaccaacatattacatattcttttaaaatatatgctactgactaaatgaatgcataatttcagacaaagaaatcacatgagagttacctaagcaactagtagatccttgtccacatatctccttggtgtcgttatctctctgtgtcctcaccgtttcatctaaaaggatcaatttcgtccttctcggagtgccattaccactactacttctagaaagttttcctcttttcctaggagactccgcactttctggactagcaatcggtgaataaccattttgaggctcagatgaattgtcaacccgaagtttagtaagcctatcatgtacaaagtcatgtgaatgcattaacttgcgccataacgatgaatcagacgctccactgctacttcctgctcctaaatcaagaacaagactaaatcaaaacccatccaaccaaacttgaaaaagtttgcaaatttaccaagaacaaaaacacaaatttggatctacaactataaactgtactcagtgtaaagaagaataatttcaaaatccccaaatgaaatttgaagtcaaagtgaagagaaattagctaacctttcttgttgattgaagcactactacaacgctcaattgaagaattaacaccaatcgagacacgagccttgtcacagttgttatctgctttattcgacgaaaccctaactccaccaccacacccttcagatcccataagcttagccggcaacgaaacatccacaggacaagaaatcttcaaaccatccatcacaaacccaaatcgaaaacatcgcagccgtgtaagctgcgatacgaactcatcatctccttttaaaccaaaacccagatagttcgatcgagctttagagaaagctaaatcttagaaatttctggagaatagtgagctacaagagtgagattgatttggtttttttttcctcgatgaagaaacgcaatggtgcggctgcgtgaatcgagggattttaatctagggcaagaaaatgaaagaggagaaaaaaaagatgagtatttatagttttcgggaaattaactttggccttgttttagataagccgtcgacggtgagattgttccggtgagctcgtctgtactggtaactctgacgtggctactacattattgcgaaacggagtgatttagaaccgttggatgttgactgatgacggggtttttatgatcttgttggttaatagagtgacacgtattcaagtgaagatttcacttggttcatgtggtttgatatgagtttccaaatatgccactggtggattctcaggtgtttgcttggagcggagggtgtttttgattttgacgaaattatcccttatctgaatgttaacgccgttagattgtgttggttccgttaacagatttttgatttaactatttcggttcaaggtcttcttgaacaagtcaatgaagttacattgacaaaaaagaataaaacatgaactttacaatattgaagggattgcttttgtatttaaagttagtttttacaggtagtgattgtttggatatgtgctctatttcttttgtttatttgtgttcgtttttgttgagattatggttgtgtaagcgtggtttagtatttgtttaaaactattgaggcaatctaatgttgggtcctcttggaagatcatctttgtaatctttctcaatacatcaaactgttttgtcaaagagttttcggctatgttgcttttgaatgtggtatttatatattccgtgtgctttaaggttcttctttctttatatccgctttttaatttttggttttagagtttttatgtatccgccagttttatttttagaaaaaaatttttttttattaaatataactatacatatcatagataaatcatttagacgagaaaaattaaaaagacgttaattttatgtacccgtcaattttatttttggaaaaaacaaattttcttattaaatataactatacctatcatggatgaatcatttagacgagaaaaattaaaaagacgtttaattttaaaagcataattagtttcagatcattttaaattatggaaatttaatagtaaagtttcttaaaaataatatgtattactcaaaataataaattttctaaaaactttctttatctaaaaaacatgtcttaccaacagttgatcctaaaccaaaacaattatgaatctaaacacttagaagtttttttgttaacaaaatggaataaaataacaataatccagttttgtcttaaacgtataaagccttattgttttatattggattagcaattgggcctgaaagaagaaaaacaatcatatgggccaataggacttggatctatattgcttcaacttattacaatattcatgcatgtgtggaatttggctatgtcatgtggatggataagcgttggcagagtcttcgttacgttttcataaattatctaaacaacttaattacacaatattctcaggtattggcaagaagaaaaaaagaagaagaagagaaaaatcataatataaatatacttctggacacgttgaagagacatatttgatgactagtctaagcaagattccacaaaaatgaagcatcgattttgatcaaattattcggacttcaaaatatgaaaatagtatagaaatattttctttatgtaatattcaagccgcattttgacaaaaataattaataaaaaaaatgtaagagtatccccatctttagtttttaaaataatagaaaaaataaatttggtcaaaagacaaagccgtcccttccggttcacacgagccgcacgtgtgctttccttttttctccttccccgttctctagccgattctctctgtctagggctcctccgtcttcttcttctcataccttcacataccacaaaacctctcttctctctctattgattctctacgaagaggaaagtgattttgaaccatcttgatcggaaacggcgtttcgaaactggaggtcgaagacgaaaaaaactcttatctcatcgctccggtgtaccgaattcgagaggtttttgttaggtttcgtagtgattgattgattttgatggaagatagtgtggtggatgatgttataaagaggttactaggagcgaaaaacgggaagacgacgaagcaggttcagttgacggaggctgagattaaacatctttgttctaccgctaagcagatctttctcactcaacctaatcttcttgaactcgaggctcctattaagatttgtggtattcattcatcaattttgttctctcctcttcaaattttcttttctacgaggatttgcgtagattatgtttgattatccatagaactagagattgattagctaaccagagttgtttaaatttagataaattcgtatgaatgatatttgtagaattgcatatgaatctgttgtttacttgatcagttatcattagtgagatactaaaagaagttagaaatgatcatttgtctccatatcagagattcagagctgatagtgtattgttctgtgcatcttgtgtatcattttgatgtataatggtatcagaaagttgctaatgtgtttactaatacataagtttgttctgcttcattttatagcaaccagtagtagcatatgcttgtgtggcttgtgtttctagtgaaatagcacttctataatgggggttggtttcatgtttttaataggagatactcatggtcagttctcagatcttttgagattgttcgagtatggtggctacccaccagctgcaaactatttgtttcttggggattatgtagatcgtggaaagcagagtgtagagaccatatgccttcttcttgcctacaagatcaaatacaaagagaatttctttcttctacgtgggaaccatgagtgtgcttctataaaccgtatatacggattctatgacgagtgcaagaagagatatagcgttcgagtgtggaagatatttactgactgctttaattgtctacctgttgctgctcttattgatgaaaagatcctctgtatgcatggtgggctatcgcctgagttgaagcacttggatgagatcaggaacattcctcgtcctgctgacattcctgatcatggactactgtgtgatctgttgtggtctgatcctgacaaagacattgaaggatggggagagaatgacaggggtgtctcgtacacttttggggctgataaagtcgaggagtttcttcaaacgcatgaccttgacttaatttgtagagctcatcaggtaatattttgctttagacatgtatctgtggtacgtctcttttgtttacttgtcatcataggacctacaaataatggacgaatacttatgatttatctcttttaacctcattgaagttgattgttttgccctttaggttgtggaagacgggtatgaattctttgcaaatagacagctagtaacgatattctcggccccaaactactgcggagagtttgataacgcaggagcaatgatgagtgtggatgattccttgacgtgctcatttcagatccttaaagcatctgagaagaaaggaaacttcgggtttggcaaaaatgcaggaaggcgaggaaccccgcctcgcaaggtgagaatctttaaagcatcgaatgatacagttacatactgagttctattagggcaggccttcttagtcatctcattgttttgttttctcttttagggtggtggaaaaggctgaagacaaatcccataaactctgttttgtgtattccatgtttcttggttcaagacacttgcttgatcagctgaacttatcaaactgtcttcttcttcttcttcctctgctctggatcactttggcaaggggtacttctgtcttttcccttgactactctggatcacttggtgtctttgacctctgtgaatctgagatattattctctgtgagatacactttatgtcgttttttgttaaaacatttaaatgaaaatcataatgttcctcgtcacttggaaaaaaacggcacggtgtttcgtttggaaacttaacaatgaatgataggttaatgattcacaaaactgatgtagtggctgttccatttgagttttacttcttcttcacgcttacaagcttagacgacttatgatttcctactacatacttgttttgccattgattcttaagaaacagagaactctaagctaggtcagtttctacaagatccattgatacttgtttagactctcgtaatatcccctgcattaaaaacccaagttctctatatagactatacacacacacacatgtcagaagaaataaacggaaaagttaaaaagatgatagctcgacgattcgcaatagtacgttactttcgttcaaggatgaatccaaagatgactatacaaaaactttgcacatcgtctaaaacagcagatctttctctccgaaagatggatccgaaccgaagaacgcaaaaattcagcaaaccacaagtcattgcaagtccctctctgcgagaagcaatgaagaagcgaaacgacgatttggtccttacgggtaaagtaatagcttcagaagctagctaacttcatcttctctccggcatcaatcaactccgccaacacaatgatggggtctcatcaaagaccttcttcctcctgaatggctgaatccgtaaacagtgaaacaattgaggtttatggaaacgcattgtatttcaaaggagcttgggctgaaccattcgataagtggtatacagaaaagaaagagttccacctactcgatggtgcgtcagtgtttgtgacatttgtgagaagcaaatgggaccaataagttgggggttacaatggttccaaggtcctcaggcttccataccgacaaagcgatgatgatatcaatcgtgaatactcaaaatgtatttctatctgcccgacaagaaatatggattggatatgagatagaatttggatataagtaaagaattaacaacaacaaaatctataaatattaaaatattcttaaattaagagatgctatatcagaaactaatattatattttagttaaaatctatttaaattttaaagtaaactatatattggatacaatataaggtggtgctaaagtcaatattaattaattttaagtttttaccaaaaacataacacataatcattgtaatatctattatgaatattgaataatcatactctagaaacttcacttaaattttatttataattaaataacaaaattcctatatataaaagataagatatttaaattaaaatttcattataaagcctgaaggatcctaatcatgattatcataaaagtgtatatatgattaaaaaagtttagttctcctaacagatatcagattattatatggtatgtatatacttttttttttcccctaattcgaagatgcaccaagttctatcttaattagatactaggcatcttatattttatatatatatttgtgtgctcagaacaaaaattaaaaggaagaaccaaaaacttagcacatcagaaatcgcagagcccttctctagcactcaacacgaagaaaaagcaaaagatggattctttgcaagaacttcttgacaagaagcaatacgacgaagaagcaaaacgtccatgtcaagaagcgatgaagaagcaaaacgacgttgctcttttccttgcgggggaagtaatctctgccgcagacaaaaactctaacgtcgtcttctctcctgcatctatcaactccgttctcaccatggccgctgctacctccgacagtgaagcactaaaatcttgcatcctctccttccttaggtcttcttccaccgacgagctcaacgacatcttccgcgaaatagcttccgtcgtcctcgtcgacggaagcaaaacaggtggccccaaaatcacggtggttaatggagtgtggagagagcaatcacttccgtgtagtcccgagtcgaaagatctctttgagaatttctacaagtctgctttcgctcaagttgatttccgatccaaggtcagtttctgatttcgaatttgctttgattaaattagggcaagagattgtgtgaaacgagtgcttagagaaactacatatcgtattcaatgttttggtttgttgttttgaagtttgaagaagtgcgtgaggaggtgaattcttgggcattacgtcacaccaatggtatcatcaaagatcttctacctcctggatccgttacaagcgaaaccttgtggatttatggaaacgcattgtacttcaaaggagcctgggaagacaaattctataagtcaatgacgaaacacaaacctttctaccttgtcaatggcaaacaagtacatgtgccattcatgcaaagctcacaaagtcaatatgttaaggcttacgatggtttcaaggtccttagacaaccataccgacaaggcgttaatgatacaagtcgccaattctcaatgtgtacctatctcccggacgagaaagatggattggataatcttgtggagaaaatgacatctactgatggattcttggacagtcacattccgagttggagagttgaagttggtgaattcagaattccaaagtttaagattgaattcggttttgaagcttcaagcgttttcaatgactttgcgcttgatgtatcattataccaaaaagctatgattgagattgatgaagaaggtactgaagctgcggctgctactgctctagttggtgcttgtggctgcagcctttataggcctcctcctcccatagattttgtggcagatcatccattttttttctttattagagaagacaaaaccggaactgttttgttcgctggtcaaatcttcgatccttccttatcttcttctgcttaagatcggcctaaataggagtttgggattttaagatttggtttttcatatgatttttgagttttgtttttggttttgctaaatctctatttgctttatcttattatataaagtattaaagttagtaactcaccacagtgttaattttaacggtctcagattttcaacatgtgaaacaaaaaactcatttatttattttaaaagaggaaatttatttatttaaaaaaattaaagaagattcttttttttggtgaagaaaaattaaagaagataattataagaaaactataaatatcttattaaataaaaataaaaaatattttataattctaattaatagctactaattcttgaaaacatgcaaagggaaatttactaattcttaaaaaaaggaaattttcctttaatttattccaaaaaagtatttctaaaaagtcaagagattgaaaatatgaaaactatatctcttattaaataaaaataaaaatggataaataaaaattttaaaaaggattttaaaagttatataatgttcatataaaataatataactaagaaaaatttacattcaattattaattctaaaaggaaaagaattgtgaatctcaccaaatcaccagttatttattattttaaaacaaataatcgaacaaatcaacccaatatcctaaaactttcctcaaatctctcaaaaacttcaaataaacaaattccacaaaatattctaaatttcttgttccaactggaaaaattaagaagaattttaactattttttgttttgggatttatctttatacaataaaaaataattacatttatttcaacgtaaatttacttttgttgactctttttagttttacctacctatttgaaaaaaaaaaaaagaagaagaaatattaactcttttttccagtgagtgtattgaaatatgaagtttatctaaattaaacctttccggattccatcattcaactaattaataaagaaatctacattttaataataatttgaaatttcctaaaatatcatcaatatgttcaatacaaaaagcacatccaccccttaactggtttacatcatgtaaattacatgtctgagtcctctatcttttctcttccgttatagtcttatagatcaaaaatggatgtaagagaagctatgaagaaccaaacccacgttgccatgatcctttccgggcacgtcttatcttccgcgcccaaagactctaacgtcatcttctcaccggcgtcaataaactctgcgatcacgatgcacgccgctggtcccggaggtgatttagtctccggccaaatcctctccttcctaagatcatcttcaattgatgagctcaaaaccgtgttccgagaactagcctccgtcgtctatgccgacagaagcgccaccggcggcccaaagataacggcggcgaatggcctttggattgataaatcacttccgactgatcccaagttcaaggacctcttcgagaacttctttaaggctgtttatgttccagtagatttccgatcagaggtaaactttcacttcaatatctcttttatatcagaaaaaaaaaatctagggtttggcagaaaggcagaaatatataaaataactagggtttcaattgagaacatacacaccgagtcatatagtgaacccaatagttcttgtttcgtattgcttcaaaacctctatttgatttcaatgatgagaatgtcttcaagttcaaaattagacaaaattgcttttgacaaattaatttgtatctagaaaagtatttttaaatattgacaaaaaaatgaaattgctgatattgttttggtgatgaatgaattattttttaaataggctgaagaagtgcgtaaggaggtgaattcatgggttgaacatcacaccaataatctgatcaaggatcttcttcctgatggatccgtgacaagcctaaccaacaagatttacgcaaacgcattgtctttcaagggagcttggaaaagaccatttgaaaagtactatacaagagataatgacttctaccttgtcaatggcacatcagtctctgtgccattcatgtccagctatgagaaccaatacgtaagagcttatgacggtttcaaggtcctcaggcttccttaccaacgaggcagtgatgataccaatcgtaaattctcaatgtatttctatctcccagacaagaaagatggattggatgatctcttggagaaaatggcatctacacctggattcttggatagtcacattccgacatatagagatgaacttgagaaatttagaattccaaagtttaagatcgaattcggtttttctgttacaagcgttttggatcgattgggattgcgttcaatgtcaatgtaccataaagcttgtgtcgagattgatgaagaaggtgctgaagctgcggctgctactgctgatggagattgtggttgttctcttgattttgtggagcctcctaagaagatagattttgtggccgatcatccatttcttttcttgattcgagaagaaaaaactggaaccgttttgttcgttggtcagatctttgatccttcgggaccttgttcgggatctaattcggactcagatgactattaacccgtttatggtttggtggaatggaagataagtctacttacgtttggttaatgtctttttggcaaaatccacatgttctgtataactttatttcagttgaaaccgagatttcaaattggttctagctagtgaagatcctttccattccattcggttcgtttggtttgattctttcgattataattcaagttcatgataaatgttttgtattttttgttgttgattaatgtttctactagtactattctatgttcttaaaagtgaatcgtaaactgaatcaaattgtctattacatctggatatttttttacaattgacctgcgtttactgtttgaatattttaaaataattatacatacaaaatcatgttcataattattaacttactaatttgtttaaaattcacatttatatagtttgcatggcgttggtatgaatctatgagacaaaacagtcttaccattaccatttctgaacggagagatctttgtgttgcttgcttttcacgaaaactatttccttatgttttctatatttttactacgaaagaaaaaaaacaaagtagcgtcaatattttattattgtttaagcagttgcatactagcctcaattttgaagctttcaaagagtagcgtcattgttaagtttatacttttactacaaagatacacgtgagtgatgagtcatcattatcattgtcacggaagttgcatatctctcttatcgctttcgctgcaagtcaaagtcagaaatggaggatgaaggagctatgaagaagcaaaacgaagtcgcgatgattctttcgtggcatctcttctctactgtagccaaacactctaacaacgttttctcaccggcgtcaataaccgcagtgttcaccatgatggcctctggccccggcagttctttgatctccgatcaaatcctctccttcctcggatcttcttctatcgatgagctcaactccgtcttccgcgtcattactactgtcttcgctgacggtagtaatataggcggcccaacgatcaaagtggcaaatggcgcttggatcgatcaatctttctcgattgattcgtcttccaagaatctctttgagaattttttcaaagctgattaggcttcactcttcagtggatttcaaaccaaatgtactaatactctgtttgctctgtttttgacaaatttgaaatagtctagtatcttttatttattggaaaaaatggttttagcttttggttttggtgatgaatgtttttattttatatttaaggctgaagaagtgcctatcaatgtgaactcgtgggcttcacgtcacactaatggtcttataaaagatcttcttcctcatggatccgttacaagcgaaacaatttggatttatggaaccgcatgtacttcaagggagcttgggaagaaaaattccacaaatcaatgacgaaagaccgagactttcaccttatcaatgggacatcagtttctgtgtctctcatgagcagctataaggaccaatacatagaggcttatgatggtttcaaggtcctaaagctcccatttcgacaaggtaatgataccagtcgaaacttctctatgcatttctatctccctgatgagaaagatggtttggataatcttgtggagaaaatggcatcaagtgttggtttcttggatagtcatattccgagtcaaaaagttaaagttggtgaattcggaatcccaaagtttaagatcgaattcggattctcggcttcaagggctttcaatagattgggattggatgaaatggctttgtaccaaaaagcttgtgttgagattgatgaagaaggtgctgaagctattgccgcaactgctgttgttggaggctttggatgtgcttttgttaagaggatagattttgttgctgatcatccatttcttttcatgattagagaagacaaaaccggaacagttttgttcgttggtcagatctttgatccttcttattcttcttaggccccggagaggtctggtttaacaagacttacgtgtcggtttagtttgtctagcacttattagttttgagttgagaacttgagatcatgttgtagttggaataaaaaccgagattggtttgagtcttaggtggtttctggctgtaaattgggttataaaagagcttatccgactttaatcccatgtagattccgttatcactattttttttcgttgttgagtttttgttgaagtatttcattcagtcatgatcactgtatatttcccctcttacatgtttcatggtctgatgtttttgtaatttaagtcaaagcacaaatattattttgaatcagccagagaatttgtggttagaccggcaactgtaactgtcagaggaagcaaaaaaaaacttttgatattcacaaaaggacctaaacaatattaattataatattggtccagtgaatgactaaacgtgatcgttcacctaaaactaaacaaacactaacagaaggagacaattagacaaatcaaaagcaaacaaaaatcatctcaataaacataaagcatctatgatctcagatttgttatatacatttatctcttttcggagatgcatggcggtcaatggagtgattaaactatatttagttaagtatgcaccactaaataacatttaatgtatggatcagaaactctggttaaggagataaagttgcctaaggagaggactaaaagtctttatgtctccaaaggatgattgtgaacactttcgtaggtcgttacctagatagatgtttacctacatattcatctgatcatcagcagaagttatgcttgtccattcatgttttgtagttgtttccctttgagtaaaagagcttgataatgaaaacgacatgataacgtcaaattaatgagtggtaaacatatttagaaagcttgcaatttagaaataaagatataataatcataaaattgcataaactaagggaaaaaaaaaaaaaaaaaactgtttcaagtgttacaatgagagatgagattgtccatgtgatttgggaaagtctggagggcatcaatacgacggtttccaagaccattatattgtgcctaaattcgcaatccgtaactcctttaaattctaccgttatgaagttatttctcttgggatcataatatttaatataaaacgaattaagaaacgtagatggtagataaataaactcaccagcatcagagataccacttaattggaatttcactttcaaaaccaaattagtgtgactgaaaggtaccagaaaaggtttatccgaccacttgtgtttctgtgcatcctccaaaccccaaaatgtaataccatttttcacgtaatcattatgaactaaggttaatcatttcattttaaagtagatagtatatatgcggaataatatgtgtaaaacagatttgatgtattaaatcgttcatattttgcgaggacataatcttggtcagatactcagatcaaacatgctattgctttaatcaaacaaagggctttggcaacccataaaaaaaaagcttttgagatccataatatgaccccaaacattttctaaattcaaaactggtccagtaaatgcctaaatgtgatcgtgttttttgttcttttttaaatagaagaaggttcggggtcaaatctcgtaatccactcaaacccgaaatcacaacatttattattagttttgttccaagcatcattcaaaccaacaacttctaacctttgcttaaaacctttttaccagagctaactacacttggtttaaatgtgatcgttcacctaaaaaaaaaacaaataatccacgagagagggacaattagacgaatcaaattaaagcaaacatagatcaatgtctcaataaacctaaagcatgtatgttatgagatttattctatacatttgtctctttggagattgagggtcaatggagagattaaagcataattaatgtattacaccactaattaacattcaataattacagatcagaaactcttgagaggaactgaagttgcctaaggagagggctaagagtctccatgagcttctcacaaggatgattatgaacaccttcgtaggttgttacgacaacgtttggatcttttgccagtctttgcacttgtttcttcacgttgcatgtgtggtatgtacatctataatagctcctgcaaatattattttgtataaaaatgtgaatagtaaattaatccatataggtgatgtatgtgtgttatcgatgttaagttttttggtatagatcttatggaacaaagttcatattaatcacgacttcacgaggtataattggtaataatttcagataatagagattgtaatttaaggtattgattaagtaagtacatgcattttgaaaatttacaactaattttttaagtaaaatttgggtttattagtttggttctacgaaaacatcatccaatgtaaactatatatacatatgggctggacgaacagcaacaaccaaaccatattcgtttcattatcacctatggattcatcgatatatgatttattcgactaaaaccaaaccaaaatatgttgtcatagcaacaacagtcaagcgagcaagatttcatctgttatcgtttcctagcaacaacgaaataaaaggcccaaattgttctttttaggttgtaaatgtgatatattgatcaaaatttgggggtacatcaatgttacttaaaaacacaatatttttggttatatataccaattatattttggattatataagtcagggattggtttggataaaccacaaaatgaacacccccaattccaagaaacaagcaataatgtaatgcaaccggactaataacctaaattgatgactttggtcgtttaggttgttaaactaatgtttccaaaatatacacgtgaccaaggatgtgtgtgtatgttatagatatgcttaggtcaatttcgatatctactttaacgttgtcatatatatttttaaacacactagtaaatgtatgggacgcaataaaataaaattaaaagaacctgggatgagcattgttcttgacagatttctgaccgtactttcgccaacgataaccatcatcaagaacatcatcatcactccttgtatgaaaagctatcctctgcattgccaaagttctcttcccttttcctttgttgcaattcttattatgatcactattattgctattattactcactaatcctcccatctctcctccacctcctcgaaagttctccagctgagcagatagatgataacctgctggagtacaagaagaagaagatggacctacatcgcccgaaaagattaacgaaggagccatcatcattaatgttttgtcatctaaggaagaaaaaggattgttgttttcgccttcttctagggttaacataggatttgtgttgtcaaccccttccattgattatgaagctttcactatcttgctagatctctctctctctctcttactatatatatgtgtgtgtttatgtaaatatatgtttgcataagaggaagaaggagaagaggagaagaaaggttataaggatatttgtaggaaagaaagaagaagaatgagttaaagggtataatattgaagccaactatattcacctaacttttctgttcaactgcctaagtctttcctccttttcctagctatatatctctttacaacgtttttggatctatatattatatagaatcatatattaatatatatccaaaaatgcatgtacatgtcaaatgtacttcaacccatattttgaaatctaaatagtaaatattaatctttaaaaaaacaaaaattgacatcgatggtatatatattgagtggtcttatacattttgagaatagtttgtagaataaattgattagcttatttaaatttatatatttcggcaccaattcgtaatatgtattgatgtttttagaatatgtaaattgtaacgattgttttaacttcatgtggaaaaactactcacatgtttcatataaaccgatcaaaatctagttatatttatggtcaaagttcttgttgatgttttcccatgacaaagggaatgttcggtaaaggcttaacttgcttataaatttacatgtaacaagtagtaattaatttgcttttatttgcatttcaaacgtgtggttaaatatagtgtaccaactccatacacacactcgtgagcctgaaatgcacgtctggtcggtttgagaactagctaaaatttagagattgttttagatcactaaatttatatcatccttgtcgttgtttatagatatttatatgcacaataatggattaataatattcacattttgtcaaaaaaaaatataaaaaaaaataatttatataacgaattaatacgataagatttttttttctcgataccataagaattctgcgtatttgttccattgtccaatgatatttccaccacgtaatatggactatatatagtggttaatttgaacatatcattgatcttttaactctaagtatgagacatttatatgattaaagtgggatatttttatgaatttcgcatcccccttcatttcgttttcgcaaagtttcattttgaaatttcgttcgtccaaccatacatcccctactaagttatactaccgataatgaaacttatagaaatcatgaagtcgcgtaaaatgttgggcattaaatacggataaatggacttaagcaaattattgtggttgtggttgttaagaatctctttgaccgctcgaataattatacatccaaatgtaattaacctatgcaaactcatgcatgcacgtggaagcttctcattctcataaaccataaaattatgtacaaatgtaaatcaaatgttagtggatccattttcttaaaatatattttttcttttataatttttatttagttgatgttttaagagaatacacacttaataaattatttaatttttgtttactttaaactaaaatatcatttattatttaataaaccaatagaaaaattatctgtggaataaaaatcatcaaaaccaatgaaaatataataaattttgcattaaaattttaaaatatcatatatttaaaaacaaaaataaaagcttagaacatcacttataaaaaacaaagagagtatataaaattgaactttccgattcaacttattgtgtaaattaaatatctacaaaaatcaattgattaccacattgaaatatagttattgatagcttaaaactatacaaccgcaaaacaattacaattttggcttgtagttaggctaaatttttggcttatatataaaattaaaaaataaaataaaatatatgacacaattagttccacatgagaaaaaaaatcatgaactgcatgccggtttcttataaacaaaacggaagacagtgcaaatctcaaatcccgaaacttgacgcgcgcctctctgtctctctcaatcaaattcaaatcaaaatttcaaaaaagcggaatcggaaaaaaaatctcaaaatggaggaaagttcaggactatcatcgatgaagttcttctccgatcaacacctctcttacgctgacattcttcttcctcacgaagtaagtttcgcttccaattttgaatttatcgaatcactagtcttcttcactgtcgaatctcgtagttctgactgaaatcgaagctcgttgttacaggctcgtgctagaatcgaagtttctgttctcaatctcctccgaattttgaactccccagatccagctatctccgatctctctctggtactacttaatctcgtgcttaagtccgtttcttagatcgcgttatagctttctcgaattcgtgattttctgggtttttgaagacaattgaaatgtatcgtttgaacagatcaataggaagagaagcaatagttgtataaacaaagggatactcacagatgtttcatatatattcctctctacttcgtttactaagagttcattgacgaatgctaaaacagctaaagcttttgttcgtggtaattgctcaatgtctctctctgtgatcttcacccaaatctttgattagaatggtatgagaaaatggttgtgattttattgaaacagtgtggaaagttatggaaatatgctttcagattctgcttcaagagaaacgagtcacacaaagagagctcttctataagttgctttgtgattcacctgattacttttcatctcagattgaagttaacagaagtgtccaaggtcaatctaaagcttaattgcatttggattaaagagtttttgagctgattttttggtcgtgctttggtttagcagatgtggtagcacttctacgttgtagtagatacagtcttggtattatggcttcaagcagaggccttgttgctggaaggttatttctacaagtgagttattacttgcttctagcaatccttatgtagctaacattgtgatctctgaccatttctttactttacactcaggaaccaggtaaggaagctgtagattgttcggcctgtggttcttcaggttttgctataactggagacttgaatttgctagacaataccatcatgagaactgatgctcgttatatcattattgtggaaaaggtagcttcttgatgtaatcaagcacatatgagagatgtcgtaattgtctgtaactcactcctagaatctgtttttagcatgcgatctttcatcggctcgtggaagatcgtgtgttcaatcacattccttgcgtgttcatcacagcgaaagggtatccggatattgccacaaggtcaattcttcaactcagttacaaaaccatattgcaatgtagtcagtggtattaagtagcttggaagttaaatcttttaggtttttcctccaccggatgagcacaacttttcctgatctgccaattcttgttctagttgattggtaagcataaataaacatcttcctctttgttaacataaaactttagtgctcatatgttcataaatgagaggtcaggaatccagctgggttagctatactatgcaccttcaagtttggaagcatagggatgggacttgaagcatacagatacggtaaagacttagctgtttgcaccaaataatctccaagtctctacaatgataatttctgcatcctctttagcttgcaatgtgaagtggattggtctccgaggagatgatctgaatctgataccagaagagtctttggttcccttaaagccaaaagattcacagattgctaagagcttattgtcctccaaaatattgcaggtaaccaactatacattatacattataagcagagatcagatgtaatggtcaagccgaagcaattctaagattcgaatctataatctatcatttataccctaattgattttgacatttgcttctgaccaggaaaactacatagaggagttgtcactgatggttcaaactggtaaaagagcggaaattgaagctctctattgtcatggttataattatctcggtaaatatatagctaccaagatcgtgcaaggcaaatacatataacacttaaaacaccaacatgtaaggtcttccaccaataaagatgcgtttgctttatattggttccaaatataagagagtaacttattagggtgaagttttatgcaaactctaatagaatgtaaaaatagattacaatcaaatcaaaattttccaaactgaagtatgatctttgtttacatatggcattgtgatgatttagtaacaaaacttgtcctaatctccactttcctatgcaggtataatgataattccaaccaaaaattctcgctcacttcttgcttgatacaagactaatcttctttccctccacaacaaacttgccacttcgctccagctgcaacaaggacgttagaacaatatcagtaagaatgacaaactttggaactttgtgtagaatatgagaatcccactttaaaatgattatgtttactaacttcactatcacacttctttaatctcaaatataatgaatttcatacgcttaatgtagattctatacgaagatttggcataaagattagctaagattgcattaccttaagtttcaagtaagcaatagcatcttttcttgaagaaaactctgaaagaactgatggtgcttgttcatcgatcagagattttagctgtttcagcttcatgaatccacctttaccagcatcctaagaatgtttttgcacatatacatataagtcgatatgagtggtgggatgttttagaagaatacaatgacagttcaaaataaattgacaacgaacctttttaacaatctgcttgcacaggttctttaacttgattttgggttcaatgatttcatcgtgcttccttttcgcgggaagagaactttcaattacagagtccttgtcatcatcatctgcttcactctcgtcttcatcttcctcttcgtcttcttcgtcatcatcatcatcatcatcatcatcatcatcactgttatcaaaagaggttttcttcccttcgtaacgaacaccagctattttctttggccggtctttgatacccagtccttgttttcccgctgtggctttatcctacagacattccaaaacgtcaatatattattagatcccaacctcttttccaagaacagcctgcaaagaacatacctgaaccatgttgtaaagattctcttgatcattctcactaaacatttttctctcgctagcttttaatttctttttgcccgacttggcccccagaagaccacccgagacaaacccggatttaaatccccaccagttcgaagaaggttcttcaattttctgttctgttcagtccaaaagatccatacattttcagttcaaaaaaaagagcagaaagtcacaatttcaagatgcaaggacaaactaatcacctttaatactagcatcttggtcctcagatataatttcaatatccatagaatcggctatgtcacaaactgcaggagaaggatcctcagttcgcttaacctacaaaacagtaaaataacgtgcctaagtcggactatcactttcataatgagatttgtttacataatggtgatagcagagaaaattctaacaacatgcacaagttcacagtacatgtagaagttatgatccattctaatcaacatgaatcttgatcatgagcggataaaagacaggacagaactgttttgaaaggaagcttaccagtattccttcaagatctttagacgagtatgaattgacaagcttccctttctctctacgtttataccttccttgtggacgagtgactttagcaacggtcttcaacttggcaggctcagatttgacagcatcatcttcactttcatcttccttatctgaatctatcgtatgccacataaaacaacaatcattaggataaataagcttctctaagtcaagaaagaactcaacttaataagaaaaacttataccatcatcattcttgctagtcttggtaggagcagcttgctgcaaataacacacacacatacacaaaaagattgaaattatttcaaatatttcaaagagcatagttaaaacgaaagatgaacacagccattaccactttcaatttcttgagaatgttatcgaactgagttgtatcaaatgcccatggatttggcttatcaagaccaacacctgctccaacattttaaaaaaattcagacctataacataaacgatagatgcatatacaccacacaaatatacaaaaggcttaaagtagctctatcttgattccacaacttcacattcaccaaattacataaactaaactatgtaaacagacatttcctcctaaaaaccgaaaataatgttgttgttttttagtgtaagtgaaaagtagctctattaaagtttcctccaatctaaattccaccgagaaaaattcaaatcactagtttccattaaggagaagaagaagaagaaactaaccagatgtatcttgtttgttcgtaactctcacataacctttgataccttgcttatctttaccaagtccttctccttcttcccaaccctaaaaaaatcaccaatccaaaaaattaggtcttctcctttataaaatctctacacacattaacatcattacaggaaaattcactcaccatcgatttcataagcttgaaagcggcggaatccttacatattccgacgtacttaaccggagcttccggcgccgccatcttctcttctaattttccggcgattgaatggagacaatgcgtcgccgtttttcaaaagcggtgcggaagagaagagtgggcgaggaagtttagagaaactggaacagaaaacctaaagcgaagaagtgatgagtaaaactcctctacacgtggtctttagtaaacttcagtggatatgtaacatgatcgacggtcgagagtttatcatattttaaatgggctttaggaaggaaaggcccaataaagaaatgaatatttccaccacagaattatgaattgagtaaaccagaaaatcgaagaagaacggcaatggctacttcttctactcagcttctactgtcttcttcttctttgtttcactctcaaattaccaaaaagccattccttctcccggcgacgaagatcggcgtttggagaccgaagaagtctctctcgttatcatgtcgtccttcagcctcggtttcagctgcttcttccgccgtcgacgtcaatgaatctgtgacttcagagaaaccaaccaaaacgcttccgtttcgaatcggtcatggtttcgatctacatcgtttagagccagggtatcctctgatcatcggtgggattgttattcctcatgatagaggctgcgaagctcactccgatggtaaacatttcttgaaattcgatttggttaattcgtcttcttgtagattttagggttttgatttgagtttgatgttggaatttgtgtaggcgatgtgttacttcattgtgtagtggatgcaattttgggagcactaggccttccagatataggtcagattttccctgactctgatcctaaatggaaaggagctgcttcttctgtattcatcaaagaagctgtaagatttcgacgcttaccttgatgttcaattttgtgtgtatgttccagtattagctacttcttctttaagccttattttgtgtgtggtactttatagaatggttcagaattc

SEQ ID NO: 113 - DNA, 113172 bp, Arabidopsis thaliana
gaattcctcctcttgtttaaacgttccccataccaaaaaatagcaccacacttgtctgaaattgttggcgagttggagaatcgagtagagctctggatatttattctgtatggatgagttgttgatcgatatagtcctgtcgccttagtcactgaaaattcctcgatgattgtccagtgtcctatcttcacatacctctgtagtttgagtagatgttccttttttattcctgcttgaattttatttccctgaaaatagcataagaaaacgtgaatgcgagagttaaaaacaattaaagacaaccattaagattatagacaaattgtaaagcctaaaatacttacatcctcatctgctaacatcatttcataagacatcccagaacctttggtataatgattccacgcatggagaattttaacttgaatacaccaagaggttttgaacggtttcaagtttttgatagctgtgtatggactcacttcatccattttgtttggttttgcagtgagtaatgaattggtttatgagagaaggcacatagatatcgtgaaggtattcttactcacgtttatttataataagtgctgggtggattagatagatagagattttcgatttagatagagatcttcgatttgataagtgtgtttcgatttgttatatagaatattatttgttaagaggaagatataccaaaagaaataattgcaaacgtatctttgcgagaaatgcgtttaccataaattgttcaaaacaacaaaagatacgttttgcattttctcaaataacaatatattgttttgagtcgtcgagtgttttaattaatattcgtgataatatcctaacctttgcaacttctcaaacaacaatatattgttttgaagtcgacgagtgttttaattaatattcgtgatatctaatatagtatagtaagattatgcagattttgtgcaaaataaatatctctaaatattaattgataagtaaaactcaaaaataacattccttttgtcccaatatataaaatgttttaggctttttcttttgttacatgttgttctttcttttcaatttttatccataaatgcgacagagagaatatttcatttacaaataatttacagcttattaacatttactaaatctttacatatttttatgtgttattatattatttaaattacacaaatattaaatcaaaaatggaaaatagagactaagaaagaaatacgctaatcgattttaatgtcagatcattttctttaatttagtgacattgattttttttttttaaactttaaaactttttatcattattattatgatgtaagaaaaaagagtatgattgttgatttgttatttattatacataacacattatactgatttaaattaaaataaaaatgcaagcttcaatctttgggggtgtagctcatatggtagagcgctcgcttcgcatgcgagaggcacggggttcgattccccgcacctccattccatttaaataataaattttgtgacaatattttatatcagaaagttcaaccgtccgattgttttttttttctgttttcgggtgaaaaatcgaaaacagaaagttcagaaagttcaatattttatatcaaaaacatttactaaatctttacatatttttatgtgttattaaattaaccgaagcaatagatagaaccaaaaaaaatactatcattagagaccgttggtttcttcttccctctttcttagcctctcgtttctcatctccgagaaccaccaccgatgctcctccgtcttcttcgccggtgattttgtcttccgattgttatcaatgagtcttcgtgtagtttcctccgttttctccggaatcaatcgaatccctaacctccacgagactcatactcttcttcgctctcatgtcttctctttcttcttcaaaccggcgaatatcggtagtatacggcgactggtcttatccccatcatatggagaccggagcagagatagtgttggctccgccgccgatgtttcgtcatctattctcgacgacgagcttctgagcagcgtatccgccgttagagatgccgatgaagcgctcgcgatgatttctgatcggttcgggtcaaatcgcggtggaatcgttgaacttgaagattgccgttcgattatctccgctgctgtcagtcgcggcaatgtggaccttgcgttgtcgatattctacaccatgcgagcgagtttcgatttaggtactctcatctcaactttactattaacccagagtaggagtttctgtgattgattaagcaaatttaggattgattgtttgttttcacaggtggaagtgacaatgatcgatggagttggtcaaggcctgatgttgaagtgtacacgatgttggttaatggtcttgctgcttccttaagggtttctgattctttaaggattatcagagatatttgccgtgttggtatctcccctgctgaggaggtaacactttgctatgataccttgaaattcgtttgaacttacttaagattcatgtaattagtttgtaagcatgattgctattgattttaggttccctttggtaaaattgtgagatgtccgagctgtttgattgccatagctgttgcacaaccacagcatggagttcaggtaatgatgatccaattcgatcttcaatgaatgctctacaaatcttatatggaataactggatgatttgctgtctatgttactagattgtatcttgcgctaattgccgttaccaatacgagcttttctctggtgacataactagcattgactcagaagagctcgggttagttctcttcagtatttctcttctttgtttcctagctctaggggaaaggtgatacagcttatgttgggtgtgagagcggtttttgtttgttaatttaaccttgaaaacaaattgagacttgtgtgtttgttgatactgggatattcactttctctaaggagctacatctgccgaacgcagcaaggacattcctctctgggaaaaagggctcagacttatccagataaagaagaacaaaatcacatcttcagtgcactctattgtggtaatcgccactgttaacacattctcatttcaaaataataacatttggtaaggcagatatagtaaccattgcattggatttcaggtacagactccttccggtacagcacgaacgcaccggtttgccactgagacagccgaactccctgcgcaagaaggagaaagagtgacaattgcatccgctgctccttctaatgtttacagacaagtgggacctttcaagtttatctccaaagctccaaacttttaccctggagaacctatgagcctcacaaaacacaaggatggacgagaatctatcttgctaaggcctcctagtaaagatggagataagatcttacaaccctcgtttctaataccccttcttgcaattttggctactggagatgctgcttctggtgttattgatcccagtttgcctcagttactctcagttgctactgttacatcactagcgataggagcaaccgtaaattcttttgtccttcctaagctaaatcaggtttatattctctatcacatgaactgcgtcaagtaaacatatgatagtctcttgggtatgaatctcataatcccttgcacggtttcagctccctgagcgaacagtagatgtggttggtatcaagcagcaacttttatctcaatatgatgtgctccagcgtcgcattagagatctaaaagaagcagttgagaaagaggtaccaagtctcatttatccataccttttgaaacccacaatatgtaatcaaaaacacttacaaaacttcgttgtatctatttaggtgtggatgttggctcgaatgtgccagctcgagaacaaaattttagcagtgggagagccagcttaccggtatgagcctctcagatcattggaacctcatcatctaagaaattgttaacagaactatgataacatgtgtatcttactcaaatatagtactcgaagaacaagagtaaagaaggtacgagaaagtctagagaactccataaagggaaagattgatctgatcgatagttatgctagagtaagaaaacgatacaaaaccaatttagatcttcaaaatgtcacttgatcttctgtttttttaacttttcagctcgatttctttaacgtttagatatcttcaatgattgagattgaggtggaaatggacagtgatgttcttgcagccgaggcagtgaacaatactgtaagttatttctaagagtttagttatgaacctgacatgttcgaatctgagagttgtgtgtaaaactccaaatgcttcacaggaaaacattgctcaacagatagagcagatcatggaacttgaaaaccttgaagaggtatagagttcgaaactcatttacatgtacatttaatcatatatatctttttcctgcaattttccagtttcaatttggacaacagaagcatacatactaacaacaacatttgtgtttaatgttactttggtctttatgtttgtgaatgcagaaatggaaaatacaggctgaagcaaacgacgaggccgaaagactacttagctcccaaccttaagcactcacacacttgtcaacaaacccggttagttaatcattatacatcacacatcatacatcatcatcatcattaattcattatcatcatcatgtaaagcaattatctttcggcggcatatgtatgacattaacaatgtctgctgtcaaaactgcaacgtagattcgtcaatgatatgaaaatgtggacgactgttctggcaattacacttttaagtacaatatttattgaattttagttccctttttaagaatctttttctttctccagagctgcattgggatttttgacactgtaaacataatactttttgaaaattttagtaatggaaattgtgatcatcttgtatctggtacaggtcaaaaactctggagcatcgctaaaagttaagtttcttttgtcggtcgctataagttaatgttgataaatttgtttgtaatactatagtttaataatcaccgaaatcattaatttcttgtttcttgtccatttgtaatctttttttcttaaatgcaagcatttgttagttaaattattagtagttgctaaacacacaaagtgacacttttctccagagaattgtgacattaattacttaattgaagtattaattaataaggtataaacaaaaaagccacgtggcttctcttctccactcctctttttattccttcccaaacaagaaggttagttattattatttccagagaagcttctcttttgattctctcgctctctctttcttcatcgcctcttcgagcttcgatggttgggaatattctggtgaccggtggtgctggttacatcggaagtcacacggttcttcagcttcttctcggaggctataacaccgtcgttatagacaacctcgacaattcctctctcgtttcgatccaacgcgtcaaggatctcgccggagatcatggacaaaatctcaccgtccaccaggtttggctatcttttcccttgctctgctctttggatcattgcattctgagaatttcggtaatcatgacctcaaaaattgagagttttttttttgtatctcgatttgcttacaatgctttgggagttatgtttgatcaaattgcttttagtcgcagtggatttctggatcaaattgtgttcgagattatcgttaatctgagatttttgtttctgcaaatgttagatggctaatgtatcttatacctgcaggtggaccttcgcgataaacccgcacttgagaaggttttctccgaaacaaagtgagttttgtagtagcctcttcttactgatatactcatttcctcgcaaaaacatgttcaagtttaaatctcatgaattttgactttcatttcgtattcttaatagaccttatgataatatatgttgatccgaaaagcctaggaagagaggacagggaaattagttttgtatgtttcgtgctaagatctgaatctacagtgaaatgcttcttgtttccagtcctccagagatgtgatttagtgctctatgtggctgtaatctaggtttgatgcagtaatgcattttgctggattgaaagcagttggtgagagcgtggcgaaaccacttctgtattataacaataacttgattgcgactattacacttttggaagtaatggctgcacacggatgtaaaaaggtaaaatccccttttggtctgtattgcagatttttggtattccttatgtatgtgagtatgtgacagtgaaacatgatttaactttctctcattgatctcaatcagcttgtattttcttcgtccgctactgtgtatggctggccaaaggaggttccttgtacagaagagtctcccctgtctggaatgagtccttatggacggacaaaggtactcagtcgttttcgatagcaaagtggaagcttttattgtagatttgattggtatttatactggaatgtttctcatttcgtagctgttcatagaggacatttgccgtgatgtacaacgtggtgatcctgaatggagaatcataatgctgaggtactttaaccctgtgggagctcaccctagcggtcgcattggtgaggatccttgtgggactccaaataatctcatgccttatgtccagcaagtcgttgttgggaggctacctaacctaaaaatttatggaactgactataccactaaagatggcactggtgtaagactttcacatccttataccacgattcgtaatttaaactgtcctttaaatccctgcatcactctcacacagacctgctttttatcgctcttccacatgaatcatgtaaatcttgaaatttggtccatgggttgggattatccaaggaattgtttgctccaaatcctagatagaattgattcatcactagaactcttaagtatcatgatcatttgatagattcacttttcttgcttcaatattaagtaataacatgagaatcaatttacttcctcaatagtcaacttatcttgacccgatactttgtgatttaacaatcttgcttttatccttggtgtgatgagttatattgatcttatcggtctttatcaacttcaggtacgagactatattcatgttgttgatctagcagatggccatatatgtgcgcttcaaaagctagacgatactgaaataggtatgcttttcttcttcttttcataagtacctcattgtctcgacaatacatatccgcttatttatacaaacaagctcaactgtctgatttggctgttgtgctaggttgtgaggtatacaacctgggaaccggaaaaggaacaacagtgttggagatggttgatgcatttgagaaagcttctggaatggtaagaagatcacttctctccttctctctctctctctctcgctatacactcaaattcataagagtgtacgcacacatatgtgttgactctttacatcacaatgacttgatagtttgcaataatgtgtacagaaaatcccactggtgaaggttggaaggagaccaggtgatgcagaaaccgtctatgcgtcaacagaaaaagctgaacgcgaactaaactggaagtaagtaaaagacccaacgaatgtttttattaagtatgtatcatggacctgttttggcatagtctctaagaatgaagaaactcaaaatctgtggacagggcaaattttggaatcgaagaaatgtgtagggatcagtggaactgggcaagcaacaatcctttcggttacggttcttcaccaaactcaacataacgaagctaatgtatccaacactccattctttttcttttgggtcgtcggctgttatctttatgttacacactcaggttttagctttaaagcctaaacacagtgagggagaagttacttctctattcatatatctgctttctccttttgtaatttatatatatcttatatacgcataggtttaacttaagcggatccttttgttttttggatttgtataatctctcttaggaaattaattgtcatgggattatatttgtattaaatagaaactgaattcaatttattttaaaattgatttgtatgctatttcaaagtgtttctttgttgtttgcatttgcatttcttacttcggctgtttgtttcatcatttagcattttcattcaaatgatccatttacatttgtttgatcatttgatatttaaactaaatgatgtacttaaatgaatctttatttgtttgatcattttgtagttcatccacattctcatttcatttatataaaaatgactaaaatacccatatttttattttgacatgttttcattctaacaaatgataaataattttgcttttatcgttttagtgggtaaaaataattttacggttttgccgaaaaaatattttgcggttttggcgtgaaaacatgatattacggttttgacgggaaaacatgattttgaagttttggcgggaaaacatgattttacggttttggcgggaaaaatattttacggttttggctagaaaatatgatattaaggttttggcggaaaaacatgattttgaagttttggtgggaaaaaatattttacggttttggcgggaaaaaatattttacgattttggcgagaaaacatgatattacggttttggcggaaaaacatgattttacggttttggcgggaaaaaatatattacggttttggcaggaaacatgattttgcagttttagtgaaaaaatatgattaacggttttggaggaaaacatgattttaggatgttgacgggaaaatatgattttgcggttttggcgggaaaatgaatacaattttgacgtaaaataatagtccgtgatttccaaatttttaattttttttggtgcaatatgtaatttaaaaaaaatattaaataaaaattttatagaaaattagtattattacaaatgttatatttgtcatttattttttttactaaaccatcttcatataaatggtccaatcaagttcatccaaatgagttttaaaattttgcctaaacttacaaagtcatttagatggatcatccaagtgattcatccaaatgatatgttaaattgtcaaaaacaaacatcatttttttcttcgtctagatgattcatctggatggagaaacaaacatggtcttcttctgctaacaagggagtgtgctcttaacttcttatgataatgattcatgacccatgagcaaagtaaaaaggcccaattacaattgcagtccacaaattgtcttttcactttcaagtactagtgtaagctaacctaactgttgaaatgaagaaaaattacaaagaaaaaggacaaacagatattgaagaaaaatacacaaatctcaaggatagtgggagctctccaatgatgtgacttcactttctcttttattattttcttctttctcctttgtttaacttcttgaaactacaaaagtgtcgagatctattcaaatacataaacactacaaattcaaaacgtatttactttttttttggtatattctcttgctttatgaacatttaacactttttctttacatccgaatgcatgcaaacaaaacattttgtgaaatggaacatgtaacgtaaaaaaaaacatactcccactttcaacttaactaaaactaaaacaaaataaaggttcagccatattctcaggaaacacagcatttttgggcttaattgaaggagagaacttgaccatttgtgtaaaagaaaattaataaactacagaaaatttaattaagctaaggatgtgatgtattgctaatttaagtaacctataaactttattctttttagtagaaaaataaataatttatacaattactaattaatttcctcaaacttaaacatgggctacaacaaaaaattagtgaaaaaggggaaaaaactaaataaaacatcaaaaatggagaagataataataatacgggaattaaattagcaatggaaacccaagacggaaccatcggcaatagagacggtgactcgacaatccgatttagcaaccacgtgatgtgtgaacacgtgcagcactttgacccgacccgctaactccatcttcgactctatctccattgttggtccgacccgattcccatacccgaaacccggattcgcatatccatctcctagcgttggccccgtccctcctccgccgaatggcgtacccggaaatcccggcggacctccgattccaggaaaccccggtggacccatgcttctcgggttacctggaaaaaccggtggatttgggtttctcggaatcaccggagcacctggatttctcggtggatttattggaaattccggcgagcctggatttctcggtataatcggagctcctgggtttcctggaaactccggcgagcctggatttctcgggaaactcggaggacccggattcccagaaaaatccggtgaacctggatttcccggtaaatccggcgattctggatatcctggaaaatacggtgaatctgggtttcttggagttacagtgaaatccggtggaccgggaataatcggagagtctggaataacggcggcagagacggtggagatagcggaggaggaaggaggagaaatagggaaagaatgaacggtaaaagtggcggccatgtattgaatccgacccgaatcaattttaccggcgggtatgaacataaacccgacttgattacccgaataaagaagctgaatagagctgtcgtaatgagagaaaacggcacggttagggtttctaacggcgacgtactgagagaaggagaagttagcggtattgtttgagacggcgaatgaggggagttggacggcgttaacggagatcttggggtcttttggtttgaagactgtgaagtaaacgacaaggagaacaacgagtaagatgagtaagaagacggtggcgacggcgcaagaagctaaattagttctgccggaagaacggcgacgatcgtgaggcttggccattgtcgagatcgaagagtgtttggagacgacgatagcgttgaaaccgagacactgtgagagtgtgagtgagaaagtagagtagagagggtacagtacttcaaactaaaagcgagagagcatttattaattgtctgtacgacaaacaaatcatcaaatccttccttcacttcattaccattttattaatagacttaactataaaagtttcagtaaatttgtagattagattgttttgacaaatgatattgtcgagttgattaatttcaccactcagcttattgcattaatcaagaatgtttttctttttcgtatttaatgagaaagatattcaaaattagaaatacaaggttccaaagtcacatgatccctttttttgtgtatttttccacatgagtgggtgaaagctgtttaaagtccaattcagtgagatttgctcttttattgcaagccttgtattagagaaattgttttattgcacactgcagtaagtttggtttgatcccacttgcaaaaattatcactaaagcgaaaatgacacaaatgcccatccggggacattgaaaacaggccagagataggcccgcggtcattgaatacaggcccgatttaggcccattatatgtcattcttaatttgtaatttggtttcataatgaacaagaatgtcttaacatcttccttaccacagcacaattggatgatacgaacaaattagcaacaacgtttaatttatggtttagggaaaaaaacacaaaagcttaaaggcttctttcatggaaggaaaaaattatccaagaagagcctatcaacgtttttctcaacgaaaacaaacataatagatacattacatcatatacatatacataccataaaaccaaactttattatgtacttaagactggttacttagttagctcgtccagacgacgatccatggccacagatactgcttcaagaaacgtagcctcgcttgacgcaggcaacaccgagttatgagcttctctcactatctcttcaatcgctgagtctttgttcaccgtttctctgcacattacgcttcctatttgatatggcgtcaggtttctctcaacgcctttcttcagcagcatcgtggagatacgtagagtgcgtgagacagcttcaggaacattccagccatggagttgcagaagcgcaatgtcttgttcggagtctagagagtttatgtagtcaatggtgtctgcagaaaacgggagtttcgcttgcggccagtagagccactcaaatgtgcaatcttcaaactgcaaacccacttcaataaataagtttcacttctatatttattggaggggtcagtaaatgttgaaagaattgtgagagaaacttacattctcgggcaaacaataaccatgatcgatgggaataagaagagtttttccttcttcgcttttcccggtcaatatgtttccagcatgtcgatctgcatttgccattcttatgtcaaagacacagattttgtgcacttcctcaacaggaaacgctccagggccgatgtcttcgcagcttccattgttcttcatgaacatttgcaaagaaccaactttggcatcttttgtagcacagctgctgaacccatttgggtagttatacactttgtgtgagcttctgaccatagcagttggtggcacaccggcaaaacccataacttctttagacacagatcttagtccgctctttggatgatctaacaagtaagctgcaacttctcttgttgccccttctcctactctagttcctctcttcaatccctgaccgtctgatgacacaggaagctgctgaggattgttcacagccattggttcttcatccataggcttgaacacagatacatagttgagacctgaagaatcttgcatcagatatgtccctcctgtcccttcagctgatctcactggtggactacctttgttcaacccatcaaccgtccggtcaatcatatcctcgagaacctcaggtaatttcacatcggggttaagaacaacggctctaacaaggagtctttaccagtagcagtgtcttcttctcttttcaccgtgtcttccaccgatttcttaaccagcaaatggattacagagtttccatctttacaaatcccatcaatgattctgttgtcatcaagcttctctcctttaaacaagatctcttgatcatcaacctcaggaaaccctttaccctctttagagatccgtttcttcaaatacccaacatttctacgacgatccacatgaaactgaaagaccttgccgcaagtagtaatcacagtaacaagcaaaggatcatagagcttaagcaccaaatgcaacacactaccaccagtcacaccatagtccttcacacgtgaggcattcctggcaagctctcgaccactgaaaacaagtttctgtcttctaaccctaaaaccattacaagtctggatcctaagtttaacctcagcaatagaatcagactccaagatgagcataggcatcgtagaaccagaaacactaaggaacaccaaaaccgatttaacagagtaatgcgtcgtcgtcgattgtccgaaaccaccaacagcaaacgccgatcctctatgaatcgggcttaaagcaacatcagcaacagacatttcctattgaaacaaaaaaaacctagctctaatccaaatctaaacaataatcttctcgtacgggtatcaataagagacacccttccatgaaaagaatcgatccaaatcctaacaacaacaactagatcaacccctccctcacgaacctaacagagacgaacccaaataagtacacctataaattcatgaatctcctcttaagcaacaacaatcaaacgaagatcgaggaaatggtgatgaaattgaagatctttagatctcaaaaccacagatttctggaaagatcgttgtagatttttcggatcgatgattttttttttcctgaggaatgaattgaaaaaaaatcgctaaaagaaaggcaaagtctagatttttttttttggaagaaggagagagctctttctttaaatagacgcgcttcttagccttttccggattttgtatattcttaacgccgttacttttcacatctacgaccgtttctttgcattcattttattttttatccatcaaatttgttttataaaataagtcatcgaatattccctttatttttatactttaaattgaatttcatttattttaatatctcctaaaagtttaaaatttatggattgataagtaccatttataatttctccatttagaaaaattaattgttttgatttacccattcttatgatcttatctgataaacggaataagggagactatgtaacgtggtgatgttgccgtcattaatctaacgggaatgttaacgtggcttttggcttgcaggctaacgacggtattgtgagtcattcttgcaatgatatcttgccacgtgtgattctttgtaaagggaacaaaaactaaccattaattaaagtgattaatcattttctttaaaagagattggagggattaatcagagacttaaaatactaacatttaggaaacttgaactggtctgaaaaccgagattattgccgttgcacatggatgggtcctctttctacaaaaattcatatctcaaaagcctaaatcatcattatacattagtatatctttataatattgtatgatttgaaaaatatctaaatgcattatgagtactaatgaatcatgtaggttcgtagaatcctcctcctatattacgattacccccattcaacaagtaccattcacgaaatctttacatttctagctttgaattatttaatacaccattaacataatactaatatattacataatctcatgataattatatatataattttcatttcaccattgatgacaaagaattttgaaattgttttatgaactttcaataatgcgaacgtttcaagggagttgtaccacgaaagaaggttcaaaggaaaagtgagtcataacataacataacattaaagatacaacaaacgtttctttcgacaagatttcttgaccagttcatgcatctaccatccgtagctaaatttctgatccttttttaagtaatacaatatctttttgatgttgttgtcaatatatgattaaatagaattataaattatttgatgaaacgagttgtgttcaaaattagactctgatcgatatgcatcaccaaaaattagcttaaccagaattaaaatatggtaaaaatcttagagcatccccagcgtatatcttagcctaatcttagcaaacatcttagcattaaaagcaattataattaatcaaaccaattaagatatgtattttaactaagatgtttttcttaaggtaagaatgacacatgtgtcattggaatagtaatttgttaaccaaaacaatgttttgcaataatttgatttttatcttcttaagaagggattcttaatcattggaatagtaatttgttaaaatcttctctaatttttcttaccttcaaaacagtgaaattttaatttaaaataacgttaatattcaaggttaagaagtaattggttcttaactattagagatgatcttacattattactatattttatacgaaatcaaccaagtatcatctaagctttaataagagtagttgataacatctggtatggccggtggttttcatctgacaataaaataatatgacctgacgtatttatatacatttcaatatttgtaagaagataagttaatgttgtcacgattattgttggtacatgaatacaacaacatcaaaagataactatttaaaattcaaaaccaattggccgcacatatatcgacagttcgacacacgtgtggacccgacgttgctactgcagtggctcctcctatagccgttgctcaccagtgaccgttaagagttcacttttctttatattttgagattattgtccacaacgccatttttctaaaaagccatttaaatgataaaaccttaaagaaaattgttatttcattgtaaaaaaattcccttagaaatagattatcaacaagtaactaaacgaccgagagacataatcgaaacaaaaagaattgcaaattgtttcagccttgtaccatataatgtcgaatgaattccgaattatacataaaaaggattaaaagacctcaaacgtataattcgaaaaagcctctagcttcttctaaagatttcctctagtcttcaacttcagagtcgagtacaaagcttggaaatgctaaagtcacttccctataaatcatagaaacgacgacgtacttactttatatgtcaataaaaacaagaaagagaaatatttttgaaataaaagtctacttgaggtaaggcagagtcatgttcttgaggattgaaggattcttagcaacgagctctttccactcttcttcatcaatcttcccatctttgtttgtatcaacctcgagcatcgtctgtttgtaaaaatcgattcacaaattcaacatcattaagatattaaatatatatctttaacaaaaaaaagatattaaatatataggaatattaatgtcataataagaaagataaatagattaaaattaggtataatgttgcgtgacctgttccacgatagcttcaatagattcttccgagagttctaagtctgtttcaccaagtagtgcgccaaccatcttcttcagctaatttccaaccaaaacattttacacatcaaaatgtttgtgtatgcatctccaaacatccaaagacatatatgataatatatatatgcacatattttgatatggaaagaataattttgtggttttggaaggttgcaatctatgttctacaactttgcaatctgaaccaaaaaatgaaaatttgaaggtaagatttttcaattactatttacttgttcgtataaagatttcaccgttttattcaaaattcttttttaatttctccatttttttaatagtagaattgatgagatctatagcattttatcagtacctcatggggctcgatgaagccggttccatggaggtcaaaaagcttgaacataactacaacattacaagcgatttacttcatctattagacacgtaaataaacacgtatattttcatgatcctaaagtgtaaataacgtacatgcagatttttcatgttcgggagtgtatggatggaatatgctaagggaacgaacaaattctccaaactcaatcacaccgttgcgtttcctatcaaacatataaaacacctgcatgcaccactttttccgaattatttagctaaacaccttttttatttttcttgacgtcaataatattcattgaaatatgtaattaaacaaaaaatatgtttatatataattaattatgcaagtatagaacagatatacgaaccctgtccgcaaatagattttgcatactgccgtttctgaacaaagccagaagaaactcttcctgctcataaaatattaggtcatgcatgtagatgcaaatcaaatcccaaaaaaaatgtgatttttagatttaatatacaattttttttttgtataaatgaaaaaccatttaagaaataaatgttaccttatggattagaccatcattgataatagatgtacttagcttcttgaataaatcgtgtaaagcctcaatctcattcacggtgactgcatacatcaattatacataaactctataaatagcttcataaaatgcatctatatacagctcatattcgtttatagatgatcgtttattaactcttctttatctttcgtaattaattatgttattcaatttttacatagagatgttgcggtttttgtttgtttggtttgacttacagggagtttcggatgcaagaacatgaggatcctcatatccacgaggatgctttgctcgcttcaacgagaagcatttcacgaatgccaacattcaacaactttggtaaatatagaataattttttgtgctgctaaaataaccaataaaaaaaaaaaagtttcaggctcctgatcttgattcaatgatccgttggaattcgcaatggtagataagaggaaatgatagttacggtggactaacaaataattaaaagatttatatgaatctggtttagatctttatgatccgatcatcttatgttaaaaatgacgacaaggaacgaatcaagaacatgcatatgatgagatcataacaattaattaagaagaagacttgaaattaattaagatcgatacatggatgggcaaacctagtaacaatttagaggttctcataaattcctcataaaacctatatgatcatcatatagtaatccccaagaaagaggccaagatcttaattaagaacaataggctcaattaattacaaaattaaaatcttatttggcaggaaaataaaacccaaataatcaagaaagattcgattcaaatgataaaagtctaaaagtgaaaatacctggatgatcgatcttgtgttacaaattggttgtatttagagggttgttgttcttccaatatttctagagaagactttagatatacggaaatgccttatgtgatatcgacggaaaacaaaaagcttactgtatacttcattaaaaattcagcaatcattaaaaataaaataaattaaagaataagttgtgactgtacgatctttttatttgacaattttttttttttcggtttcaatttcataaacagataatttgataggtgttcagaaaaaaagagaaaatttgattttattcttcttaattcgtttttataataataataaaaattaaaacaagaaaaaataacacgtaaaaagagtattgttagttgttattcacgcgctttgttcttattaaaataaaaaaccgttggattattcttctttttctttactttctttcctaattttctagggattcattagaaaaattcttttaggttttacaatctttgaaagagagaagatagtgcgtgcgcgcgcgcgacgccatggatgggaagagtaataatcatcatgatctttttgcgaatgagaacgaagagaaagaggtattcttgagtcttgaaccctaattttgttggaaagaatgatgtgcgatgtggtgcgatactttctctctcaagtaagaccattgatcgagggagattttcgcaaatcccagcgtcaccttcacttggtgaaaggggaaaaatcgaagatcctcgtaaaattgatgctcagaaattagattctccacaagcaaattggtgtagtcattgtagaaaaaacgttatcatgaccgaaggcgaaaacacatatgataaaccatttagttctgattgttctgatttaaactcaaacatagttctgattgtttatcgtgaaacgaaaaaacataggataaaacaatggtcaaaatagtgccgactattcatactaacatggttcatttcttgtattgtggggactccttatgtcaaaacaatgttacgaggttcttcttgatgacactattgaatccaagaattatgaaaagcttcttgatctttcaatatcacgtgctcagagacaaatattgtaagatatgattagatgcggataactattatcatagacaagtggaaagattatgattcacatgtatatattatagatcatgaatttgatcatcaagatatagatttttcaaaagtaatttggtgtgttttagaaagaatgatcacataaagcgcacttataatggtccaacaacttgatatgctaactgataaggataatgggtgaatgaattggtaaatacgatctgccaaaacaacaacaacaaaaaccaaaaatgtcaaaaacagaaagacttactttattatatatgtaacctgagtgagttgatgaaaaattctgatcctagaacgtaaggagagtatacaggtagtttctgtatctcgctatggcatgattcacccaaaataggctgaaacaggtcgctaacaattcatcccttatcacttgaggtgatgcttcaccagcttcttgttcaaagagagacttccacaggttagaaatgttaaagactcgatggtctccctcacaaaaccattaattagcctttgtaacatcctctgcagacctcagtttatcctctagcttcatcagcacttgcttgtactttgcaataagccaacgataatagtcgatcatcaaaataagagctatcatttcttctgagaactaaaacatgatatctattaagacaaactgtcggcccatttgtcggcccattcacaacagagattttgaattttctctttgaaaccctcaagtgtgtttttcttaggcttggtcgatctttagccgtcttcaacatcaaaatcaatggaggaagaagaagcgagacaagtggtgatcgacaatgatctgaagaagaagatcaaggaaacggtgaagaagatcctgaaacggtcgagtttacttgagattacagagattaaggcccgagaagaagcttcatctgagttgaatctcgatctttcgcgagatccgtacaaaatcatcgtcagagaagccgtcgatagtttcatcgagaaggcgattatgacaatcgatactgagatgggaaagcttcatactcagattgtagaagatgttgatggagaagtaaccgagaatgccacgaagacgactacgaagaagaaaaagaagaagaaggcaaagaagaaggtggaagaagaagagtcatcacctgcttaggtaaattttatcatctcagataaatttcatctttgctcaggtttttgtgtaatttcaacgatgaatgatgtctttagttgaaattagtgttttagccattgatactacacttcaagtcaaagtgtatcagactctgtaacatgctccatcaatagttatatgttttgttacttaaaaaattgatgattgtctaattcattaggacatttaatttgccaaagaaaaacttggttttggtgaaattgtgatactcaaaagattcaagtatatcaaaatgaaacctctttttccaatgctatatattctctttgtgttatgaaatgcattatttttgtatcgacccttcaaatgataatgacatttgcatatctttcttcggtagagtttgacatatttgcatttaggagagacgacaattagaagattgaattgtcaagaatatgattgactcaccacgtagattacactgaagccacaagcacactttgtggtggtcgtcattctaattcttattatgatcgtttcacaaatattcatggactcgaataaatccacaattgtatactaagcattattctaggaaggatacaaattgatgcaaaaaatatttagataagagaatgctcttagaccacacaaaatgctacccatcattttcttgttttcttcatatagtaaacacaaaaacatatacaaagaaaactgaacaaaatttgaagagttattaaaatggggtgtacatcttccaagcaagcaaaagctaacgtcgtcgccgacgtttacaaaccaccgccgtctagtttcgcggtgtttgatgtcaacgccatccaagagccatggctaaaatttgaacatgaagatgatgagaaaccgccacgctccaccgtcttcgaccgtctcgacgaggatgatgatgatgatgatgatgatggtgatgacgctcctaaaacatgggaagaagtcagcaaatctctagaaactaaacttaaacctgccgccgttaaaccgccggaagtagactctgttaaacctccggcgactcctccacggcggcttccgcggaagagcgcatcgttccacacactggacgagcttgaagtgagggccaaaagaagcatcgccgcgcaaatcccgacgacaatggttaagcttaagagaaccgagtcgatgtccaagctaagacccgagtcagatgatcgaaccgagtccactcagtcgtcctactcggggcctcggtcagtgaaggagaacatattcgtcaagagagacagagaacggagggagaaagaagggaacaagaagccggtgatgaactgggacccacttagggagttcccggagaagtgtccgccgggaggaggggaaggtttgattgtctacacgacgtcgttgcaaggagtgcgtcgcacgtacgaggattgtatgcgtgtgagggccatcatggagcagcaaggagttgtggtggacgagagggacgtgtctttagacgccggagtcttgagcgagcttaaggagcttctccaagacgaagcatcagtggcgccgccgcgagtgtttgtgaaagggaggtacttgggaggagcagcggaagtgacagcgatgaatgagaacgggaagttagggagggtgttgcggtgggcacgtgtggagagagtaggggaggaagggaggctcacgtgtgaagggtgcggaggagcgaggtggttgccttgtttcgagtgcggcggaagctgtaaggtggcggcggttggggcggccaaaggtgaaaggtgggagaggtgtgtcaagtgtaatgagaatggattgattcgttgtcccgtgtgttttgttaattaagaacattattagtttacacaagcaaatagaggtgtgtcaaatatactttgtcccgtttgttttgttatatgtatgtgacacgtttgattttgtggaattgaaaatgatttgaaactatgctaggattttcataaaatgttaaagcatgaacgtgaaccattataatgctaagcttgcaaggtctctcactcgtatatgttgatggttttgatcaattacgtaaaggagttcaacaatctcactaatttaagtttggatcgtcagaaggtaaaagctggcaaacaaagtcacttctgcctgaatactttacaaatttgttctttgttgctattttgtttgattgttatgcatccgttgaggattttgtgctatgaaacagagtaatatgaattccatcattatagtaactatggcaagttagtgttagttaaaatcttttaatgaaaatgcatacaagtatgcttctcaaacttagctttaagagtttctcacagttacataagaaagcagagcaatgcacaaaaaaagatacaaaaaagatagatttacttttgttcttacaaagaaacaaaaaaagaatctgacatttttctcacatacacaatgttcatggtcttcagttgtacttcctcttctttatcttgaaggaagatgatcggataatgtcatcgtcggcagtgagaacggtctcgagtggaactattgattcgggtttggtgaagtaagtgaagagaaggtagattccatccaagtaagtgttggtttctccagctttgttcttctttcttatgctgtaagccaacggaatcactcctctgttaaacacttccacatacattccacctcctgccacaagcaactgccacacacaccaaaaagaaatcccagcaacataatgaatctttcagagtctgcaccaactaaaaacttccactactccgaacataaatttcagaattcctcattagattaaacatgtgatatagcgtaaaagaacccacgcgtaaaccacaaatgataactgtgtattagctcgtttcgagcatcaaaggacatttcaagaattgagttaaaatgttatggtaaaacatgactaaaaaactaagaagtgcactaagggctcctatcttgtttcaaatggttgagacttaaagaattcacagcccacagaaggatgagatttgctcttagaaagttaaactctttacttcaattttaacaaggagtcgtcacaaacattcaattgatagctgcaagttacacaactctacattgaaaccattttctcttgctttgtcattaacgtgtaagaacagacacaagatacaacttttagtgatctcttactcaacttctaattgaatcctaaaatctctttctctctcaaataatcaaatttccctctgacatgaaacagaaaacaggtaaagttggagacttttacttacctcttcgtatttctgggtaagaccaagccgttcatcttcagacatgtctggtctcaaaaccgccattgtttcgtactgcctgagcccaggtgggcactgaggttccggtttgtcttcaagggcagttgagactcccgacccggaaggagaagtcgggtcatcatccgacccgaatccaccttcaaagaaagttccagagaagtcaagagcctgagatttcaccacaaattgagagccatctctcttctgtatcgaggcacacataggtttcgacttggaaatgaatggcctgagagagtgggagaatgatagcagcggctgcgaagatacattaggcagagggcaaattgtggaatttgatacacacagcgaagacgccattgttgtgagattgtgaaagcaaagaggagatgagagagtaaaatttggataagagatgatgatggtacacattagtcagaattctattgtacaccatgggcctttttaggttattgggcctgttaaaggcccgttttgtaaagacaattatttctatctgtattatttgtcttcgcgatcaagccagttctcggagcaatcaaatctataagaaaagaatcgtcgccggtgaagagaaaaaaccatagaagcgatggatccgcagctaactgaagtttcacagcagttcgagagattcaaggcggcgtttgcgaggaaggattacaatacctgtagcgatctgttgtctcagcttaaggtctacatctctctctcttctttgaaccctaatttgtttcaattcacttctttgcatatctgcttattgaaccaactttgggaaaattgatgggttatgtcgcgagagtttaaatctatgagagctttgatttattgaagtgagaatttttagcatataagtgtgttaaggatcttttagaagagctaagtgctatgaaatttttaactttctactttaagggattgttgggattggtttagatttacaatttactggtgcgagtctctgatgtcgctggggttttgttgtgttcttcaggttcttcttaccaaattcacaagtcttcctccattgttcgagaattcacctaatgcagccaaggaattgactattgcaagtaagtttctctttttcattattggttttacatgagctatttgctagtaagtttagagttttgctttcaattgcatggagtgttttggatttgtctattctcatgagttatttgttaactatacttaaataccactgaagagtgtctgagggattgtactgctttagtttgtctgtctatccctatatgtatacattaatcgttgaatgctgcattggtttggattgagttattggtaatttttgttcttattgattatccgtttctaaaactttgacaattggtgtattctaggggacatttatgagcatgctgttgttctaagcgtcaaaaccgaggatcaagatgcttttgagagagatttcttccagctgaaaccttactatgtggatgccaggtaaagaaagaaccaactgtctgaacattatctttttcattttcttttggtctaacatatcttcttttcctctgcaccaggaaccgtattcctcagtctccacaggagaatcttatcctgggtcttaaccttctgaggctgctggtacaaaatagaattgctgaattccacaccgagcttgaattactttcatcagctacactagaggatccttgcatcaagcatgcagtagagcttgagcaatccttcatggagggtgcctataaccgtgtgttgagtgctagacagaccgcgcctgatgcaacttacgtctatttcatggatctcttggcaaagaccataaggtagcatcaatgagtctgtccttctctgaattagttcagtcttatgtcttctcgcgtgttatctcacctttttattgttatgactgaattcacagagatgaaatagctggatgcagcgagaaagcttatgattatgtctctatcagcgatgcccggcagatgttgttgttctcttctgatcaagaactcttaacctatgtcacagatgtaagagaaaaaacattttgtgcaaagtttagaatcttttttagtttcatgaaccattgacgcgatttaggttttatcaaatcttataggagcatcctgagtgggaagtgaaggaagggtttgttgtcttccagaaagccaaagaaactgcaccgtgcaaagagattccgtctctgcaactcatcaaccagactctaagctacgccagagagctggagcgtatcgtgtaagattcgacttttctcactgcttgtctcttctcttctgttatgttcctggaaatctctgggtcagaaaactttgttatcatgtaatgaccgatattgagcgactcagtattttctccgggtcaatgagactttgttgtgatatcaatctgtttttccatatccttttacgttatattctattgtttagtgttcactcgttttcaattggagactctgtcctcctcactttgatgctttgcttgaacatgatgtccataattctaggggtgttcaaaactaggtatagtttggaattcagagttaccgtggtccgggatactcaatttcggtttggtttgcggtggaatgttttagttcagtttggttatttgaatttgggtttggtttagttgtggatgaaaaggacagatttggagagcctctaacgtagtgtagccggggccttccttcctttgatgaacaacctagtccaaatatggaagaaggaaggaaggattgtcattacagaacaagggacacacaattgtcaattgccaaacactcatcaacttgaaacaagtggggatttacgttgcaagcatttcttctccttggggttaaaatattgattaacagctaaataacaaattagggaagttattataacattaaaagaaagaataatcacgattagatgtccccactaggaaaacaagttactgttaataaaaattttatgtattgcaaaagggcttaagtaaggatccactttgggtaagtagttgaaaatggctgagtaagaataatcacgattagatgtcctcgcttttttattcatctcccaaagcgagattcgtttttttcattgtcgtcaattattgcattgtttatcataattatttgctaagaacatcattattattgaataaattatagtagtcgttgttattctactcacccacaacacgcacttagtgcctaattacgtcttaatttaatattttttaaagcttttaggcgcataaaatatgctatgacaactttgttcatggtggtggacgtgtaagaaacgtctaaagatctactctatataacataatcaattcgttttttgaaatgtgataaaaacaaacctttaccatatattcgcctctggcagaaacaatgcatttggaataaaatagaatcgtatcacagcatttaaaaacgattattcaaatagtctaatagtatttattcacacctttatgttttatgtatatcgaattttgtcaaagccaatattctagagatggtcaatcaatatcaatacagtttttttttttggccaatgttctaatattcaagtttgttagtattaatagaaaaacaaaatttcgatgccttttgtctcataaaaatattaaagaaaataatacaaagaataaagaatttgcatgaaatgggagatattctagtggttggggtaaaatggtacagcgtggaatcaaatgtcttcaacaaaatcaaattattttatctcaaaaagatttaaatcccaatttaaataatattacaacttgtcttctcctcttatttcttctctctctctttctgttgaagaagctgaatcagaagagtttttttttgcttcaaaaggagctccggcgaaacttccggagatattaacacttactctgacgagtttttgtctcgtcttacgtctttgctgctgctgttgatggaacttgacgacttggatctcagcggttcttggccgttagatcagatcacttttgcttcaaatttcaagtctcctgtcattttctcttcctccgaacaacctttctctcctctctggtccttctccgaaacttctggagatgtcggcggcgagctttactccgccgcagtagctcccactcgcttcaccgattattccgtcttactcgctagtaagtcttcatgcaaagtttagattctagaatccaattcagataatgtagtgaatatgcttcaatctctggatagtaatattctccttcattggaatcttattggaacttcacggattagtagaatttagatctggaatttatagaatcaaatgaaatgcaggttctgaatctgaaaccacgaccaaggagaataatcaggttccttctccgtcatggggtataatgcctttggagaatccagatagttactgtgccatcaaagccaagatgactcaagcgcttagatacttcaaggaatctactggacaacaacatgttcttgctcaggtttgggcgcctgtcaaaaaccgtggtcgatatgttcttacaacttcaggacagccatttgttcttggtcccaatagtaatggccttaatcaatacaggatggtttcattgacgtatatgttttcccttgatggtgaacgggacggagagctcgggcttcctggtcgcgttttcaggaaaaagttacctgagtggactcctaatgtgcagtattactccagcaaagagttttcaaggcttggtcacgccttgcactataatgttcagggaactttggctttgcctgtttttgaaccatccaggcaactctgtgtaggagttgtcgagcttattatgacttctccgaagattaactatgctcctgaggttgaaaaagtttgtaaagcgcttgaggtttgcccttgttttctccttctttttttagggttctttatcagtttcctttgatcttcccgtgacattgttgttttctcttgtgttgcaggccgtgaatctgaaaacttcggaaatattgaaccacgagactactcaggttatctgcgagtccaatgtcaaaaatctcgagtattctttcagaaactttcaagaactgtcttgagttcatttagtgctgttccttctcgttttgactccatttctttttgacttctcctataccagatctgcaacgagggtcgccaaaatgcgttagctgagattttggagatactgacagtggtgtgcgagacctacaaactgcctttagcccagacatgggtcccttgcaggcatcgcagtgttctagcctttggaggtggttttaagaaaagctgttcgagcttcgatggaagctgtatggggaaagtctgtatgtctactagtgatttagcggtttatgttgttgatgctcatgtttggggtttccgagacgcctgtgctgaacaccatctgcagaagggacaaggtgttgctgggagggcgtttcagtctggaaatctatgcttctgtagagatgttactcggttctgcaaaaccgactacccattagtacactatgcacggatgttcaagttgacgagctgtttcgcggtctgcttaaagagcacatatacaggggatgatgagtacgttcttgaattctttcttcctccagccatcacagacaagagtgagcaagattgtctattgggttctctgcttcagacaatgaagcagcactattcgagtctcaaggttgtctctgaaactgaactctgtgaaaacaacatgtctcttgaagtcgtggaagcttcggaggacggaatggtttactcgaaacttgaaccaatcaggatacatcatccagcacaaatctctaaggattaccttgagctcaacgcacccgaacagaaggtgagcttaaactctgactttatggagaataatgaagttgatgatggggttgagaggttccaaacgcttgatcctataccagaggccaaaacagtgaaaaaatcagaaaggaagcgtgggaaaacagagaaaacgatcagtctagaagtgcttcaacaatattttgctggtagtctaaaagatgcagcaaagagcctcggaggtatgttcttaactctgtgtactaattgtaattgttgataacaaactctaaaaattttgtgctacttttttccagtttgcccaacaacaatgaaacgcatttgccgacaacacgggatctcacggtggccatctcgaaaaatcaacaaggtgaaccgatctctcacacgacttaaacatgttatagactcggttcaaggtgctgatggatcactcaacttgacgtccctctctcctcgcccttggcctcaccaaatccctccaatcgatatccaattagcaaagaactgccctccaacttctacatctcccctaagtaatctccaagatgtcaaaatcgaaaacagagatgcagaagacagtgcaggttcatcaacatcgcgtgcttcttgcaaaggtaaagtaaagccttttatcatcatcatcatttctgcatattgccaaatctcaatatccatcaccattgatctcatctgtctcgtgtttcacagtgaatcctatttgcgagacgcgttttcggcttcctacacacaaccaagaaccatccagacaagtggccttggacgattcggatagtagctctaaaaacatgacaaatttttgggcacacttaacctgccaagatacagcttctccaacaattctccaacataagctcgtgagtataaaggcaacgtacagagaagacatcatcaggttcaagatctcaccagagtcggtaagcattacggaacttaagcagcaagtggccaaaaggctgaagctcgaaacggcagcctttgagctcaagtatctagacgacgatagagaatgggtctccgtctcatgcgatgctgacctcagcgaatgcctcgacacgtctgcagcaaaagcgaacacactgaggctctcagtacatgacgtgacttttaactttgggagctcatgcgaaagctcagaggaaactatgatgtgcttgtgacaatgcttcacttgtatacaactttcttgtatggatctgagagttttgtttcttatttttctctggaaacatgtcttctttagaagaaggttttagtgttctatttttttataagatgtataaaagcacacttctccacatcaatagatgttgattggaataatgatatataattgttattatttacctatgtgacttagcctattacttggattgaattgatttcaaaattaacataagtgaccaaatttatacaagtgaccagttttgagtaatttaggggaatggccaactttatggaggttttgaactcccaaacctactcgctgctttcccttcttatttcgtgagcttttgggctaaaagtttcttattagttgtgtaattgtgttagtatattttctcattggtggaagaagcaaagaaatggcatgtatgacaaattcaatgccgttcattttagtggtattgttccaagtggggctagcagcagtggacattctcacaaaggatgtcctaaacaaaggcatgtacaattacgtccttcccgtgtaccgtcatcatcacgctactatttttatgacacttaaatgtcaatgacttaaaatcaatatctcacatgataaaaccttaatttatatgcatgcatacatatctttttcttttataactttaatatttcccttttgcacaaaaaaaaaaaactttaatatttcccaaaagcttggtccattacatcatatatgtatgcatgattttttccacgtacaaaaagcatattggtaaaaatagtatatatacgtttatggattattttttgaattggtttaagttaacttttatggtcttcctttccctggttcatgatcttgattggctcctgttcttgcatagtctagatgaaactccacaagctctctctcctttattttgacatcctccttaaaaacaatacccttttttttattcaaaaagttaataaaccgatgttaaaactttctaatcactatcataaagtgttgaaaattggcatggaaagtagggtaaagattggtgtttactttatctcacacagcaacacaacgttaacacgccattaagtaaccattttttataatctattaatgtttatctcaaactaagtttctatacatatgatcaacttatgaactgtggtacgcgaatcatgatatcatgatataagatacaaaagttgagtatattgtatattataaaacggaaaggaaagaaattttaccttctccgacctgagattcacaaaatgacgaggggtggcgtttgatacatcagtggaggtgatagtgaaaagaagaaaaatgagaactactaactttgtattatagctcatatttgttttttgtttttccttaaaaaacttaagattagcaagacataaaatttagtgggattttatagagacatatgagatgagttatatagaagcaagaggtggagatgacattgtgataaaaggtttgttattcattttggaaacacaatgaaaagctatggataattataattgtaaatttctaggaatattataattagtcacataaaataagataatagttttttcaacaaatgaattatcaaagtcaactaggtgcactatggatcctctttattctcctcaattcatcatgtctcaatttgctttagtttgctcataatttaacaaatatatacgaaagtacaatatacattttgcttgtttatattggtactatttgacatggacctttacttgatttcaacataaaagtcttttatctttattgctaatttaatcattacctattggaaccatgatatcaccacatagatcaaactttaataggaaataaatataaatggactgaatggtacatgggggaggctggttagggtagtggccgtgataatggagaagagcaccgtataatttgatatattcctaataaaaagttgagtgattgattcatatctcgcctctttgtttatatctctttcaaaacctttaccaaacccataaagcctaattcattcgtctttttttctttaatctttatgtacccacaagcactcatcacatattctacaaatttcttaaagcaaaatactatcactgatttttttctaaaaatgattcgatcttatcaaacaaaaatgaggattatgatgggcaacaatgaatgggttatatggccatacaatttattctattgggctttagaaataagaaggtcttctatctccatgccactcaaaatttcttttctctggtcttggtgcccttcttcttatgttcccaaatctggagtaagttgatgagataaaaatcataagtttatatatcttcactgtttttgctcaaaattccctttaatgcttctcttaaagacatagcttaattgtgtccttcattcataggcatttgttgaaagataagtaattaatggttaagaagaccattcctctgtcacttggcttcttatcttgtctttatggatcaagtactactggctcagagaaaactgcatacatgaagatttgaagaaaaatgagactctgaattgtctacttcaaggaatgttcaaagtgtcgaaagcaaagatgagaagcatttcagaatcagactctccttggaaatggatcatcatcgtgattactttaaccttcagtccttgtaaattttaatcttctctatgacgagtcttcagaaaagtaaagactcagctagcctgcgtacaagtaataaggagaattcttggccccatatattctggtctcaatcgataagatgacttcaatatctgttagttcatataaatacccatgtaagggaagcattctgtgctcagattggtatcttcctatagcatatcttcttgtcatccagactctatcggaaacgacagctgaagttatggtagctgttgacgttaccagtgagtttttctagttttctttgcctgctgattgatcagcttgatcatccaaataaatgcgtcaaggttaacaaaccggtcatgtgaaagggggatttgcaactctactttcaagagctgctcatattcaaaatgagttgtttgataatctatctgtcaggctgaccagacgtccaaatgtggtaagaaaatttgcagaagctgttttgggcgttgaaactgaaaaacttgttaggaaaatggtccctgttgttcttcttcctaagctcttggtatattggcatttggcaggatactgctcaagctgccaaaaaaaccgtcttcttttcttctatgtatgttatgacgaaggaatgttttaaaaattttcaaatagggatagattctctatttttacatggtatgtttgggattactaaactctttttcatacacaaaaaagttttaaagatttaaggatttcttcccaaagaaacggtttcgttgtttgtcactttgttagttttgggaattgtgaccatcggagcttccttatatttttgtatatatatccttggaaaaaccatttgattctcgctagtaaaagcatgggaggattttatagaaaatctaaaataaagttttaagggtattttacattagactaaaaaaaatctaaccttaggtaaaaaagaaaaacataaaagaaaggttgattaaaaaaaaaaagttgaataaattagctaatggctggtgaattaatcaactatccaataacgattcactgagaggaaaggtataaaattaaaaacaagacatgggtgaactcaaatcttctgtctagtcgaaaaaagagataattccacctccatcttcctgttacaccaagcctcctggctcctgcttcatttctcccaaggtttgtgtgttgtgtctgtcctgaatcatatttgaccaacctaattttgttcccctttgatttatttagtttagattaattagggtttatgagtaactctggctatatatgttagagaggacttgatatctaaaactgtgatccagaatttgcatgcgattcgatgaatcctagagagttcatcagcaatctgccagatgagattcttggcaaaatcctgtctttacttccgacaaaacttggtgtttccacatctgttctgtccaagaggtggaggaatctgatccttctcgtagacaacttcgatttggaagactcatcaactagtggcttctctgctttcttggagcaaactgttgctcgcttaaacacttgtcccatcaagagactctctctcaatggccgccactatcgattctcttctgctgacagttggattagcactgctttcgaacgcggctgcttggaactacacttgcaatcccaatatcttgatacaggaatcttgtctagtaacacattggttaaactcacactatccgatcaaatttatcttcaagggcttgttccccatgatggcactgtgtttttcccagcgctcaagactctttctctcggtgcagttgtggctgatcgagatgtatatgagtcgctcatctctggttgccctgtgctcgatgagttatccatacgtgatggttgtgatgacccaccaacttggaagaagtcagtggttaataaatccgtcaaacggctcacggtttctttccatcatcctatgtccgcatgggcttatgaagacaatgtttggttcaagacacagagtcttgtgtttcttgactattctgcttttgtctcccaaggctatactattgttgatcgtatggattctctcgttgaagctagactagatcttcgattgtgggtgtcaactgattcttatgatagtgattatgaagacaaagattttgatgtctatcgtccatatgatgtttttggtgatgttacaagcctggtttcagggatacgcaaagttaagacccttcacctgtctcctgattctcttgaggtcagttctgttctgctactgctgactgatgggtggttttatcggttttgtatcatgtctatatgtgtttactggttgtgattataaaccaggcgtttttcttctgctgcaatcacatgccggtcttcaacaacctccgtaatctatctcttgagagcgacgaagaaaaaggatggcaagcattgcctcttctgctcaataattctctaaatcttcatactctatctatcaaagtatgacatgtttttgagaaattaatacacaatgttctttttggctcttatgtaaaagaagtttgtctgatttgttgttatggtttttagggtcttgtgcacagagttactagtagatgtggagacgcatgcgcctgcattagcgagaggaagacaggaatgtgttgtttatcggcatgtcgaatcaaggtgctagagattacagggtatggaggaagttttatagagctgaaacaaatgaggcattttttgggaaaactgcaatgtcttgaaactgtgagaattggtgttgaaagggacggcaacaacgagcacctgcgagccaatctaagctctcttcatagagcttcatcagagtgcaacatccagttcatttgatctctctttaaacaagttatagataatatgagtttgttagtaataaaaatatgacattttgtttaatttggtaaagttttgcactgattggcgaaacaattaagaggtctagttttggtaaaatccaaattgctaatctatcatctctcaaacatgtgttaacaaaaacaaaattgaggacttttgatttcacaatggccttgagccatgttaagagggaacaacgttaaccggattaaatcataatatttggtttggtttagtaaattagaaaacgtactgtatactctctctgcctgagggagaaggttccaaatagccctaaaaagcttcgccttctctccttgccttcatttcgggtgtggaggaaagttatcaaatcagtttttgtggaattttgaatctcgtcgcttctgtgttggctatgactgaagttgcgagctcagtggtgtatgaagtgctcggacgcagagctcaggatgtggacgagccgattatggactacatcattaatgtcctcgctgatgaggatttcgacttcggtgaggaaggtgaaggcgcctttgatgccgtcggtgagctcctcgtcgctgctgaatgcgtttccgatttcgaagagtgccgtttggtaagtaaccattcgcagcttgttgcttggctttcttcatttcaattatcgtaattctagattcgttttatctttgcttgtttgtatttatgggattttttcgttagggcctctgtgactgttgaaatggtttcaataaggtctcgcttttgaatgagctgagatatttaattggatgtggtgtgtgtaggtttgtagcaaactgtcggataagtttggaaagcatggattggtgaagcctacacctactgtgaggagtcttgctatgcctgtgcggatgaacgatgggatggatgatggacctgttaagaagaagaagccagagcctgtggatgggcctttgctcactgaacgtgacttggctaagattgaaaggagaaagaaaaaggatgatcgccaaagagaggtatacagtaatggcagtttttttaccggttttgaactgagaatttgtttcttatcttgtgtttatttactggtttcttgtttatgcagctacaatatcagcagcatgttgctgaaatggaagccgctaaagcagggatgcctactgttagtgtcaatcatgacactggtggtggctctgctatcagagatattcatatggataactttaatgtttctgttggaggccgtgatctcattgtcgatggatcaatcaccctctcttttggacgtcattacggtgggtttgatcttcgtttttatttgttttagctgtctgtttaatccaaggaatagacggtatggaaaatctaccttacaaatgggtatttgctctctttggatgactttacaggtcttgtaggacgtaatggtaccggaaaaacaacttttttgaggtatatggctatgcatgctatagagggtattcctactaattgccagatattgcatgttgaacaagaagtcgttggtgacaagacaacagccttacagtgcgttcttaacactgatattgaaagaaccaaactgttggaagaagagattcaaatactagcaaagcaggttagacacaagctactttactaatatgtattagcatttactcactcaggtgttttaccttttcgtataatctgtctttggtggtaatgttgacttttgtttggttatctgaagagagaaacggaagaacccacagctaaggatggaatgcctaccaaagacacagttgaaggagatcttatgtctcaaaggcttgaagaaatatacaaaaggcttgatgcaattgatgcttatactgctgaggctcgggcagctagtatccttgctgtaagttgctctttaccattataaattttctgtagccctttagagttttcatttgatagcatagatataaacgatatctggacccaagtcgtgacccatcactacataaatcatataaaatgctagatttgggtgatatctcctgttgaaatcgttgcatgttcttttgttaccttcaacttctgagtactgctaacttgcaaacgttcgctgtgcaatattttcagggtctaagtttcactccagaaatgcagctgaaagctacaaatactttttcaggaggatggagaatgcgaattgcacttgctcgtgcactatttatagagcctgatttgttgttgcttgatgaacctacggtgtgttttctttgtaaggtttcccttattagatcaatatattttcaggtttctgacattcttttcctctcttttggtagaaccatcttgatctccatgctgtcttatggttagaaacatatctaacgaagtggccaaaaacatttatagtcgtttcccatgctagggaattcttgaacacggtacatttttttctctagtgatctccttgcagttattgtttccccaatatctccggatatgtgtaaaccatatgtttggttgcaggtggtcacggacatcatccatttgcaaaaccaaaaactaagtacctataaaggaaattatgatatcttcgaaagaacacgggaagaacaagtgaaaaatcagcaaaaagcttttgaatcaagtgaacgatcacggtcacatatgcaggtttcttttcttcttctggaaaatgaactcataaattctgtttccaactcgtctctggtttgtttaataatattccaacatgggatgtaagtttgatgcttgatatcttgttttctgctacaggcgttcattgataaatttcgttacaatgcaaagagggcgtctcttgttcagtcaagaatcaaggtgtcaactgttacaactatttatgtgattaaattttggccatcagcggtgctctaatattattgtgtctatgattcaggcattggaccgactggctcatgtggatcaagttattaatgatcctgagtaagcgagcccctcttatatatatgcttaactactttcaaatgatattaggaatgatgctataatctgatatttgataaatttgctacagtacgattcgatgcttactctcagctccagccttttatgcattaacctcttgtcttatttttgcagctataaatttgaattcccaactcctgacgataagcctggacctcccatcatcagttttaggtttgtcatcttcctgaaatcagctgtgtgaatctgacagaaacttctctaattttggtatggggaggatccagatattagcatgctaaattttcttgctcgtttattttttctacagtgatgcatcatttggctaccctggtggtccgttgttgtttaggaacctaaatttcggaatagatctggacagccgtattgcaagtaagaaggctccccccctctcccttgattatgagatcacacagatgatacatgtttataaaccttcatctatcatatgtggaaacaacaagtgcagcatcaaagaacatgtagaacttaaacttttgatgttctccccagaattttaacctctatatatggttttctcgtcgatttgcagtggtgggacccaatggtattggtaaatcaacaatactcaaacttatttctggcgatctgcaaccaagctctggaacagttttccgttctgctaaggtatggcagaagacttctcttttacctgaacaacaaattgatcactgtcactctggaacatatgggatgaccttttattaaacctcaaataatggggaccccttctatattcttacgaagcattgatattttgaaagtttctttgacagtaatattattaaatcttggttttcattacctatagcttgttttcctgctctgttaagtgttaatgctaaatttggtggctctgatatggtgtattgatatctttatacaggttcgagttgcagtctttagtcagcaccatgtggatggactagacctttcatcgaatcctcttctatatatgatgagatgctacccagtaagttcccacacctgtaatatccctcttatttgcaggtttcagttaacatgagatcaaaattgagctaaatgtttcttgtattagagtttacagtcttgtctacttcttacaagttatatgcacaatttaagtaagcaaaatgtacataccctcggcttctcaatatgtcttaactggtatgttatttgatgtggcagggagtaccagaacaaaagctgagaagtcacttgggttctcttggggtaactggaaatcttgcactgcagcccatgtacactttatcaggtatacttcgggtatttggagttgtataaccacaatattctagatgcaggccctagaatgaaattggaactagtcaatttttatgtgttgtggcttgttacgttcactaatgtgttttatgttttggggtgtgaatgggaaattaggtggtcagaaaagcagagttgcatttgcgaagataacattcaagaaaccacacttgctattgcttgatgagccgtccaatcatcttgtaagctagacatatgtattcatgcatggatctttttaataaggaaggatttcagtttgctaaaagtaggaagtataataaataatgtctcaggatttggatgccgtggaagctttgattcaaggacttgtcttattccaaggcggtatttgcatggtactcactcaatcctcttaattggttttcaagattagatataaatctgtgtaccgggttgggtttattgattcatacacaagtaagaagcaatctttgttgttgtttgtttgtgcaggtgagtcacgacgagcatctgatatcgggaagcgtggacgagttgtgggttgtgtcagacggcaggattgcaccattccatggaaccttccatgactacaagaagcttctccagtcttcaacttaagctgcgccgcatttcttgtattccccaaatccatgttgcgtttttgtttaccctcaatacgacacaagagtcctttatacctgagaatttggcgacagtattttgctttatgtattaaggttgaaactaaaaagaaatactgtaaaatcatacacttggtggagcacgaaaggattcatatccaatgtgaatcatccgtaaaattgtaaacgagccaaattagaataaaagagcatgtttcgcagaaatttatggcaactaaaattcattgtacaggtacaggaatagcaaaaaaagaacatgtaggcccaaagacaagattacaagttgtgttttttttttcccacatatgtttaaccgaaagaaaaacccaaatcttcgaatcgagcaccgtcgaaccattaccgaggaggaatatcattccacaaatcgatatccttaagaacctctgcttgtggattcgattgttcagaagaactacaagactcttcaggccgtactagcgtcgttgcaaaacaatggagatgctgctgctttaaacaactccgccatagatcttggtgcagagcgtgggaatggaagatgatgacgacaacaaaatggatgacgatgatatagagatggatgggggtgaaggagaaagttatagatgtgttgaaggaatgtggtttcgaggagaagagatctttaaagctatcacaacaagtcaacaagagtttttgtatcgtctttccttgttcaacaagtctggtattcacttcacgtagtagttttgtgatgggaacgttttgacctttatttttattatacagatgtgtaccctgttttcgattcaagttttaacaccaatcaccagaaggaagcgtgaaagcagtgccctttttgatgttcctttgaaaatttcacaccatctgtcttcctcagatgtggtattcttttcaatttcttctcggttcgccgcaacaacagtgaccggtgcacccgaagatactttgagacgcttttacttccccataaggaggggagggcctagtgattaagtaggaaggagtagtagccggcgctgttgcaaacaccgaaggttggctgggaaagaaaccacttttcaccctgtagggagagaattgtttatgtttgtctttagtgtatgtgtttacttttgtgtatatgtttttgttggagttaagtgtatcttcgtgtgtatgtgtttttgtttgctttctttaatcctagagcaaacaatcaaccataaaaaaaaaaaacatgtctaagaagcaaccattagaaagaccaaacctttgcttttctgaagatggaaatatctgaaaaatgcatgcatttgatgtattagcaaacttagagttcaaatgcatgcattttcaagacattttaaggcttgcatcccaaaagctccacctcctacctttgattaaaagattaaagggctcgaaattttaacgaaagctggaaaaaaattcaagatgaaattgtttataggcaatacctttggtttgaaagaagtcgagaagtttgtatacaacaaatggatgacaaagtcagtagtccctttgcatcactaggacttggggagagaataaagttgattcctgcaagtttgatacaaacccttaatgagtaaagccaagaagaaaccataggatgttgagaaatcttgagatataaatacgagtcacaactttgaacgaggataaacaaatttttacctcatcgaaattggctgaatttcctggattaagaatcagctctgcctaccactacaattaaaacaaaagcaacaacattatgatattgaaagcagagaaaaagaacatgtgcctaagataagaacattatggatgagaataccccttgaaagcagagaaaaagaacattatgccaaataccccttggataagaattttgctgccttgacattagatggattctctggatttttctcagctacgtccttgtcacctgtatccctgtaaacaaaaacttttattaaacaataaactggattttctgcagtatccctgttaaaaacgagtcaccaaaagatgtggttagaatacaatgagggcagaggttgatttattctttaatgatctaacatttgtaagagatgtacataagaaaaaacttaccattagaccaataccaagttgatgtaacatctggtaataagtagacagacaaatctaattggagatgagatgcatacctcttcattagacgtgagattcttgtagtatccaaagatggaagtgttatattcttcctctcatctctctcttactcttctgtacttactcgagcctctaacccatcaagcgttgcacagtgatgtgccttcgctaataagaagagcttcaagagctagtcacagaacattatccataaaggcaacaagccttttccaaggcaaatctaagcagaataatgaatttatatcatgatgtcccaccaacactacaaggtgtatatactttatgcagacacttgaatttctctgtcccaacctagtaagaaatagagcttatgcagaataatgaattttctcatctgagaacatcaatatgcagaagatagaatattgctccctcatgttggcccagtccaacaagttatgaacattccacaacaatatataaaactgtttcacaagtcttgttaaacacaacttgcttgctttttcgtgctgcccagccagcattattgaatatcatatctcagtgagatgtataatgatgtgcctcatttctatctttttccttcgtgctttgctcgagcctcgacctatcaagcgttgctcaatgatgtaccttcgctaacaggaagagcttcaagagctaggcacaaaggattaacagaagttgaagttttctttatagcagaatattgaattttaatgctgcccagctccagcaacatatcttccaattgtccatcaatttgcagttctccatatgagcagatcattgaatttatccccatcaatatgcagatcattgagttattaagcagataattgaatttctaacacgctgcccagccagcaatatatagatctcttactgttaaacaagtcttacagtgttataatcacacagcttgcccaatcggacatcatagacaagtcttacaaaaggcaatttatccccatcaataataagcagatcattgagtttttatgcagatcactgaattttttcccatcaataagcagatcattgaatttatccccatctatataagcagatcattgaatttatccccatctataaaagcagatcattgagcttttaagcagatcactgaatttatccccatctataagcagaccattgagcttcttttaagcagatcattgaatttatccccatctatataagcagatcactgaatttatccccatctataagcagatcattgagcttttaagcagatcatagagcttcttttaagcagataattgaatttatccccatctataagcagatcattgaatttatcctcatctatataagcagatcattgagcttcttttaagcagatcattgaaattatacccatctatataagcagatcattgaattttccccatctatataagcagatcattgaatttatccccatctataagcagatcattgaatttatccccatctatataagcagatcattgagcttcttttaagcagatcattgaatttatccccatctataagcagatcattgaatttatccccatctatataagcagatcattgagcttcttttaagcagataattgaatttatccccatctataagcagatcattgaatttatccccatctatataagcagatcattgagcttcttttaagcagatcattgaaattatccccatctatataagcagatcattgaatttatccccatctgtataatcagatcattgagcttttaagcagatcattgaagtttatataatgctgcccagccagcaatatatatagaagataatcgcaaagatttgatctttgaacataacaagacttacaatgtttaatcacagcttcttacgattcaattatccaatctttgtgcataatttgtcaagacttacagtgtttaatcacagcttgccagccttacgattcaattatctaatatttgaacataatttgacaagacttacagtttttgatcacagcttgcctgtcttacgattcaattatccgatatttgaacataaatctgacaagacttacagtgtttaatcacagcttgcccctgccttacttaggcaacatcgggacaaattttcccaagttagaaaccggacaaacacaatcatataatgtgtagttccctttcttttgggtttgaacaaaacataaaactttctttgaaacgaaaacagagaatcgatgatggggtttctaatccagaaaaacgaaaaacaaaatctttaaaacacgatccgtattagaaacccaaacaatctttcacaaacgtataataagaaatcgcagattttaaaagagggtttctgatttaaaacagaccaaaaacaaaagaatagaaaccctaattggtaaccacaaatatgtataatttttgaagaggaatacaagattgaaattagaaaccctaagacaaaagacggtttttttcttagattagcgatataaaagaaatcaattgaaactatgattctgaattacaagtttttggaaaatcaagaacctcaaaaatcagatctaaaagagggttttttcgatttgcacaaaaaaaacaaacataaaatcgaaacgcaatttggaaattaaagagagagaacttttggataaaaattcaaaatcgaagtagtgaatctggaaaaagggagtttcaaaatctaagaaaacgcaaacaaaagtctccccaaatcaaaagaaacacacgaaatcaaaagaatataaaagaacaaacgaagaatcagacaaataaaagaagtaagcatggcgacgagcgagtataaataaccgttgtgaaatagaagaaagacggtggtctctgtgttgggcctaaatgaatatgtaagcccaaatacaagttgtgttgttttttccctcatcgtaatataaggcccacatatgtttttttttgtcgtcgaaatattttataaagcccaaacgaaggcccacatatgtttaactgaaagttatggattttccaaagagaaaaagaaatacaaaaattaggatccgacccggctgaacccgagtggtttgttcttgttcccacggagaaaaactttgctctccctttcctttgtcaatcggaatctgtcccatttatcgattcttcacagacacgttttcttcaatctttctccattggtttcgttctcaaggtttgtttgtgtcgatcgaatttagtttcaggacattgatcgtaattggttctgttgcagtttgagaattgcaattgttgtcatgtttagatagtggaaccctaatttgagtcatgaaatctctggatcaagtagaaaccctaatttcagggcctccctctgaaccgtcgtcccctaatagagacctagataaagatgaagaagaagaagaagagtgcgagtatgatgacgaggaagaagatgttgatttcaatccctttcttaaggattctccttctcgtgaagcttcttccagtttgagctctgaagttgagactcttgatggtgaaattgttaatagcattactacggttccccaaaccttagagggcagacaaggaaaggaggatattgcaatgccaagtaatgatgtctcgtgccaagaaccaccaatccctgatgagaggacagttggggccgcaaatgaaaacggagaacaattggtgatccaaactcagaagcaagatttgatgtcaactgaggaagatgatgcaatctgcaaacggactagagctcgctattcgcttgcgagtttcacccttgatgatcttgaggcttttctccaggagactgatgatgaggatgatattcctaatgtcgatgatgaggaagaataccgcaagtttctcgctgctgttttacatagtggtgatactgaggttcccttggcacagactggaactaatgatgacgatgatgatgatgatgaggataacgatttagacttcgagatagaacttgaggaagcgctggagactgatgacgaggaaattatacctgaaaaggtcactacaggtgacaacataagcactaagcgacgtcctgtgactaggcagaagagacggcaaaatatctccattcatcacaaaaacaattctcctgaacaggctggcagattgttacgccctcttgtacctatcttacccattgcaccacctgggagaagggtttctgctactgaagcagttgcttcgtcagaaaacaggacaataaatggcttcactcaagcccaaatgggagaactgcattctttgattcatgatcaccttcaacttcttatccaagtgtactctctttgtgcacttgatcattcacggcaaagcattggaacccacgtccaaggacttctatctgagatgctcaaacaacaccaaggatatatctcacgccgaagtcatcttcttgtcactggttcagcatcatcggttcttgatgttgtgggtctagctggaagatatctagttgatgtttctgacggtatgttattagtgaaatagggtgctatatctccatgttttcttatctgtttatacaatataattctcttgattattgaatcattgtagctgtgcaagattatcgacggtgtcaagtggaatccggttttgatacttcgtctcaaagagtgccattatttacacttcctcaccaagaagttggcggtgagattgtaaactatcctctttcatcccctagttcaagtaagtcaccatcaggtcagcagcaggctaagaagacgttagctgctacactggttgaatcagcccagaagcaatctgttgccttggtccataaggatattgccaagttagctaaaagatttatgccattgttcaaagtatcgctatatccccacaagccacctcatgcagctgtcgccaatcgggtccttttcactgatgctgaggatgagtaagttccttcctttttcttggtctactctactaattttgtcgaaaatttattcctagtgctgtttgaatgcagattactagctcttggaataatggaatataactcagactggaaggcaataaagcagcggtttcttcctagtaaaggcgagcatcaggtaatcatcactggattcctgcagaactaggaatggtttttcggttactaagtaatcagttggtgttttattggattgctctcattatcgtagttcgcgtaagggttattctgaccacagtctctgaagtatttagataaaaatatgaagattttaaaattcagctgctatcttgacaaaaacttctcgtccatgcaattcctgttgcagatgatgtagttctttcagttttctgctttcatgccagaaacttatggattggtgtactgatgttttcaatattttaaacatattaagttttatgtagacatgtccaagtgttcatcaaccaggctgatgatcaaggaataaaagacttgtctcttctaatactttcgacttgtatttgtttcagatttatgttaggcaaaaaaaccggagatcatctaaagccccagaaaatccaattaaggtctgttatatgcttgagttggtttatcaccttttttatttgtatacttatatttctatctatcagctccataaattcagttgcctgaacttgtttgttgacaaataagcactgtgaaaccattacgtctatatgagctctaccatgcacgcaaaataaatcagtttacgaactcattgtcataaatgataacgttggatgaccatcttgtatgcttttataccgaacatgcattatgcaaatgaacattacatgtttaaggtggacaccgactgtccccagtaagatgcctcaaccataattttaaggttatgcaggatatttcccctaactcgtgtgtatgtgtatattttgccacacaggcagttctgaggatgaaaagctctcccctgacaccacaagagatactacgaatacaagaggtaatttgacaagcgcacccttttgcaattctgattggaaattgttcttgggtgctcaatataagtttgaatcctcagggacttaagtacttcaaatatgattggacgtctgtgtggaaattcgtcgtgccttaccgagacccatcattactgcctcggcaatggcgcactgcccttggaattcagaaatcatataagctagatgctgtaaaaaaggagaaacggagattatatgatacaaatagaaaattcagagagcagcaggcatctgcaaaagaggtctgtctttcatatctctggttatctctcaaatcatacaactcatccatactgaatatgttagtttttcgctttttcgtaaaaaatgtaatttagctttactcatcttttcatcgcatgttgcaggatcgttatggggcttctaaagccaatgaatatcatgttggtggtgaattggtcgagagttcaggtgaggcatacctacatgaaggatttttagcagactggaggcctggcatgccaacctttttttcttctgcacctatgcactcctttgacaaggcaaaggatgttcccggtgatcgacatgagtcagtgcaaacatgtatcgttgaaggatctaaaaatcctgaactctgtggtgcccaaatcctgacatgtacgcagaggcttgcaccttcattcattcctatgtaccgccacacatctggtacagcacccggtgcctcaaaagcaccgataattgcgcggccatatcgttctcgtaaagtattcaacagaagtgttgtgagactagcccctgatttacctcccgttaaccttccatcgtcggtccgtgttatctcgcagtctgtttttgcgaagaatcagtctgaaacatcctccaaaacttgtatcattaatggtggcatgtcggatgtttctgggaggggaaatttcggtattgaaactccttgtttttcagctgacagagataacaacggtcctcctagcgaaaaagtggtagatttgcaggaagatgtgcctgccgagagctcctctgggatggacaagcagagcaatgactcagatcttcaaatgcatcctttattgttccggacccctgagcatggacagattacatgttaccctgcaaacagagacccagggggttctagttttagtttcttttctgaaaatcgacctcagctgctaagtcttttcaacagtccaaagcaaatcaatcactcagctgatcaattgcacagaaattcatcatcaaacgaatatgagacagcacagggcgacatctgttttcatcctcttcttcaaagaaccgagtatgaaacgagttatgttattagtagacgtgggaacttagacccagatattggtaagaaagacaaattatgtcaacttcaggatacttctggtgctgttgagaagactgcgatccctgttactggtcgtaatgatgtcagcttggaaccttttagttctagcacacctggtaaaaatgtgaacttagatatctatctaagtacaagctcttctaaggtaaataatggtggtagtgtctcagcagcaaatatttcagaagctccagacatctgcatggctcaacttaatgatggctctgaagtacctggatcagctccaccaagtgataatattagtagatgcattgaagagatggctgatcaatctaatctaggtatagtgatggagcaggaggaattaagtgactctgacgatgagatgatggaagaagaacatgttgagtttgagtgtgaagagatggctgattctgaaggagaagaaggctcagaatgcgaagaaaacattgaaatgcaagataaggtaagttttttttttttttccagttatgtacaatacccacagagctgaattatttgtttcgttagtttcgtttgtctcaacttaggctattgtgacaataagcttcaagtatatatggatcctaatttccagtagatatagagatttcctctttcttgtgtagttatgtggcttgtggatgatcttggtgatgcattaacttttccatctacaggataacagaaactctgtggtagaaataacttcaacagatgtcgattctggcaaagaactaggcaaggattctccaaacagtccttggttgagtctggatccgagtagccgtcgcttaagcagtaatgttaaggacagagagaagatagaggcaacaaatgaaacgaccatctcacagtttggtcctagtagatcacgcaaaaaagggacaccagtgaagagcagagatgcagaatcaaaggaagaagcaggagttgctcggttgagactgggtcctctcgccctccccccaatgaagaaacccagaaaatgtggtgggcaggcggaaacaagtccaagtattgagacaacctgagaaacttgttgagccagcaacaaatgattagctcttctccactccaaattacttacaggttcagagatatcatatcatggccaatctggagagctgtgttctttctgtatttcctcttggaggttatggcacccatggagtttgctatgaacgaggtttggtcacttcgattagatacgcgaatatgacgcagggtgcagagatgagtagtgcatgatgcagaaggacgaaaattcggcatgggcagattcaggtcagccatttcttttttgagataccttattgcataaggagggattgtttctacttactattattctgtagatattttgtatcagctgtgtgaaagagctgggaatactaatcaaagagtaaatatttgtattgttaaagaaagataggttagattttgatagtgtataatagcatttatttggcaccatctcggttgcaactaggtgttgttacatttagatttttttcgaactctttattttcgagtcctgagacccattccatctttttgcatataacatttttattggcagggaagagataattatagagtggtcaagaagagaagaataagctggaaagggaagaaatggtggaatccggccggcgcttctggtgatttggcatatgagcagtgctcgagtgagctgggatgattcgagcttaccagtagagtgatggagactctatgtcaaaatgtaaattaaggaccactttggaatgttattttttggtcaaatagttggcctgatttgtatgcaaatatatggaatacagaaaaaggattacactttgcatgatggcaacatttcaaacacttggtcgtataagaaattttaacacaaaatggaggttaaaaaattccttattttgtgacttgggtttatcccatacaaagcatatacagattacagaatcttaatcagtataagtttgtaaatgcaacaaaattgtgcttatgaaagatacaacaaaatgaacactgcaacctatctatgcgctagatcttcttttcccatcagaccttttaactttcctagagcaaatcaacaaatggctataaagtttgtccagtttcccatcataatcatatcgatgaccttgcttatactgtcataagcatcttcgcagaccgctttactcatgagctgctttgatgagttcagctgataagcttgtgtagtgatctctaagtgtctcatcatatatgcgttcacttggcataaacccatcttctttcattcttctacacagcttgtccgcttcacgctgtaggcctttcctgcacaagcctgatatcattgtaatgtatgctatagcatcaggcttcactcctttgcgagtgaggctacgaaataaacaccaagcctctttcaacttatcagttctacacaacccttgaatgatgatattatatgtaataatatcaacatccatttcactcttttgcagatcctctaccatcactaatgctttctctatcttcccgttattacatagacaatctaacaagatgttgtaggtaacaatatcaggagacacaccacaatcaaccatcctattgaaaaccttttgtgcaacattaagtttgcccgcttgacaataaccgtggataagcgtgttgtaagtgaatgcatcgccaaccaatccttgataagtcatctcacaaaagagtttcatcccatcttctaccctcttagacttacaaaatcctgttatgagagtgttataggtcacaacatcagggaagcaacccttgcttaccatcagatcaaacatatatttggcatcacctaagcaaccatgaatgcaaaacccattgatgagtgaattgtaagtgaaaacattaggaactacagatcttcggatcatctccttgtacaagtttctagcctctaaaaggttaccctctttcacaaacgtatcgatcagcgcagtgaaaaatatcacattaggatcgattttcctcttcaccatatctctgagaagtcgagcagcgtcggtccatctaccagagttagaaagaccacttatgagagtgttgtaagtaacagcatcagctctgattcctttcttctccatacagtagaaaacctcgagtgcgttattcaaatctctgttcttgcaaagaccgttaatgacagtgttgtagatgacaacattaggaacgaatccgaatccatccattgaatcaacgagagaaacagcctcctgaaatctattcccttgacagaaaccgttgaggagagagccaagagtgacaatgctgggacgaaacccaagtttcatcatttttccaagaagagcaagagcaagagagagtcgtgagcatcggcagaaacaatgaatcagaatggtgaagctatagagatcatgtgagattcccaaattctccatcttgtggtagagatagatgacaatgtcaaacttgttcatcttagcaatgacagtcaaaactctagtgaaatcaacaatgctaggaatgggacgagactgaagcatctcacagaacaaactaaatgcatcgtcaaactttatacagtgaagctcatttctcaatctctctctgtaatgatgatgatgactcgcaccggaaaaagatcgagagagagaagtctcgggattgttacctctctccagaagaagataatgccgacgaacaaaccccttcaccgatgacgaaaacgctatcggaattaatctctgcatccaaaatggattcgatttgcttctttcccaaatctctctcaaactctgcgccgaaccctaccaacgacgaccattgctccggcgaccagatagagttgtatctgaataataataatgtctccttctagacacggcgtcgtttcgagacaaattgtgattgtgactttaaattgtcttcaaagtccaatcagattactgttttcaaaactgatatgttttcaacatttcaataacacaagagtttgcatttacaatatttgaaatttcattttcattgcatacaagagaattacaacacaaagtaagttagatgtcaaattaatgaatttagttaatactaatgtacaagcatacagaattctaaagatgcaacaccatctctgcagcagttttatgcttgagtgcttctttacccaccggtcagtaagtaccacacacttcaagcttctcctgaccaaaaccaatctacacagtcccctcatatgactgtaacaaacaagcctagctcagagtcccaacaaaaaaacgtgactggactctgatcatataacattagctgacaaggcttatctccttattacttgagctatgctcttctagatggtcatcttccgcattcatttgacatatgatcccctcctctttcattcttctaatcagctcatccgcttcacgcctaggcccattcttacataaacctagtatcattatagtgtatgttctagcatcaggcttcactccttcgacagggagtctacaaaataactcccaagctttttccactttatccgccttgcacaacccgtgaatcatgatgttatatgcaacaatgccaatatacttttcgctttctctcatatcatcgaatttcaccagtgcgctttcgatctccccattaacacaaagaccatgtaacagaatgcagtgggttatgatatcaggagtcacgcgacgagaaaccatccagcagaagatgtctagggcaactctaagtttacccacctgacaataaccgtggataagagtgttgtaagtaaatatgtcggcattgaatccttcacaagacatcctttggaagagtttcatcccttcatctaccatcctaaacttacagaatccactaatgagagtgttatatgtcaccacattagggaagcaacccttgcttgccatcaaatcaaatgttttcttggcgtcatatagacgaccgtgcatgcacagcccattaatgattgaattataagtgacattattaggatcaacagagctttggatcatctccttgtacaattcttgagcctcatcaagattgccttgtttcacaaatacatcgatcaacgcagtgaaagtgacaacatcagggtttatactcctcttcatcatatctctcagcattcgagctgcgtcgctccatcgaccagaataacaaagacctgttaagagagtgttgtatgtaacaacatcggctccgagacctttcttctccatctcgttgagaagctccaacgcaatattcagttcaccgttcttgcagagaccgtcaataagagtgttgtagactacaacattaggctcatatcccgatttaaccattaaaatgactaaagagaaggcgtcaccaattctattcacgagacagaatccatggagcagagagccaaaggtgacaatgctgggctcataaccaagtttcatcatttttccaagaacagatagagcaaaggagagacgagagcatcggcagaaacaatgaatcaaaatggtgaaactatagagatcgtgtgagattccatagagttccatcttctgggagaaatagataacagtctcatatcttctcaaattggcagtggcagtaagtaatctagtgaaatcaacaatggaaggtaagggttgagaatgaaccatctcaaagaacaaagcaaacgcatcttcaaacctgatagagtgaagaaaccctgttctcagtttctctcggtaatcagaaaaagctctagcagcagctcctcctcctaaaaggttagggttaactactctccgaaatcccttcgccgtcgatgtcgcaatccccgtcacaatcaatctccgcatccaaattgactcaccggagaaagaagaagatggagaaagaaaagaaaaaaatggtcaaagcgacaacgtttggttaattggtctactttaaacgacgccgttttcgttgataaataaacaaacggtattttaattggtctactttaaaaatggtttatcgtttgcgttaacaaaatagttaaacgacaccgtttccttaagtggtctacttaattaagcggccccataaataggaagctaattaggagagattaaagaaataacccaagaaatccgttaactaattttgaattgctccgaagaatctatcaatggaggagagcggcagcaacaatggcagcgtgagcgttatttctcgagtgaaattcgatcaggttgccacatgggttgtttccgccttcttcacctctcttgaacgctgcgcttgcctcaatctctccaccaccgatcttgacgacgatgacgatgctaagtatcttcctctcgtcgtctccgctactcctcgtccctccgaagacattgtgtaactgtcagtctccgattccaattccattagtctctaataagattcgttaggaatgggtttagggtttcttcattgctatataaatcatcttttgtaacgaataatattattgataatgagaaaagaatttggatgattttgatcatactcagtgtttttcttgatcatgaacttaaaaagcttaggcatgtatgtttgtatctcaaatcgtttcaagattatgaacttgactacttgcattcatataatttttgtacatataaacatagttgattgttccaagatttggactgactttataacattaaagaatcagtctctgaatccttcatagtgctaaagccttagaaaacaaatatacctacgaatacaaatgcctaacttgtacacctacaaacgcaaacaaatccttcatatactcatagtggtaatttgtcttctatgtgtttcttaatgctgaggtttgtatagcatctgcattgaaaatgtttgacgccttccgtataacttctccatccaaagcaatgtgtggtcttcttgtggaacaggggtttagtctcttcattatacactaacctactcttttacccgaaatatatatacttatgtaggagtgtatacacgtacataccaatgtagtgaattaggatgagagaaagaagagtcttaatcacgaggctctctccaacagagcagcatgacgaggcatcgccttattatgtataatctcgatctcgtctccttcaaggaccgatttggagtcagcttgttgttgttgttcttcgcttgcctatgcaaatccttgtttgaccccatcaacttcacaatcatcttatgtgcccatcaaaagccaacttttctttccccctttataataagttggttcagggtatgttttctctgagtcattaagatgaatgtgaaacaagagactcaggcaaagacttcaactaaggatttgattggtattgtgcatttcaggggtttttctgttttgtcgtgctgcatattactactctattaggatcagtctcttcaaaccaaccgtccagagtaactgtcttctgcaaaacacaaccgttactttactcatttttctgtctctcctcaaaatgacaaacttccatcaattgtcagttgtttcaccttacacttgtccgttgatttttaattataactctgcatttttttcttactacctcaagtcaatataataccctggttttaggcatgcatgccttggaaaatgaatcataaactcgtaaaaattttggccctcactttcttgtctttctctaatatattatttattactattagtttgcgtagaaatcttgatcacttgaaattcataattaatttaggcgttaaagatcttcgataatggttcaagtataattttctttgaaaatttttgaaggttgaatctgactaggtatttaacacggagacgtttcatgtaaatccatagctcatgaatctcgtggctgtgctttgatcaacgaaactcgtgcttacttattttaatgtgattaatattattataaattaaaaccaagatacgatcttgtattaagacgtaagggatctacacttatacatcacactatcaaaaattcaaaaacgtatcgattaaagaaatcattttttaaaactttataggatatatcgcccgccacaagttattcaagtctaatatatagtcaacgtgtaaaaccacaaagttacaaacttacaataacattcactcgacccggttggatttctctatatttttttttatgtattgttgtaacaagaagaccaatacatgttgttgtgatctatcaagaggatttaccaagtaggcaagtaagtaaccaatgtttccaacaatttttcgttcaaaccacaaaatcatagaaatagtccttaagattgactgatttgagtatgtatcttgctaattcagcttgtgatatagtagcataaggaacgggcgttaattataccaacttaagcaaaaaaaaaaagtatatttatatgtagattctttttatataaaaaatagcgtcggtcaacaaatattagaatctaaccattcatggaagaaaagagtatgaaactgattacaaaagagagaatcaggtagccactcacaaaaatcccagactgtatggaccataatagcttgaatatatgtaatagttctccaaaaggctaccaataaaactaataaaatgattggttaataacaagataaaaatggtagcaatagtggcatgccaaatagaaaaaggatgtgaccaactctctcttggcaagttggtgtccaattacacaacctaacccgttttatacataaagcaaagattccaacattgtcaaggtcgttccaattccaaaggtggaggagtctcttttcttattcccattaatcaaaaagttgtatataatgtatattcaacgtctctcacccaacgatcatatttttttttagtgtgggatccttggaagagacaacgcctcccaaggtggaggagtttatttattcaaaacacttcatcaattttgagtttatctctacgtctcttgtatcattcatattatatcctgcaaaatttgcttaattattgattcttggaggttggaccacctttttctttaatagagagaaaaaagaaatgaattttcgatccataaatctttcaaaatttaagaccaatcattgaaaatatttatgatagattcacaaaatgtagatcattgaaaatatgtataatagattcacaaaacgtaaatcattgttttgtagacgaaacgtggtctctatatagtgaaatgatagcaacttttctctctttttttcatgagatgatttttttttcatataaatacatttgaatatgtattccataacctaatgtatctttgcaaattcttctacaattaaaggacatgatgcaaattaaataatctgataacttactaattatattcaatttctctgtaaagtaatattctatcttgatgagaaaacttcaagattatccttatattgaatttgacgtaagatgatttataattatgaggaaaatttttaatactaattagatggatcattctggacctgcaaataggacacatgtatatagagttgaaacatattataaataaaaataaaaatagaaattagtggaattgttagtgggtagtagttggatttgggtaagattactttatgatgaatttcatattgaggcttgaagatcttcttctcatccattgacggattggatcctccaagaacagagagaccaattagcttactctattgtgccattctccaccgtatcttttgcttcaaccacttacaattttacaaaggaaaattaactacaagacaatttacctaaaggtggaatttaagaatattctgaaaatatcactttaactacgtgtttgatgtatgaatcatatacaaatgatatattataagaggctttaaaaaaggatcaagtctttgttatattccttcgtttagagtataagcggtcctaaatgcacttgtagcattcataacaattattgtagcgcggtatacaagtattacagttatttacatacaaataactgtaaacgctctatggagttgagaaacttgtatgtaataagaccatcatccctacagttgggtttatacattttgtaaatgaaaattggatacatcttaggtccatgtagataaacctgcacttttcaatagagtgtgtgactaggtctgggagatagagtttccttcacttcttatgatgattataaaagtataggagggggaccatatttaaaatgtaaagattcggaggataataccattagaaagttggacatcattagtaaatagtgagtgttacccaaaacaaggcactatctatgcattgtttctgcttttatattacagtttttctttatatattttggacgattatggtttgtattcacataaatttcaattataattttgctatatgattcatcttcctctatcattcctcttagtcaaatagagttggctaactaaaccttttattttaatcaaattactccgttttaacttgttttggtgccaatcaaaaccaaattttatacactaattatttttactcgtttttttttacaaaaacattaagaatgatacaacataaaaaaatgttgtctccctttatccgcatttgttcctcaaagatgtagcactataaatagtctcatcaccctaagaccaaaaccccaacactcaaactcaactgctctcccataaccgaaaccgagagaaaatatagaaaaagatgattgagacggttaaacacctgatcggctccggtggtcccagcggattcgggtcaagatccaccgccgatcatgtcacttgtaattctgatctccgttctctaactgccatcatcactggttagtcataaacttaaagttacttcttctttttcaacttaaccgagtcgcaaaatgagtttcctaactaatagtctctctgtttcttttctactaggcgcgacgtcggggataggagctgagacggcgcgtgttcttgctaagcgtggcgcaagacttgtgcttccggctagaagcgtcaaaaccgccgaggaaacaaaggctcgtatactgtcggagtttcctgatgcggagatcatcgttatgcatcttgatctcagctcacttacctctgttcgtcgattcgtggacgatttcgaatctctcaatctcccactcaacatcctcatgtaatttaaactctatcttcataatcatatagcgaaaatgtttttatctgattttttctaaccttttgtaaacttttttggtttgtgtttgtaacagaaacaatgctgggaaatatgcgcataagcatgccctctctgaggacggtgtggagatgaccttcgctactaattatctcggtaattaagttttcataaatccatcattgacttataatatatcattcattgatttatatgttctctaatagtaattcatggtgtgtttaggccattttctgctgactaaactgctgttaaagaagatgattgaaacggcggcacaaaccggcgtgcaaggccgtatcgtcaacgtcacgtccgtcgtccatagctggttttccggtgatatgttgcaatatctcgccgatatctcacgaaacaataggtaatttttaattagtataagctagaaaatatcattccaatcatatagcgaataattaatcattgtttaataataagtacaacaaaaaggtgatgcgacgacaaaaataaacgccgtcgtcctctcgtctttttcctttatttaaaatcatattttcagagagaataataatagtttatactttgtgacttgagtttgacccactaattatagctttaactttgcgttttacagaaattacgacgcgactcgagcctacgctctctccaagctcgccaacgtgctccacactgttgagctatcacggcttctccatgtacgttattatacaaatttaactatttggtaggaagtaacaatttatctcctcatttctaataataaactacaatatatatgcagaaaatggatgcgaatgtgacggccaattgtgttcatcctggtatcgtgaaaacccgtctcacaagagatcgagaaggcgtcgtcactgatttagtgtttttcttgacatccaagctattgaagtctgttcctcaggcagcagctacgacatgttacgtggcaacaagtccaagattgaggaacgtgtgtggcaagtacttctccgactgcaacgaagctaggtcatctaaatccgggtcatgcaatctcaaagctcagagactctggactgcttctgacttgttggtttctccacctaattccactaccaatctttctcatacctccttttaaccaacaaaccatcctagctattttctacgtgtaaatcttaagccctatatatagtaatataattagctttataatatatatagttatagaaatatatactatagatgaaatgggatgtgtgtgtgtagttgtgttacgtgtgcatatagcaagcctccctatatttaatatgtggttatggtttgacattattgctaatatatatatatatatatattacttagcttgtagggttttgtaatcctagctagctaggtccttgttatgtaatatatacatatatcaatcaaaaacatcacagaatttcataatcttgatcttgatactcttataaaaatttgtttatttctgttgatcactgaaatgaaatcatatccatccacacaatccaaatatggttcctttgcaatattagcaaccactcttcaaatgggccaataatgctagtcactgctataataaagggcttttaggcccattaaataatcatttggtctttcaaaggcccatcacgctaagccctagaccctcctccaaagaatgaaatgaaatcctatccacaagcctaatttggttccttttcaaaatacataccaaatttcgatttgtcaacaactcgtcaaatggatctcgaataatcactaatcactgctataataaaggcctcattaggcccattatagaaacatttggctctttgaaaggcccataacgctaagccctagaccctcctcggaggctaaaacctctcggctcctcctgcaacttccatttcagttcaagctccggctgaaaatggcgaatgcccagaaagtcttcactgtagaaaccctaagatctgcatcgaaacagtgtctccgctgcctagtcgtccccgtccgtctccgccgcgctattaagaaatatctccgcgaggaagatgatcctcacattaggaagaaggtgcgtcagttatcggaatcattccaagagatcaaggacaccaatcttcagttacctgaaaccacggccaagagtctggctgattctatgaactcgctagagaccaaacgatggaagatacaaaccgtttatggagatagcggtctccaatacagagacggtgagactgctgcttacattgcttctcgtatgcctgccgtcttttccgtctgctatagagtcctcatcgaggtactttctcattggtgataccatttgggatagttgtgtagagaattgagcttgagatttgttaaattcttatatagattcgtcgaagagtaccaggttttacgcctacaagagtgctggattttggtgctggcactggttcaggtttctggtgaggagatagatgtttccctgttatctttggtagttttattttgattattgattcgttgtaacatcttgcagggcggttaaagaggtttggcctaagtctgtggagaaagtaaatatagtggaaccatctcaatcaatgcagcgtgcaggacgtaacttaatccagggtaatttcactttgatagtctctggctaaacacttgagtgtagtgattgattctgatctttgccattgttgtgaatatgataggccttaaggatttgcctctgatccatgggtatactagcctgctagctcttaataaagagatcaacaaaaagtctgagaggaaacatgatcttgtcatcgctgtgggttatctcttttatcactcgcattagctatgattcttgtttacaagtttgtttttttactgagcatgttttccaaaaaaaattctgttgtggttaagtcctatgtgttaggggagataccatctctgaaagacaggattactgtggttcgccagctctgggaccttacagatgatctcttggtatgtctttgagttttttcatctttcattctcctcaatgacttctttttatactagaacgtgtacttctcctcacatgttatctctgtgtgcactgtgcatttttttatctgctatatgcattgagctttatgaattccttacataaattttgattggacaggttttggttgaaccaggaacgccacacggtgctaatattatatctcagatgcggtcccatatactgtggatggagaagagggtacttttcatttgcttacacattttcatgctcaaataatgatctgtttctgttttcagacgttatttattcctcttctgcttattttcaaagtattcattttgtcttagaaactgcgtaaactggaaaagaaaatgaagaaagatggaaaggaggtgctcgatctcaaatctggtgcgcatattgttgctccagtaagtatcaatatccttcctgaaaaactctcatccagttgtcaaacactaggtcatgaacttgatgtacagattttatgaatatgattacgtgaatgtattgtaacacaaagaaggggcttgtaaatgcagtgccctcatgatggaaagtgtccgctggaaaacactggaaagtactgtcattttgttcagcggttgcagagaacttcgtctcagcgttcctacaaggttccttacttttgcttggagttgtcttcagcaaatatatatacattttagtctgctctatgtttgctgatgattccaaacccaaaactttacttttgtagcgtacaaagggtgtccccctacgtgggtttgaggatgagaagttttgttttgtggctttcaggagaggtcagcgcccacggttcgtagttttgtaatgatgaatgattattttgattacctttagagaaacgttgttaaggataaagttaggattatgccttcaatttagggagttgtggcctcttgacggtatgaagttggagacattgaaggagagacgcgcaaataagaaacccgaggatcttgagattgattatggtaagtccgtgactaatctatgaaaaccatgcgcataaactagattttgacccttctaagctttgggcccatttgatatgtgcagaggactttatcaaatcacaggtggttgaagtgccttacattgatccaagagcttatgactccgacaccatggatgagaacgaggaggaacaagaagacggtggaggtactgatgaggatgaagaagacaagattgaagaggaaatagaagaggagagtgagagggcgagtgtgggaggcggatggggaagaatcatattccctccattccgcaaagggaaacaagtgacgttggatatgtgtgtgccaaccaaagaagatgggtccgagggagcctttgaaaggagagtgataacaaaaagcaaaaacccggatcttcatttgcaggccaagaaatccttttggggagacttatggcctctcacgactcaacaagaaaatggcaaaaagaagcaagtagatgctgagtggtgtcgcccagacgaagaccagaaatggagtggttggccttagccttagcataagattcataatcatccatgtaaaaatcctgagttgaagtgttaaaaagacatttccatagagagtaacagaagcattgtagttacaattacagtaattctggaaaatattttacactttggggcttagaccacaaaaacaaaatcgtacaatatatatcttagtatattaccaacaaacagtgcacaagacatcttttagatatctgtgtaatgtgtatacatatgttactctctaagtaaacaaataaaagaatcctatctaataataacttgtgtatgtcttttaaacccgaattggcaaaccatagttgtggaatactctgatccttccatcccaagtcgctgtcacaatcactagcccccacaggtgaggctgccatgcgctcctcaaaagcttcagcttccctctgttgctcattgcaacatcttccagcttctcttcaggccacgttgttgatcctttcattggagagaaacagtccactttcggtatcttcatgtccaaatctgtgatacactcggacagaccatccctccttccttgtctgagccaaggaatagccacagatgcattgtgcgagagaaatccctcgtaagatcgaatgcttttcggtgtttcagaatacggcttcttgctgggtaattgagagtagctccagacattaatgtatgaatcctctgatgttgagatgatgtgtttaccatctgaaatgaatgaagcagatgttgtgcgaaggctagaagctgcaagcgcaaaagaaagttacaatcttaatcttaaacacaacaaatgcaatcattcatctgcagttatgaacagatcctaacctttcagcttgcagatgacgtcttctccgcatatgatgcggatctgtgaatcagcagaagtcaccattactttgtccgagtcactgtcactgggaagatattgcagaccacttatccttttgcttgcaaccttcttcttcccatgaacgttgatctcttggtccatttgcagctgattctctgaagtacacaatatgaagaataataagctccaaccaacaattgcatcagttaagaatttttcattaaccaatgatctcaatatgtaagcagatcaacgtaccaaatatatggtagaagcggcagttccctgtcatagaacctattactgcaccctgcaaaactctatagtaagcagctgatcatcagactaaaagcaaactaaggtctttcaaagtacctttgcatctggacgatagcacacagctgttacaatgtctcttatatctgtgtagtcaaccacccgacaacgagtcacatcccatattcgaactttcccatcgatggatccgcttatgaaataattatcgtccacagggttaaatgccacacaagtcactgtgtaagaaggagagggagaaagtgtgagtgagtattaagtacacagcaaaaaggaagaacaaaagtacaggcaatatactgaagaagaagctcaccgaaattgttatgagtgaaagttctaagacattcatcacaacctactctccataaacgaacagtctcgtcaacagaagatgacaagagatactgcaccaaagagaggtaaatgtaagaggatgggcacaatcagagactatataaatgtagggaagagtttgaaaagatgtttacccctttctccgaccaggaaagatccaagatctcacctatatgtcctttgaactcatgcagaggcttctccgatatactgaagatggtaggaggtaatacaacacaagttgagtctgatgacttccttaaaaaacttgacttcttttcagttttctcattgttgatcttcaggggctcaatctgagaacgttgattcatcccaaagtaaacaccagaatcaacctcagctacttcatacgtgtctgttctctcttcctcggtgatactccaaactcgtacaacacagtcttccccagcgcttgcaatgtatttcccatcaggagaaaacttcattgctaagatggagccatcatgcgctgaaaactcttggtcaatacacatagaggaaagctccttaaactgctttttgtgtgtctgcactcgcgcaacttgatgcaactgcgttctcactgattcacagtccatagactcaagaacatgtgtcaaaacaccaagcttctttaaccaagatttagcccctttcttgagcaaatcatctctttgactaaatggagagttgtgaaaatcaccaaagctacccgatttactagaactggattcactcaatcctccaggcatagtactagtgctactactggcatcattcctagccaacaaagtctgatcatctgtatctgatgatgaaacagaggatacatcgaatccagaggacgtagtagattcattcctcaccaacaaatcaatctctttcacaccagaagagacgttaacaacttcagacacaacgttagagtcagtatgggatggttcaagctcatcttcagagtcatcatctgtggcagtctttttgaaactcaagcccatagattgtaaaaacttacgccgtcgagtggaaacactctccggagtactggtccagagatgtaaaccaaagtcgtcggaaacaacttcaggggcatcaaagaagcgatcttcatcttcttcatcaccaggagtacccatcacacactctctattccgtaaaggaaacaaaaaggaaagccgtgagaaagagttcaactttggctaccaaaacaaaaaagtctcatgctttcgtggtagtcaattcatatacactgtagaaagactcgtgatttactaaaaaagtagacaaattttgaaaaggctaacagagaaatgcagagtcaaacccaaagaccaaaatagaaaaatctgaaatttcgccacaaaaatggaggaattgtacatagtttaatagtagacgacctaactaaataaataacgtggaagagattgcttacaagtaaactataaacaacgaaattcgtctaataaacaattgctcagacagaggattttgcttaccagtctcaccaaacacaatagttgatgaatcgagtccgtgcgtgatctttctaaaaaaagcaaaactttgttctcggagaaggaagggttattaaaaaccgaacgaacgggtatgaaagtatctgtcggttggattggcacttctttcaattgaaaccctttggtagcgtttagttctttgaaagggtttaagagagtcgtcactcgcgattattattagcgagattaacggaagggagggagactctcttcttaatcaatttttttttataaagatgggatttttcttcggtggtacgaagaaaggttcaaggaaatagggtacaaatacaaacgaaccaaacaaacaaaaattgcatgtcgttttgttctctctttctcttatcttttgatttttccaattttcattttttaattgtcaaccactttcactgactaacttcaatttatatatatgcactctcattattctcttttttttttactcatttatttacttctttttcaaaataaacttttgctttctaaacacctacaaaaaaacttttttcattgctttctttgatcaactctattagaaaaagcaaaaaaaatacatgtaagtaagaattagttcaataacgtccgaggatgaatatttaacaagatggtaacagaaaagtaaaaaattgaattgatgagaattaggtaggattatatggttacatgggttttgctagtattttcgttattttaccacaaatttcaatatgttattaagaaaaagcaaatgatgattatatcattatcatccactacacttcttagtcttctcacaccaaaagacttttaaaaaaggtctcatatccatcttatctcttttcttaaacacaatcgaaaaactaaactattacaacacaccaattttttagctagatatatgtgtatttttacggatatgaattcaaataaatatttttcgaaatccaattatcataaaatttggatattccatccgtatataaccttaattattaaaaaaactggtgcatccattttttctactacaaatccctatcttttaattagctttaaatagatattaataagcgtatatgtagtagactagactcgtctctacatttccattttcgtgtaccaaatataaataaaaaaaattattcagcacacgtaactttacgtgtttttctaattgtattttgttgacaatagttcgtccatgaaaataaaaatattccaagccctaccactcactcacccaactaataaattaattcataaaatgccgtacggagaaagtattgttaaattagttggagaaaataaaatcatagactaatcgttgagggaaataaaatgtgcaaaaaatgaagaataaaaacaaaaaggaattggtgagaggagtcatagaagaagagtcagtcgtgtgttcaatcctcgtggccgtgggtgttgaggttcctcactctccacatgatatcacgtttctcgtggtgcggagagacagacgtgaaaagaacgttgtttgagcttttgcttttcttaaaaggagctaaataattgttgggctttctaaattccaaaaagtcagccactcgtgaaaactcttaaatgggctctcactaggtagcctcgtagctcagttgtgaagaaacccaacaaaaaacctgtgtatactaatttatttcgagcaagcggagttatgttaccaactgaatcattctaatttgagaatttctaaccatttaaccaaccaaggagatgaacatgagccaagaccacatgttaggattccacattagcaatttcacaagtgacatgaagtaacaactgatatatacgtaattcatctatttgtcgtcaattgtgataattaaaaacccataaaacttaatacaatattaaagttttgattcactgatccaaataaaatggtcgaaatatagttaagggatttggtttgagatgcaccgaaaatagtaatcatttcgaagatgtttgttaaattctatattggacgtttgaaaacaacttataaggttagactttttgtttgacaagttgtttatgaattaagtaagtttattaaattcaaactactttttcaaaagaaaacaaattattgcattcaaactaactctgaaattaagtttgaaaaccaaaatttaacaaaaaaataagtttgaaacccaacaaattatgcattagagaattttattattgatttcatatgctaaggttggaagactatgcggtcaaaaccctaccactaggtctttatttctaccctatttgcactgaccctacaacagtaccaatttcattttataggacgatgaactggatgataactaaccaattgtccaactgatgtgtggtccaattctcaacgatgggtcgccctatattctcgggggttgacgtaaatcagttccatattacacaatcttaccatttgaaaatcaccaatacgtaaatcattttatttaagaacaacaacaaagacagaaggttttggttggacatttgggtcaataagtcatgctttatattgtagaataagaatagtaagtaaattgctcatgtttctgcgatccatatttaacaaattattctagtcatttatttattttaagttatatctttaggagtacgaaatttgtttacacattttaaaaaggtaatagtattttagattttgaatcatagatatagaaaatgatacaaaattttgttttacctggatcaccatttttaaatggacggccaccatattagacatcaaatgcccatttatctaagagccatattggttgtcttggtcccaaaaacctagatttctaaataataatggattctatagataccaaagcaagtgtccatttacactagcttgtagcttcgcttaatttagttgctatatatgtccacatcattcgcatatgctatctgacacataaaataaatgtaatttagtatatttagttcatatttgattaatttcggttacaattttcatattgtactctattaaaattctaataattgatattttttttgtacaaaggttaaattaataattgatattttgtaggtataagtgaagcttttcttgttaacatgcgtttaagatggttaatagttttttttgacatgtaaacaatcgatcatatggatcgttcttaaaagatttttatgttttttttacttgagatgcttaacacacttaccatgcatgtgagatgtgtcatgcatattaggtatttagagcaaatccagtagtggtttctaagcaaaatttctaacctataataataataataaaataataaataatattatttaattaagatagtttttaaggaaatgtgagagagtttctaattcaagagattttgaatactcttctacctattttaagaaacttttcaaattaaataatattatttcttattttattattactttagtagattagaaactatggttagaaaccaccattggacatgcttaggttaaacttgaatttcaatcattttccggatctgtaaagaatatgatattactactcttaaacaattatcaagggtattaaattggaattttattatcaatcgaattcgtggaatatttgtcacgtttaatcaaaaagtcacttatgtaaagcgtttgcatggtaactgtcgcattttaagcaaattaaaacactattgatgcatatggaggatataaagtcattgattaattatgtgttttttttttttggtatcaagattaattatgtgttatactaatgatatctaacatgtattcaaggaagaattgtggatacagaaaactgaagtatataatttgcgtgggggaatttatattgggcacacttgaacagcatttgtgaaaattcttgacgttaaaggaaaatgaaaaatgtgtgtgttcgtttacataaatacaaaaaataaaggtgctctatatcctaatacaaaacctagggggtagaagctgaggtggatcgcaatagaagaagatggtcggctctcactctcgagatcggacggctgagaagagaagagaagagaagagaaggagaggatgcgtttcttacggggagagagaaataaggccaaacaggtagagcccacaagatgactaatctccaccgtccaactcaaaaacaacatcaacaacaacacatcacaccaaatattattcggtttctctcttcaggtccgactcaatactgtcatacaccacatccactactctactactacagactttttggtgctcttccccctgtggagtccaaatcctttgacacgtgtcgttttctcaagagattcactgtcccactctctgcgtgattcccccccacatctgacggctgcagttcgccgccggtctactcatccgtcaaacgccggttactgctcagactttggtttgatcaaaataaataaaaaaagatcaacggctggaagaggaagtagaggttgaatctggacccttagatttatatatactaaaaaaaggtatttgggtcttcatgtcagtagaggcgtttctcttgcttgtttaacacaacactcccccactcttcacatttcttctattttcttctaatttctacatctcatcacatgtagcacacaaagtcacaaacacttgtactggaaatgattgaaagagaaatatgtcttatatttgcggatatataaatgtgctttcacttcaatatcatttaaaaaaaaaaaaaactctaattttctctgctaattgttacgtttgtaaatatattttttaatagaaaataactatgaaaaatccgagtgcaactatagattgtagataaaagggacaaaagttgaaaggaagtggaagcagcaaaagatgtttcaatggataggggagtcatgacgtgactaatacacttctttttataaaatgtactatacattagtactaaatacagtattgtacaaatattcccgtaaaaacagttttaatttttaatcaaaaacaactatcaaatatggataaattagcgtccatagttaaacaaaaaatgctaccctagctaaaatctccatttcttagaaaagaaaaaaaattctataatatataatacctcaaatgaaaaatgacacattgtacacgttcatcaaatgggaatagtattagtactagtaacctaaagatttggtaagaattaagaacaaacaaaaactagagaagagagagatatgtaagaagaaacacatgaataatgggacaattttattattagaattaagagataaatgaaaaagattcgtgggacggcgggcgcatagttcagagtgtgtcagagtcagaccaaaccctttctcttatctctctctcttacgaagaatccatcaaaaatcccacatacacacaatatacgtgtatctatatattccttcaaataaaagtgacagttttttaagaaatataattaaattgtttaaattctcttttttcgtcttcttcttgctttttcaaaaaccagctttacctttccacacacacttcttcgtttctctctctctctttctccttagcttcctcttcaagttttttttgatcagctgcaaatttccatagccatggacactgctaaatggcctcaggtatacttatcttcactactttcctccttcatcaaaaaaagattctggttttgtattaaaaagtttccattgtatgctttgtgtttgttcttgccaaaataaaaaataaaaaaggagtttgttgtgaagccaatgaacgagatcgtgacaaacacatgcctaaaacaacagtcgaatcctccttctcctgctactcctgtggaaaggaaggcaagaccggagaaagaccaggctttgaactgtccaagatgcaactccttaaacaccaagttctgttactacaacaactacagcctgacgcagcccaggtacttttgtaaagactgcaggaggtattggaccgcaggtggttccctcaggaacatccccgtcggtggcggcgtccgcaagaacaagagatcttcttccaattcctcttcctcttcaccctcttcgtcttcttcttcaaagaaacctctttttgccaacaacaacacgcctacgcctcctcttcctcatcttaaccctaagattggtgaagcagccgctactaaagttcaagacttgacgttttctcaagggtttgggaacgcccacgaggttaaagatctcaacttggcgttttctcaagggtttgggatcggtcacaatcatcacagtagtatcccagagtttctgcaagtagtacccagcagcagtatgaagaacaacccactggtctcaacttcctcgtctttggagcttttagggatctctagttcctctgcttcctctaactcacgccctgctttcatgtcttatccaaatgttcatgattcatcggtctacacagcatccgggtttggtctgagttacccacagtttcaagagttcatgagaccagctttgggattctctcttgatggtggggatcctctacgtcaagaagaggggtccagtggcactaataatggaaggccgttgctgccatttgagagcctcctcaaacttccagtttcatcatcaagcaccaatagtggtgggaatggcaatctgaaagagaataatgatgagcatagtgatcatgaacatgagaaagaagaaggagaagctgaccaatctgttgggttttggagtggcatgttaagtgctggtgcttctgctgctgcatctggtggttcatggcaataattttagtcatggaccccatcccatgagagtttttagaagaaatgattacatttttcacccatgttttaaaaagatgagagggttaactatataatctgggtgcttactattttagtccttttcctttggtttccttctccttttctaaaaattattattaactttgttgggttggggatggatactgtatgtatttagactctcttttaaatcaatctcagttgttagttacctaactttatgacatctttccattaatcttgatatatttatggtgtatatattagtgtcacaaacgaaacaattttagttagtgtaaaggccggtgtaccaaattcagaggtgtagagagaaatggtcattgtcctctttgagacataaagcctgtcatctcaatatgctagtgtatactttcgctaaacccgaaacccatttaattccgatattaatcacatgtgtacactttatttatacttacaaaaattctactaaaacccttgtagtgaagaatatcaagagaaaagactctcgttatgaaatcgttttggttctttgtttgtttaggaacacttgaaaggggaaaggatgattgagtcgaagcgggtttgaagagaaagagagaccacaaaacacagtcagtttcttaaggcactttttcattcaaatgcaaaagtataaaataaaattttactcatagaaaaatggacctacccccaacattcctcttggacttcgtaccatcatcattgctccaacaactctctcgcacagaagatcaatactacaacacatgtttgttgggtgttaagcatatgaagagagagagagagggttatgatggtaaagtggcagatgatgagtttggtttagttaaagaattcagcttataaccattttatcttaggtgttataaaaagagagagatatgaacatgtgaactaatagtggacaatttaaagcccgttttgtttgtagtcgcattccaaaagtcatcgttaccttttgagtctctgtgggcaaatggcaatctagctcgtagatttagttgctgttgcaattgactctccaacaacacttctcatttgattcataccttttgttttcacatttatataattcacaactaaccaactaggacaaatttattaattccgaaccagaacagtgtcaaatgtaatcaacaatactagtcagtttggaattcactttgtttgctcgattattaacaacaatatagattcattttcaattggatatttacaagtacaaaaattctgctgacataaaagaaaagaccgattggagtgctgttttgtttagtcaaggaaaaagagtcacatcaaacatggcacacttggtcagcaatgacaccacacacaacaaatcatccttctttttcgttttctgtcttttcacataacaacagtaagtaacaatccaaaactgacaatgtcgactgtatatatattatattataggatttagaaagaaaaaaaccttaacctcgggtttaaacttaagaagatgatctgttttttgggcaaaagaagataacaaaactggcttgtgttcttttagccaacttgtgatattgaccatttcaagaagagcagtttagacatataccaaatctcattagcgtaatttcattgttctgcattgattccaaagatacgaaccttgtgcatgtgcgggaactttgcaaattgcaaccaccatataaatacagcgagcgtgttgagaaacatcatcggatgttgatagtacatcgtatgagatgctatcaagtacctagtacatgcaaagtcagaacatttcattcataagattctcacttctcaccaagaatatatccaaacttacttatatatatatatatatatatatatatatatatatatatatatatatatatattgtcccactacacaacagaaaacgactaagatttcatattcattacaacaactaagagctttctagtagtctttctatacttgtctgaagaattcatatacggaatatactagtctttctaagatttcatattcattacaacaactaagagctaaacccaagcagagaactgccaaacagatataacatgcataaagtttttcaatgatacacaactactgtatagaatgtataggggttatatgaatttcttcaaaaaggaatgagaaacacaactgactctaaactctctctaccaagaaccaaggaacatgcaaatttcaatctcaaaaaagagacaaaatgggaataagagaaggacattgcttctttgaacattagaaatacataaggcttatgcaaatggtagtcacataatgtttcagatcagcaaattgaagagggacacataatacacaaacagtataaataagcaaaatggcaataatcaattctcctccctctgtttccttctctcatcatgatactcataataatcaattctccttcgtttctgtctctctctattcaaagaaggattataattatagacgtatatcgaatcttcttctatctgggctagagcccgattgggctcataaaagcccatcatcattctatcttaccaagcccagaagaaacaaactgtgagctctcgccccgccgtttgagatttaaaaaggtagcatagtgagtgagtgagtgacactgtttaagtagtactaatttaaaaggcacaaaaaaaaaggacaagtgagaatctgacaggtgatgggtgtgttttgcttccttcttacccgaccacccaaagccctcataatcaacatgtgtcatcatcaccagctgcctatccattcatcttcctccacgtgtcttgtcttgctgacgcatcaagaatctttcctcctcgagtcctcgtccctcgtgaaaacaggcaggtcccgcgctttttctgggcacacaaaccctatatttcttcttcttcttgattaaagaatttcaaaatgaccatacctccacatgtttagagcaggataactaatccaaaaagattatacactcaattgtaacaatttttgttgaaaaatattaccaagacagagtcacagagagtgaggattttgaattttggaacaacaaattaagcgtcagtaacaaaagatgatgtatggaattcgattacttaagttttgtggggctataaaagacaaattaataaataaaaaaacaaatggggttacgctgaagagtactacgaagagagacattccctgacaaaacggtgttatgcccaaaacgaggaaataattgtatgtgtggcagtggaccgtaacactagttctggctccaccttggagtttgcgaatttggatgattggttttattctctttttttacattttcaattcataatacaaatattactacgatatgattagtttgctaatcctgcatgctgtccacacaagaatacttactacagctaaaaaggtcttatctcttatcacttattgattttttttttttttttttttttttgcagtatcagtattaattctttcaattaaatttgagtttatatctcttaaattaaatatagcattcgagatatacatatactaccatccctctagtatctatatataatctccttagcttttctgatatattatccattaatatatttttatcaaacaaaaaaaaaattgtacaaatagtcaagtaacacacataggttttttagactggtcttaacttctatgaaatttgcttctcgtacggattccatatagttaaataaataatatattctttccattccacactattaaaacatttgaaggttttattttcattcacacattttaatttagtttgatgttttgtgattgtattatattataataatgtattgtcttttttattggttgtattgttttgagttttttttctttttattttaatatttgaaatactatttattataaattatgagaattgttacataaacgattctacaacaatcaattcgttccaatctttattagacctatcatcgacactttctttttctatgtttttgatgaaggcaataacttttttttttttgaacaaaagtgaaagcaatagctatgtgatcaatcgtatgatttattgacttttttggtgagtcaaaatcattacgaagaaactattgcgtgtcatatatatgcttggggtctatatattgagaataaataaagcacaatgtacatcttcgagagaatcccatgcataaatttaaacacaaatgttgtccccaaaaaaaaaatgttttttaaaaacaaataagatatcatttttgatcgatccattactaacatctttacattcataaataacttgggctaaccatttttcaataaccattctttcatcgtccgctatttggtcttagatactagctaattagtgtctatatatatagatagttaattattctgtgaagttaaataattattaaaatcacatgccttgttaaactcgttctaacattttttccactttcatttaatttgtctatttattaacttctcacatattacataccaaaattttaagagatagatttctgtaatttgttttaacatattcggacataaatagatagacaaatgaaaatggaaaaaagtcaacgttatgatacttattacatgtggatggatgtgtctcaacgccatcaactgtctgatatgtataatatacatgtacttaatgacaacgatctatgagccttgagtatatctgggttgtagttatatacgtaacttaattaatgacattgcatacatatacaaagttatatatatatatatgtgtgtgtgtgtgtgtgtgaaaagggaatgatgatagttgatggtagtgggaaatagcatgatggtgttaccataagagtttcttaacaaatatcgaaattggtcctttctttgggacaaagcgtgcctagttttccctttcccttttttttgcatattccattgcatccctaactatatatttattgtcattttcattttcgtacatttagatgtttgaattactgtacgtcttatagtgtaaattgtgctatgctatctataacgattgagtctttgagcattcaatattgaatatagaactaaagtcatttgagacaatcgactgatcaaataaagacattatactatgtattaaacagaatgcgaagttattaattcttagagggaactgtgggagtatataaagaaaagtacatatgtaatggtggtttgattaaaactaaaaggttgttttactttgaagacatcagtacgttttattttcccagtttgtaagaaatgacacaataattgaaattgatgttccatcaataaaatgtgattcactatcttggtttccaatggaacacaaaaagaccaagaaaaaaggtgaatcattatatacgataacaaaaataagaaagattaaaataagttaagccttaaatattagaattaagataaattacgaaaacacggatattacatgaagtcttaaagatgttgacctcgaggggatgcatgttgtgtaaactagaaaattgatttttggagtttttcttcttcttattcgtatcaagttcattattactttcatttgtcaaccaagaaaatagttttaatatcactaaacttataataaaaataaaaaatattcttttttaaattgggtgaaaaatccaaaacatcattctttttaaaacatggaaagtataaattaactctgaaactcatttctattttatgtagactagggtatagggctaacaaaaattggtctcataatagatatcgaacaaaagacacagaacctaaagcaataacaaaggagactaataaccacaaatttttctcatatagaaaaagtttacatattctccatagctattttttcgaacaaattaagagtcaaatgcaaaagattttaaaaattttgtgtgctttcaaagatgaagtttttagcggttaaccatgacatataaattcgtaatattttgtagttgtttttaaaaatatgattggattatataataagttttaccttgttttccacaactcattgaataaagaatttgtcacataaacaatacatatttgcaactgtcatagtaaaaatatattatcaaatctaacaaaaattatgtatattatgaataaaatactctaaatttaaagaaaagtatgaatccaacactatctctatcttagtacatatatatgtggactaatggtagttagttagagttactcttaagttttaagcgataaaggaattttgttttgtttttgacagaaaaatatgttctctagtcacatattttaacgaaaagttttaaaatagcttatctaacaaaaagcaagtgtacaacataaaatccaacttttggatttatttcaccactttcggacacaattgtaataagaacggaaagtttcgaaaagggacaataaatcaactaaagacgaaaaaggattaaggtgaaaatcttgatgccgttgacttttgttctcaacggccatgattgagcgtgtgatgagtataagagaccaaattatggctatttctaataaccccaaaaaataaattgattgatgagtttttcttcatttgatatgtaattataatcacttattccatttcaagatttgtggatatctattgatattctctaccactatcaagaagctaaaagtgtattaagtgcatgtacattagcttaggccgagaagttttttttttttttttttaaaggtgatgtatttgtggcacttaggcttaggcatgtaatgtgtggtgtgagatgttgcgcgacttgcgagtaacaaaaatgggtctcaaatattgaggcatgtatttctaacgtttgctatatatgcctttgatgttctctaaattctattttatatcgtatttccatagtaatattcagtaaaatcatgaaattcgaaggttgatatcagagtttatatagtataaagttttaagatataaataatccattgaaaactcaaaacataggtacaaaatagcaccatgtacaaataaatagctaaaataaagtaataaagtaacaaattaaaacacgtttaatactattcatgaactaatgttcaagtctatttaacattcacatttttccttgcttgtgatcttctatataaacttaaaattaaacatgcatggtttcctgataataataagatgtttagttatattaaagaaaaaagatagtagctctcaagacttaaggcggaagcataaccttattttttttaggttggtaccacaagagaccacaactaaacatttggatgaatataggtataacaaatctcttatgatatgtatatatctggcttatatatgaatgcatactctacgaatgtatgtgactgctgacgacattggtgttagactgttgatataattatatgaggcagtggatcgagatttgagaactacttaagtcaagattatcataccgagaattcaagatttaggtgacacatattttgggaacctcattggcccatacactaaagaggcggtcattctttctttataactctaaaccatattttccaaccaaaaacggtcgatgttaagctttaatatgatgttcaagatataggatacgagggagaagatgatcgctagaaactccacagcaccatttatcttcctctgttgtggggatcacattctcctcatttttatttttccattgcaccagtttccactatagaaattttcatcaaatgttagttaattaatcatatctaaatatattgaatactattaaagtatatcataaattcgtatcgagtatttaatgaatcgatgataaaaagtaaaatcaaaataaaatctccctttatggaaattataccctcgaagatcctctcccgtcctaaatttttcaaaagacaacaaataaatatatagtaatcaaagcaaactttttcactaaaccggcaatagccggtgtaattcacgtcacttccgggacaaaagcgtgactggacaccggcagacaaatcacatcaaataaataatagtaatatatttaattcctcagacaaaaaggctcttccacttcttatcgaattacaaacatttcatgttattgtttggttatatatatagagagacaaagctcttaactcctttttaattgcttgaacaaaaagcaaaactcaaaggaattttctctgtatttttttctatctgcagaaaattaaagaaaaaaagagaaaactcaaaaacccacatttttcctctgtttccagcttttctttatctttggagtttggtttctggagaagacaaaagttgttgtcctttttaagagttcgagatcctgcagaaattaaaagggctcttcccggcttggattcctaaatatgggttcagagtataagcatatattgaagagtctctgtttaagccatggatggtcttatgctgtgttttggcgttatgatcccatcaattccatgtaatttctctcttttttctttcgaatgttatatgcatgttcctgtcttggataatatttgcataaaactagttttgttttccgttgatttaggcaaaagactgaattgcatatcctctggttttatatgtggcttccctactttggtgtccataaatgtaatttagttttgttgaattccatcaggatattgagatttgaagaagcatacaatgatgaacaatcagtcgcactagttgatgatatggttctccaggctcctatcttaggccaagggtatgcttttacacttcactcaaatcttttatatatctgtctctgtgtttgtgtttatatatcttcaatatacttttcttttgatgaaattagaattgtgggagaagtagcttcatccggaaaccatcaatggctgttctcagacacattgtttcaggtttgttcacttctttttcttggtgtttgatttttctcatctgtgagctataatgtatgtcgaaatatagtgactgcatagaacatttcatgatgaagaagaaaaaagatttgatattcgtgcgtttgattgttttgcagtgggaacatgagtttcagaatcagtttctctgtggctttaaggtaatttatattttgtcttctctccaagtttaaggattcatatatccattttgaatcagattcttatacggcagtttacttatacacagactatcgcaatcattccactaggatccagcggcgttgttcagctaggatctactcaaaaggtttgcatatataattatataacaatgttttcttgttgtggaagtcatggtctaattacttactatcaatctttagattcttgagagcacagagatattggaacaaacaacaagagctctccaggagacgtgtttaaagccacatgattccggtgatctcgatactctgtttgagtcactgggagattgtgagattttcccagctgaatcttttcaaggatttagctttgatgacatcttcgctgaggacaatcctccttctttgctcagccctgagatgatctcctctgaagcagcttcttccaaccaagatctgaccaatggagatgattatgggttcgacattctccagtcttactctctggacgatctataccagctgctcgctgatccaccagaacagaactgctcttccatggtgatccaaggagttgacaaggatcttttcgacattttggggatgaattctcaaacgcctacaatggctttgccacctaaaggactcttctcagagctcataagcagcagtcttagcaacaacacttgtagtagttctctcacgaacgtgcaagagtactctggtgtgaaccagagcaaaagacggaagcttgatacatcatcggcgcatagctcaagcttgttccctcaggaggagacagtaacaagtcggagtttgtggattgatgatgatgagagatcaagtattggagggaactggaagaagcctcacgaagaaggtgtgaagaagaaaagagcaaaggcaggagaaagcaggaggccgaggcctaaggaccgtcagatgatacaagaccgtatcaaggagttgcgagggatgattccaaatggagctaaggtaaattgaataataatatagtttagtttagggcatccaaattatagattaacaaatgcattctctaataagtttcgatatatatttaaacagtgtagcatagatacgttgctggatctgaccataaaacacatggtgttcatgcaaagcctcgccaagtatgcagagagactcaaacaaccatacgagtctaaggtaatgaatcaaatatatccattcagtaagtacacaagtgtttgagtattgatgagtgaatgatgtttatcagctggtgaaggagaaagagagaacatgggcgttggaagtgggggaagaaggagtggtatgtccgataatggtggaggaattgaacagggaaggagaaatgcagatagagatggtgtgtgaggaaagagaggagttcttggagataggacaagtggtgagaggattgggattgaagatattgaaaggagtgatggaaacaagaaaaggacaaatatgggcacacttcatcgtacaggcaaagccacaagtcacaaggattcaagtcttgtactcacttgttcagctctttcaacaccacaccaaacatgatgatttattatcatagtataatacctaccactttgattttctttctttttgttacaacaacaacacaagaatctgttgataaatagtagtaacattacatcaaagaagattgtatgggctcgtggaaaaaaaagaagaagattgtatgggctttaaaacattgactaagacaaagaaagaaggcccatttaaagaaaaaaggaacgtaacgacaccgttttgggtggataacagttaactgactgaatcagaaaatagatgcccgttatccttgacgaggataaaggggagacactgtatataaataaaaagttgaacaaagatcaaatcctcaatctgtttttagggtttcgagagagagagagaaattgatttttgttgatatttgtgaaatttggtggcgaaattgaagcttcttcatcggtcgttgtctaaaagcaatggtggatggttgatgaatggaggagatgctcttcttcttctatccaataacaataataagagacacgacgctgacacaaacgcagaaccatctcaccaccgtcatcatctcggagatggccgccacactcctctgttcccgatctcgattccgatcggcgatcgactcctattgcttcgcccgtgaggccttctccgatccaatctccttccatctcctcacccttctgtaaccaccaatcatcatccctcctttcttcttcttcttcttctgcttccggattattagtatcattaggttagaatatctgccatggaagaggctgacttcgtccagaaagatcccactggtcgctacattagggtacgacgctatctgcaatttccatggtttctaggataacaatgtcaatctatagacttttcctcgataagatttatataagtaatagctacgttaatggcttggaaggtcactttaggataacaatcttcttctttctttcttcagtataatgacgttctcgggagaggagccttcaaaactgtgtatgtttgtttgtttatacgtcctttactttttcattgcagtgcctatgttactctgattgctttttaagtatttttctcatctcttgttgttgttgttacctcgccgcgtgtagatataaggcatttgatgaagtcgaaggtattgaagttgcttggaacctcatgagcattgaagatgtcttgcagatgcctggccaacttgataggctatattccgaagtccatctcctcaattcccttaaacatgataacatcatcaaactcttctactcttgggttgatgatcataacaagtccatcaacatgatcactgagcttttcacctctggtagtctcaccctgtatgtctacttactcctctcctctcttcttctcttttcattatctcttataatatatctacgtctgcctttccattgattgtcatttctcttggtccaaagttatcgcaagaagcaccgcaaagttgatcccaaggccatcatgaactgggcaaggcagattcttaaaggcctgcactatttgcattctcagacccctcctgtaattcaccgtgaccttaagtgcgacaatatttttgtcaatggaaataccggaaaggtcaaaattggagatcttgggctcgctgctgtgatgcagcaacccactgctcgaagtgtgattggtaataatactattaaaacctctttaagtcttgttggttttaggataagcttttctagaactgaatatattgagtatgtttttcaggcactcctgaattcatggcgcctgagctttatgaagaagaatataatgaacttgtcgacatctattcttttggcatgtgcatgttggagatggtaacatgtgaatatccatacagagaatgcagaaaccaggctcaaatatacaagaaggttacctcggtaagtctgacctgatatatataagtcttacatttctcttcgacacagggatcgtccttgaccattgttgcattagcagggtataaaacctcaatctctcagcaaagttgatgatcctcaagttaagcaattcatagagaagtgtcttctcccagctccttctagaccaactgctctagagctcctgaaggaccaactccttgcagtagatggcgccaaggactccactcttactgcttcatcaaacacaacattcaaacctgcaatgccaccacagtgtgaatatcgtcctatggatgttgaatataagaagaatacaagtgtttccatctgctcttctgctaaaagcagccaagaatgcgcattgctccagaccatggaagtccagagggttgctgaaagtaccgaattcaagctgagtggagagaggagagatgatgtggcagcatcaatggctctgcggatcgcgggctcatctggtctgtttcacgatatcttatggccattttctttttctcttctcttgcatattttcgaattgcttaatgacagtataaattttatatcaggtcaagcgagaaaagttgattttgacttcaatctgaagacagacacagcaagagcagttacaggggagatggttgaagagcttgatctgtcaagccatgaggttactgtgatagctgagatgatagatgaactgataatgaagctgaaggctaatcgaagcctgcctaatgcaaacagtgtatatcagtccaaggatgaagaagctggagaatcaatgaagtcagagatatcagcggactactaccatcgggtctcctcaaacgaggggtcacggctcggctgctgctgcgaggcagtagagtcattgttgtcctcgtttctggattcatgctcaatggtgtcaaacaagcagtcggaggatctgaagacggagctgaatgtgatagagtcacaatataaccaatcgtgtcaacgactgcttagaatgaaagaggaagctatagagaaggcgaaacggaagtggatgaagctgagttgatgattccttcatttcatttaacgtagccacagttttgggatttactcaactttttgttttgtttctttgccttttatttcatttctcgtagcttttggttacatgtaaaaatatgcattgcatcaggaatcacagattgaaagaatgaaatgtatttgacgctaattcaaaatttagaactatatggattgtgtcattgtgtgtacatatctgttaatagtttagaaaattggcaaattcattttcgagatataaaaagataggagccaatgaagaagaataaataattaagagatgataacaaaaacaaaacaaaaaagaagcaatgactgtttgctttaataaataaagatattcaaaaattccatcacatgattgcaccgacgacagcgcaagccagcgaagcagcgacagtggagaaagcagaaatgagcgaggaggaagcagacgatttctgagagagaggaatggacccgaaggcgttttggtaagagggagcgtcggcggcagaagacggagacaaggcctctgcttcggcggagtaggtgccgacggagactaggagcttctggtacttggtacagtggccggggtttgcacttgtgaagtatagggttccgttttgggtgaggttgaagagagagttgccgtcgttcatgtacaagattgggtctttggtgttgcagctcttgaaattggagggcgtcacttgaatcagtgagtcttcgcttggtgggtacaagaacactttattggttgcagcaaccaaaaacaaaccaatgattagattttagagagatttgaaattataagaagaagaagagttagaatattgacttacagagggagtcaccgatcttgaaagagtgagatttgggccatttggaatagactttagcatcaattgggatgccccaagcgtccaagtccccaactttgtatagagtcgacgacactttaccaatctcttgtcccaacaatatcatcacctgtaataccaccaccaccatcgtcttgctcaaactcatcactcccatcttgattggtctactttgcttctcagatctcctgaaaagctaagcttataaattggtgaagcaaaggaggtggaatgacggttgtacccctgactgaagatggggcacatggcctgaagtggccaatgtcgcatcgtatcagtacataaatgggtctaatcgattattcatttgcaattatataatgtctgcttgtgtattgttgtttcacatggccaccacttcttaaataacgtgtggttccatagatttattcatgtgtttaagtgtattagtttatgactgactatcgccacattcaaacagagacaattattgcctgaattcagaattgcaaagagagattgagcttccttttaaataacactacatttctatggtttagggccaaaatcgacttataaagattgtttttgacgcacaaaaaaaaaagtagaaagattcaagaagaatagtggctaaagcccaaataagctgacgtgcagaggtattagggtgtgtttgctacatctggtgaaggcacaaaatccaaatataactaaacaagtggaaagactttatgaccaacgaacatattaagacaagtagaaaaatcataaagagaaacggaacggcgtttcttcttttttcttatgtcatcggagatttggttattatgggtttagagggtcagcttctgaggtcatctccttttctgctgaccactcttgtgatcctgcaatgataatgagagatacactagaatcaccagtccacaataattgatctgatcaatggtgctgttagatatgaacatataacagttctaatgtttgatggaaatgcaggcaaccgtgataaatgaatctacaagcatgatacggaattgcagatcaaatgcaatgttcatcagttagaaattcatgcatgatgctatcatagaatccactagttaagttctacgatccaatcaagcgtgtgtaccacatgatttctacttccctttaaagcattttgtgagtaatgtcagaagacttacttgacttgtggatctcggctacattcatcaacctcctctgcaatatagaggccacaaaaaggaatacagagcacattccaaacatcacggtcattggaaacgcgtcaacctttagcatacaaagatcagaaaagcttgttaggtccatggcaatgcatcttttcctatacaggtttatatccaaacaaagaatccagatgatagatactgaagattgtacattacctaagggagccacagataatacacattaaaaagggaagaacctatatgatggatattgaataaatgacttatagattgtacactagtatctaagggcaaggtaactcgttctgaataattataaacgaaatgggaatctagatacgctcagcaggccaagcgaaatatttacccaaaagctagagaagtgtaacaattctgttcagaacataacgttccgtactagcagtgatactaacaccagtgcctcgaagaagtctgaataaaaagagaacaggaaaactcacattgtataatacaaggcagacaaagatgttgagtgggatgcggaaaaaattcatgatggtgcttctagcttcctctggaatgtattgcgatctcatcttcattatagatggccagaagattcctacacacgcttcaaatgtgcagaaacccattaactgaatgcatccagagaaggatatgcttccaccttttacacctgagggcgccaccaagaactgttccaatttggaaatcgagaagttattatcggtactactccttgaatatggagagtaaacagtgagagatatcaagacagagagcatacgcttgttacaacaggaagcattagagcagcagaagatatcacaaatacgatctgcatatagctctctacttttggagacgaatgtgccaacaaacgagaggcaatggagctaccaagcatcgaagccagcatgaatgttgcaaatatgaaaccatgtggaatgtcctcttcgtttgggctcaaagcaggagtccagagaaacacaaaggtgtacatggacccttcaaacagagactgaatagcaccgagtaatgcgatcttctcatctgatttaataaaaaggtggttagtggaagaataaagctggaagcaaagacatattacagtatgtcaaaaaccaaggtaaggtaagagattcaccagaagcaatggcagatgcagcgttcttgaactgggtaagaaggtctttgttttcagatggatctccatagttttcggaccaagatgagataataacggccataccaatagcaaggaagcaagcagcagcatcgaaaggagcaacaggaccgagggagagagaatcgacaaggtaattgccaaagaggccagcaatgatggcgactaatccattaccgaggaaaatagccttggagaaagtgacagaaagccactgctgctcgaagcctctcttgttgtgctcagcgacgagccaggattcgaaggcagagaaaaggagagaagtagcgataccaccaagaacacgaccgaccatcaaaactttgtactggggagaatgtttggtgatacagctgagaatgtaggtgatacagtaggtgatagaagctctcttgcgacccctaattaagagagtaagttacagagtcattgaagaagatccaaacaaacaataggtgaagtataattcagaagaagaaatgctgactgtttgtcggcaagagatccaacaatggtgccaaacaacatggaagatccaaaaccagcaataaagagctgaccgatctctccctttccaaagccataagtgctgtagagatagtacacatacggaccctgcaaccagtccccagctaaatgccgccagggacataaattcattgttggattttaggatctatggacaatcaatcaatcattgggagcattcattcattcattccggtcaaatcacacaccgacactaagctctatagaaatcagaaaatggatcgtgatcagatgtagtgagaactaacccatcatgagagagtagacgaggagatagttgttcttgaaggagttgaaggcggaggaggtgttaatgcggtctttgttcgatttgctcagctccaagccggcgacgatcgcagccaggccaccgaacaccacgaagtagaagatctccattgatacgatcagatctcgcaagggaggaaggagatgatgagatttgtaatttcagatttgtagagtgtgtgtgcaagtattaagtatatatcgttgatttaaatgcggactaaataataataagtttatgtgcctttgcctctctctaattcatttctttttttcatttattaacctcctaaccttccaacaatgtttttttttttttttttttttttcaaaactaaaatttacccaaatgggcttacaaacggactagatttgtgattttaatgatgcagccgaaacacataacgttgtattttgggtcttgtttccatggttcccctttgggctttatgctccgttgttggttttttggtattttctgtttggccctgaggcatgtgttgtattttctgtttgggccttgtaatatgtctttttaatggaaaattatgaattaaaaaaaaaaaactgtagtttcattatcatgttttttttataaatatctcatggaacacctaaaatagaaaataattctcataatcataaggactaaggagagataagcaaacctaacattcttatttcctaagaatacaaccgagcgtttaacgtaccaaaaattgtatagagatgcgtctagattttttagtaagtgaaacagaattcacaaccatagagaaatgttgttacaatcttgtatttgtttgactatatatatgaatgaaagttacgcaaataactgaataaaaaaaggagtaggaaaataagaaaaaaaagaaaaaaaaaaagataagaaagcgtagaaattaggatgaaatgtaatgcttattacttatcttcatgtgaagtttctcaaatatctatatatacatttttgcatctattttgtaaaataaatcttagagttggaacttatttacaatggttgtaactggcttttaattattgattttcttttggcaataaattgattaacaaacaaaaaatattccaaatatattccaatctcatatatcatgcagatttctccaaaatttgaactagatttcggaaattatttaaaacaaaaaatatttgacaaaccaaaatacaattgcaatcccttaaaatgagcaaaacgcacctaaatacatttcttatcagttcactaaatcttatttctccaatatttgaattagatttcgacaactatttaatacgagacggtatagcacgggtgaaatccattagatatgtttagtttcactgaacgggattagatggtaggacgggtttgagtcgatagtaatacgaaacggtataccacgtgtgaagttctagatataacaatcaaaatataattatattatcttaaatactaaacaaaacaattataaaataaaaatataattaaattttaaattatttagttataatctagattttaatttaatgaactgaacgttattgttcttatattttaaacagtaaaagttaaacatagtaattgtatactaaataatatatagatataagagttgtacattcagaaaatacaaaatattaaatcatatatatttttaatcgactaaacaaattatacttttatttttaaaagaacaaaatagtcccgcaggttaaaacctagtattttacaaaaatatagacaaataaaataaaaatgaactatcgtggatttagttagagaaatccatacaaaaataaattgcattgagaaactttagatgacgactaagtaatataagattttgcattgagaaagcttacatgtcaccctaatttctatcaaaagggtttctgatactaattggaaccatgtgagaaactatccatagaaatgatgatcttatctagttatcatgagctgatgactttgaatattccacagtcactaaacgcatgtttatttctcagctttatgaatctgtatgtagacacactttcgtattttcttcacttttgtgtatttgtattgcccattcctcttttaccaaccaataaaaaaagcagtcttttttttgtttggtcaagcattggcactctttgtcaatcaattacccaagggatatataataataaattggaataatgaaagtagttcatcataaggttcgtgattattaacttctacttttgtttatattcaatagattaagatgccgtgtatgataaggagagcaaaagtaatccgatagagatcacagcaatattcattacaaaatagttttcaaataaaaacacatgatcaaaaagtgactcacaaaaacacatgatacgtacgtgggatgctaatcctaaagcaacaaggccacaagggcaaaatatgtagctttcatgctttggcaaagcgaaaactctagttaagcttacctaacagaaaaaataacccccaaaaaagcgttacgttccaaacatttagacagggtacacgtgaatgactcccactttttttaaaaaaataatagtactatcaattcaaatgtgtaaacaacaaaaaaaaaaaatgtgtaagtaacgtctgtaattgatttgataagataaaaaaatcttgattaatttttctataaattgaagcctttcctctttacatttcgttaacacctaggttcttgtttcctaacaaaggctctactttttctttagttaactactatggctcatttcctcgagacacaggagcccctcgtattctccgggaagaaacgaaacgatcgcgatgacgaagacggtgacgccttggttgcgaagaaatcagcactggcggtgtgtgatgccgaccctgcagcggccatagcgaatatccgacatgagtttggggagcacgggggagtaaacatgtccatcgaagcctccgccaccttcaccgtcatggaaccggataccatgaggcggatgttcaccggagaactgggaccggacaacgacttctacgtatacagccgacacttcaaccccaccgtgctcaacctcagccgccagatggctgctctcgaaggcacccaagctgcctactgtacctctagcggtaatttatatatataaaataaaagaatatacagaacccatggaaacctagttgcgtgtttgatacggaaactttggttggacttcaccttttagtagtttacgaaaaaaactaatggtatcggattgacttcaggtatgtcggcgatatcgtcagtgatgctgcaactgtgcagcagcggaggacacgtggttgcggcaagcacgctatacggaggaacacacgctttgctctctcatttcttgccacggacatgtaacataaccacctccttcgttgacataacggaccatggcgccgtggcaaacgcgatcgttgagggtaggacacaggttctctactttgagtcggtggcaaacccgacgctgactgtggctgacatacctgagctgagccgtatggcacacgagaagggcgtgacggtggtggtggacaacacattcgcccccatggtgctgtctccggccaagcttggagcagatgtggtggttcacagtatctccaagttcatcagtggtggggctgacatcatcgcaggtagcgttatatttagtttgtcgcgacgtacgtaagtttctctttcacgtgaatgagcaaaataaccgtacacgtgtctttgtcgtgacctaaaaaacaggggccgtgtgtgggagtgagaatttggtgaaagagatgatggatcttcgtggcggatctctgatgcttctaggtcccaccatgaacgccaaggtggctttcgagctctccgagcgaatccctcacttgggcctacgcatgagagagcacagccacagagcccaagtgtatgcggagagaatgagggatttgggcatgaaagtcatatatccagggctcgagacccacccgcagcacaagctattcaaagggatggtgaatagagactatggatacggaggattgctgtcgatagacatggagacagaggagaaagccaacaagctcatggcatatctccagaacgccactcagtttggcttcatggccgtcagtttgggttactacgagacactcatgtcttgctccgggagcagcactagcagcgagcttgacccctcacagaaggaagctgcaggcatctctcctggtcttgtacgaatgtcggtggggtatgtgggtacattggagcagaagtggacacaattcgagaaagcattcctcagaatgtaaaatgtcttcttctatatatgatggttttctttcccccaaataccaacaattcatcatctgcgttatatgtatgatgtggccaatgttcagtctcttatttgttatatcacaatgttctagtcttcgggagtcttttcttgcatatgtaactaaaaaatatttgtgtttttggttagaaagtgaaatttacctataaaaaaaacagcaagggtatccgaaattggacgcacattgcaaaccactttattcttggccgcaaaactatttactctattttttcttcaaaattcgaaatcataatgaaatggcaaccacaaaagaaacatgttctgttttttttttttctacataggagtcaccgaaatatgcaaaagtgaatgggtataaaatgatggtttgaataatagtggttggtattaatatatatatacttagcttaaaataaagaagggttaatttattgaatgaagttgaggagtagtggatctgcgccaaatgagctcaagctcacgagcgaactccttctgcctcccaacaacaatggtgatgtggtctttgtcggggacgacgtggatccttgcacgtggcactttcctcttgacgccgtagctgcactccacggggatcagctcgtccctaccgccgtggaagactgcgacctcacagtccacgttgtcacggacatggtccaaataagcctctactttgctccccgatccgaaaatgatgttgtgtagtgtgtgccatgacgcgttatgtgtgtgacacaagaacccttctatcaagtacgttcgcatcctgcatgcgtgatgaatacatcattccagttattcacctttttcattgcatctactactattaccggtgaaagtagattaattatatacacataaattggattttaagtatataccaacatcgcattatgtcacattaatttccccacatctcaatctcaggatgaggaagagatttaaaggtgtctggctacattaattgttctacgtctaataaatttttcataccaaaaagaaaagctccagtagataaattaatggtacctgtttctggtgagtagcctggtgagaaattccaacaagtgatgattcttgcaaagcactagactgactgtgcggctaatgtgctcgtaccagctagccactgaggctccgaaggccatcggaggccacacttccttgggggccagtcttctcatcacatattgcgtcccttgcacaccttttggcaccgaataatatggctgcattccccattcgttcacatatatcagttaattaccattactaaccaggaagcgttactcaaataaaaacagtattatatgactcacaggagccaatagagtgagtgacttgatggctcctgggtgtttaaccgcgagcgcaagagccaaaatgcagcctagggagtgagccactaaatggaatgtcttgagtctgaactgagaaatcaccgatctctctatcatctctaaatgctcttttaatgtatacaatgaatcgttcggctttggacttttcccataacccaacaggtccactgcgagaaacctgtaattcgatttggctgagtctgagaagtttgggaacagagtctccgtccaaaacgtggatgatgataagaacccatgaatgaacactacgttctcttgtgccttgttgtctgcacattcaatatttaatatttagttatgtctttaacctctcaaaaattagtttatatatttcttacaaaaattgtttctgacctagtgtagcacaagcaatatttgtttttttgttttttgaacaagcaatataatgtaaataatttatgatgtaatatggataaactactaagagattttttcactcagcttctgagtctaagtcttttcactccacattaggtctgcattgtctcataagttcttcacattgtttctgaatgatcactccacactagatgagaaacatccccatgcaattttgtctattccatggaagaatcaacggatctttgaaggcatttctttaaagtaatgtttaatcctagttaaaacgcgtctgttcatttaaaatgactggtttctcatcttagtaataaatgatttttgattgtactaatggctaatgcaaaaccccaactagctagaacccatacaacaaacattactttgttttttgttcaaccaacaaacatttctttaattatgattaatgagctaccagtcttttgtaataatcaaattcatgataaaagattatttagatgagaatgcatgctgcaggagacattagagtgggaaagggttttcaaatttcaaaagaggacaacgaaacaggggactgagattatataaaatgtagaatgtagagaacatatatatatatatatatatgtacctgtgggctgttggacattgacaaagagagattggttggaagaggaaagccaagaagtgcagaaagtgcaatggcaatcagaccatcttggtgttctttgcaacttctcgaccaccgtggagttgacagtgagtaatgtctttttagttgacggtgatctcttcttggactcatcacagcatttaacaacatctttcttgaagcacttcaccagcttagtgagcttggtgaggagtgaagggcgagagtagagtgtgtcggagatctcatccagatagatctttgtccttgtgagtgagaccaccttcgagtagtctcctgatctttccgacactatcatcttaccgcctctgttccctccagccgagattggtttggcctcgggcggcggacagcagtagcagggtttccactcggactcgaagaagaaatcaagagtcttgtaggtaaagcaaagcaggaaatcaacaatgtcgaggatgaagaagacgaagacgcccacggtgcggttgagcgaccgtgagaatcccatgctgtggagtttgagtcttgtggaagacgtgtatgtatgtaagttgtatgtatgtatggtggtgatgttgcaaagacaaaatgcgtgagagagagaaattaagttaatgaagagagagaggaaaacagatggcagctgcatgaatttattgatcgcatttaacatacattgttggctaaaatgatgaaatttggtggccgttgaatcttcttcctttttttttgcaacactagaccacgcatatccagcacataccgtaatatcttttttaacttcaaaacaggaatcaatactaaggaacatgtgatgtcgattggtccggtgatgatccaaaatgccgctatagctacatacacacaaagtcagtcaagtcattatggatgtgcggttccttccttagggttacaagaaattatgtttaataatgtgaaaataatatgctaagaaggcatgtaattttgtatttgaaaacaatcaaaaccctagatagtcccaataattaatgatactcatatatgctctgtttggtaaggccactattgaggattttggccggttgatgacttttggggtctaaaactacaaggagggcaactaaactatatggatataaatgtgttttttttttgggctatggatacaaatgtgattacgtaccgtgaaagtgaaactaatacagacatcaaataattgaagtaatggcacagagtagtaaatgtaaatgttgatagcgaaataagataaagaatggacaagtgatatgatggcatgtggccacaacttatatccatcactctgaatgcccagcagcccatctaaacagcctagctgacctgtttttagacaattctataatatgtatacacattttggtaaaacaggagttaaaagagttagtctgtcagtatccatatatagatagtagtattggtaatatttcatgaggacaaggacgtgtgcgtggcatcaagcaacagctaatcgcatctctttactcaacataccattctctctaatctgttagggtgaaaatattaatgaagtagaaatattcgagtgtgcttttatgagaaaagagtgatatacatatatagtagtatggtaaggaacgtgagaccatgtgctatgtttaataggttttcaaaagtcttgcgtcacacaatcttaaagagggcctgagagcttatttttaataatacttaaccaaacgagtggcttgattctaactagatcccggtatgtagtatagatacgacaagctactgatggagacagatatatatagtccccctcaagtcaagccttctatattcattttctgtcattgtatgtactcttcttgcaaccttttcatatgtatcactataatttgttttttcctcttgaagacttgaacaatctggtggagcaccagaagattcactaacagccaagtatttttttgatatcattcataagttttagggtaatggagtgaaattagctagaggaatttagtctaaagctcaaactgcgaccacccgatggagttgttttggtagagcagaaaaataagttgaaatgtaagaaagagaattagttacaactgtaagttacaagtaatgacacaattgtaatgcagaggtcaacgacgactgacatacatataagtgcactccattccaacatgtagtagcattcgaattggttttggactgacaaaattgagtaactacaacaaataataataataataataaaagtatgtgaaggaaaaataaaaaagtcaaaagaccttaaatgcgtagttgatggaggttggtagggagtgtctttaatttatagttttacatattttgaaacttgaaaagtgctcctctcctctttgatttatccctacttgctaattattttactcatccacgttaccatatcaatgtaatgacactcggtatatgattggccatcgacatgtatacatattgaaaaaatgtcaaaaacaagtttcacctatcaaagttggataagaaaaaaccccgtttaacagctcgatgcactacaatatcaagtgatttaacgacatggctaagttaggtttagtcaaatgaaacttcgttattacatatttacattgacaagtcaacgaaaatttaagagtttaggttcttagccgaaagttggtgattatttttattttaactaactttgaaaggtaatctttttttttttgtgatatttttcccataactttaagaatcagtatatgttttacacataattgatatatataacttaaaacataagcttatttgggcaaagttaaattaaataaaaattcgaaataacttgtaatctaacacatattaaataattgaataaatatttgaaaaaaatattctcaatgaaagataggcctcagtgaaacgggccaatgttttttgtgtgggcttatatagtccacccaaaactttacttgtttaagaggcaaacaaagtggacacttgtaagtggtaaggttgtggtcacgtttgtgtggcccttaatgcagtaaaagcagagtatgagatgatggtggtagggaagaagagcaacgagggcgagagatatcttcttatccatggcggctattgctagtctgcaagcagttaatctcacatttaggcgacgtagcactcgatgtggaattgctgagccgagcggagagccagctccgatggggctgaagactagatacgaggatgggctggtggagagagtgttcatgggtctcttcgcgaggaagatggacaagttcgggtcgaagaagaagaaggacacgaaggagaagggtttttgggagtacgattacgagagcttcgtggaggtgtcaaagagagtgatgcagggacggtccagagtgcagcagcaagaggccgtgagggaggttcttctctctatgctgcctcctggtgctcctgaacagtttaggaaattgttcccaccaacgaaatgggctgcagagttcaatgccgctcttacagtgcctttctttcactggttggttggtccatctcaggtcatagaagtggaagtgaatggtgtgaaacagagaagtggagttcgtatcaagaaatgcaggtaacaagtgaattccatcaaaatgactattactagttgtcttgttcaaaatgtgacagacttgctcctactgttgattgaaggtatctggagaacagtgggtgtgtaggaatgtgtgtgaatatgtgcaagattccaacccaagatttcttcaccaatgagtttggcctcccactcaccatgaacccaagtatgtaacatatctccttttgaccatccttatacattggtgtttgttttcattagccatctctccattttggtttgtagattatgaagacatgagctgcgagatgatatacgggcaagcacctccggcctttgaggaggatgtagccaccaagcaaccttgtctagcagatatatgtaagtcttacaatgctcagattgcatacatgcatgcaagatgtatctaacatgatggtgatgatgttgcctgcaggttctatgtcgaatccaagctccccaatctgccctaaactagaggcatgagtggagtggatcagcagccacttctttgacgggatgtgcaatttccaagcgatatacatactttttttcttttccaaacacatacattacatataaaagacagttgtgaagacgagttagtgttctttgttactattctggttgggttgtgtaaagtatacgataatacacttgagcttactcatcttctttatgttttaagtttgaactcgccatgttggttataacttggatctcaagtgttacttgcagtttgtattgtaatataaaaccaaaaactgagattagcttagctttaaagtaaccctctctgcttatatggatatcagatacttactgtagttttgctttaacgacttactttcatggaatgtttagtttgcggtttggtgctttgatacacactgaaagacttaactttcatttgacttgcacacacaaaaaaagaaaaaagaattctgttccttgttttgtttcctgcaactccaactgactagggagtgaacagaacagagtaaatgtttagataaagaaaatctgttcatagtttaatttatagagagacatatagctaggagaagtggaacagatgaggcattaatgtttgaatgggccaattaattgacacccccaagtgtacgaacacacaaaatgagaggtggttcattgaaagcacagagaagttgtcggcttttcaaagatacactgcccaacaaacaatcgtcatgaaactacaacaaaggtcagtttcatatatcttctaatcgcatttgttagtttacctaagagttagacgccatctgtttgtttctgctacttttccttactctttaacgacgaggtcctgaggaagaatgattgaagctggtaatcatgtgatgactcactctttcagctttacaacacacttccatcttctaaagtgatatttaataacccttactttttttctttctttttcccttttttttccctttatctcaaatatagaaggccaaccaaaaagatgaaggatatgaagatgcagagcagccctgaaacgatgatgaccagaatccccactccagatcctcacagtaccggtgtacgagaagatgcaatggactcagtctgcaaaccctggaagctttatgaaaatccatactactgctcttctcagtctcaacagcatcaacaccaacgcaaggcatttatttgggatctgaatttcataaaggtgttcatggaatctgaactaggaaaagctcaagacgagatcaaggaattgaaggcagaactggactatgagagaaaagctcgaagacgggcagagctgatgatcaagaagctggctaaagatgtggaggaggagagaatggctagagaagcggaggagatgcaaaacaagcggctcttcaaagagttatcgtctgagaagtcagagatggttcggatgaaacgagatcttgaagaagagagacagatgcacaggttggcagaggttttgagagaagagagagttcagatgaagctgatggatgcaaggcttttcttggaggagaagctatctgaattagaggaagctaatagacaaggagagagggagaggaataggatgatgaaacctaagatattggagagagcgtgtagctcaccggctaggaggaggtgcgagaatccgcaaataaagagaggaatcaatccgttcccaagagtgatgagagcaataagatcaaagagtgagaaatggggttcaaagctggagtgccaaaaggttcagctcaaaattctgctcagacaaaagaccaccccaagatgtactcctcttctctcctctcctcctccttgatactgtatgcttgtcttttgttcgcctcgctcaatctcaataattcacatctaagactgaagatgtactaataagattctctttgtctgtccgttagataatattttattcacatggatgtgttatacatagcatatatattgacgtctattaaagatggattggaagaaaatgattatcccattatccaaatttgttatgttgagtcgtctcggacaagatcagacaaatatacatagttttctgcacctaaagctttcttctatcgctggtatagttttgaaggatcttataaggatctataaagaattaacaaaagtttttgaaagattgaatgaatgttttgaaacgatttacaagagattttaatgatctataagattttaaaatgatttacaaatggttttcaacggatttataagaggtttaaaagatttataaaaagttttacaagagtttaaaaaaagattttcaagaatttttaaaaaataaggggttatttaaaggatttacaaagattttataagaggtttaaaaagatttacaagaggttttaatagaattgtataagagtttataaatgatttacaagaattttaacaagatttttttttaagtaattgcagaaaattttagtgtaaaattttcacgtttgcggataatttttgacgaagaaatttcaccttcacattatttggtctcactaaaaaaaggtgatatagtcattttgtatataaaaatgtgtattgtgaaaatagactagaagagaggaagctcattttattgtccaactatatgcaattaacacaattattcgccaactatcgtgtgcacaaatttaatttttaacttgtcgttgacttaacaattttactagttaatagaaaaacgttaaatgactcaattaaaacctaataaatttagaaaatctccaaatttcctcccaaattggtgcaagataacatacttcattacttataagttataacattaaccacacatttaaatatagggaattaaaatctaccagaaatcaaattctaggtctgtaccaccgacaagaaattctcggacgaactacttgtgatgctcgatgtttcacccttggctacggctctcacactctctattagctcatttgttcttccatcttcagacagaatctgtaacagctcttcagtgtttatgatcagattcactttccatattgcacctttgctgctcgtacgtctcctcctcgttttcttctccttttgtcgggtccttatgtggctgtttcttgaaaaaacgtccgtgtatgatcgcttcaacaccctgtggttgtaatccagagacattctgtacggagttatcgcagacaaggactcgctgttggatctcacgtggcagcttcccacaaaagtcttcaactcgtcggagacaatattgggaaagagatagtaggactgaccgggcacgaggaggtggtcgtgagccaggggtttccagaggagatcaacagccgagaaaagagcatggcctgagaatccgtgggagacaaagcccgcggtaacgggggagtagaactcaagaactccaccgtcggattttatgactttgatcaataagtcttcctcttcgtcgcctaaccctccgaataaacagtttcccatgcttgacttgtgtgctcttcttgcctactccatgctctctcgctctatagtctaattataaaggtcagtgagggtgagagacttaagagattccctataattcatcttatttaaactctaaaaagagacaaactatgtgaacacaaaagtagcgtacatcaaaggaaaacgcggtggaatcttctttgcttttcattagttttaatactgctatgtatacccatagctttcttttttggtaactttttcttttggagacatgctatttagttagtgttagttcttttgttctttggtgatggatatatacttaacattaacaaaaacaaacatacaataaagtaactgcaagtgaccataaacatattcaattatataaatgataaatctactcactttaatctatatatatatatatatactttcgtttcttcattcctaaaagcacggcagaagcagagatctattgtcagtggaacattttgagttgtgatatcccaaaaagaaaagaatttggctataaagaatacatcgaatcatattatgttagactaagggagaagagagagagaaaaagaagaagagaataagtaaaagaaaaaggcttagtaaatgggtccattctacttctattgaatcctttattttggccaaaatcctattgaatcctaaaataactaatccaaaagaaagaaaaggtccaaggttctacgaagagacatcggtcggagtctctttccaactttgtctctgaccctattttgaagtctaagtccgattttggcgctagaagctaattctaaaaagatccactcaccaattgatcaaatatatttgatctaatattaaattaatcttctatttttttggacaaactaataatttcattagaattaagcctcaaattctatcataaaatgaaggattacatctaaagaaattagcatccaaagcaacccgaaaggttatggccactgcaacaaaggcagcgaagagcatacgccgggaggaagatccttacaataccaacaaagattgaacatacaatccactccatataggagggaatattgggaagaaaaactgctccatcaaggagatagaagataacaatgactcgacaatgttctacttatatctcactacaaaaaatgtctacattgatagcataacgtagtagcacaactactcaactattattgaagattaattgtaatttttaattttgtatgatagtattttacaaatgttagtaaataattttattaatatagaatttttattaacgctatgatagaatttttctaaccttgaaaactaaaatactcataccgccaaacacttagacaaaaatttctctttttgcatcaaaattatttttgccatattttctcgagaaaaccctaaaacttaaccatcactcctaaagctctctcaaaccgacgaatcgattccgggagccagtgattaaactcgccgccttcgtcgttgaaggtagccaccgtcgttgaaggtagctgcgacacataacctcttttcggccctaattcaccgattaaaccatctctttgagtcccaaattgaaggcatgtctctctgaatatgtagctttatttcttccctttcgttaacctagcttgtttttttttagctgtcgtgaagctcgacaactattttgtttcttaaagtctgaatttatagatttctctcattcgatacttcaaagtttttatcttttgcatgcccgtgttctttgcaaaattataactatttgtttgtgtggtttgatttaggcgtagctggataaataggatgcacaattttgctttgtaaaaatcttagatttttagataacttgtattggcctgataacttgtattgacatgttctcgagatttagaagtttttgttgacattctattacaacaatttgtattgacttgttttttgaatttttaaatcttttcggtgcttgtaatgacatggtctttaaatctttatattatttttggaacttgtcaaacacattcttgcataaacaaacacaaacaaacacatgaaactagatatactcattcaatatttttgttttgcaagtgctgctgtgtaaataatgagaatttgaagctgatatttggctcttattacacgacaggttagtaccatcttaaacattactgtgacttttgtcttgaacattattgtggattattatgtgttgaacatttctatgggttctgtaagccaatatatagcatgaacagcccattggaaaataatttcattaaactccggtacaccggaagttctagatcgaagagaaatagaatgaagaagctaacaaacttttattattaattaacagaatgttacaacaacttaatcaacaatgtcattaactaagcttatatacataagattaaaccaacatcaataaccagaaataaccaatatgtaaaccggtccatatttgcaataattatatctcagaacattcattaaattgttataaatgccatacgtatggcccatatatttttaatactaaaatagcaattttggtgaagaattttccgtaaatccatcacgaatgttagtaggtatgtggtcatgatggatttgttgttttgttgttacagtttcaattacgagtgattgattttaaacccgttgttgatagtttggcaactcattgctatgagttttggtgattaatgatcacataaatttttgaaatttggttgaagaattagcagcaatgaaataaacatgaatttactatcgaaacaagatgttatcaccaaaatatgttggttttaccacaaacaaaaatgcctgatatatctttggtttagaaaagtaagattcacataacatgtattggtacacgtgtcccacctcctttcactgtagatccgcccctatgttgagcagacagataaaacaacacgagcattaaatagatgggacattccatagcccacaagcaatttcacgaaattaaatgagaaatgggtcaagattggatcactcgaaaaactgaggaaaaaaagaagaatacgtaaggagttgaaacggaacgtggactatgtcagcccgaagaacacgtttaatgactatggccccatgcaggaccattcccctttttttgaggtgttaccctgttagatccatatttgttttgaacactatcaaaaaatatttgctaaagaaaaacactatcaaaatatgttacagtattctcttccgttttgcctaaactcgaactcataactttaaacctcctcttttaagattaccatatgcatgtacataaactggtttaacaccaagacaccaaattttaaccacaaaacaccaaacaccaaatacgttggatatcttaacctatttcttactcacttaacctttgtgtgtgtgtgtgcaagtgtattactatatatataaagtaaaatatatgcatatattgttaaaaatatcacattaataatggagacggtttataaaagataagaagttttttctttcacttattgttagttaattttgaataaaacaaatcataatttcacatagtattaaacctatatatgtattacttaaaaaggtaaaatttgatacgagatgaataaacaaaaaaaaatcaaccatttcaaatttacatgttaaaatatctcgatttggatatagtcatatagagatgattttatattgatatataaatcgccttcacttattggcaattagtattgagttgaaaatctataatttttctacatgcattgattcaactattatctttcacatcatgcattaaattagcttgggttccatcgtacattagtgtatacatatgccatcttcttcatcattagataatttttcttataaaataaatgcaattataacaatttgattggatatgtcttgtcatttagttgcggaaaaatcttgacgtctcttcttgtctgaagtcttaagtatataactggaaagtccgtattggagttcaacaaaagaagaaaacgaagacttttagttagatcctacattactgaactcattatatatatctggtgagacattctcctatatatgcagtttcaactttcaaagccagcaaataataaacagaggagaaatatggaaacacaaggcaaagtaatcacttgcaaaggtaattggttgtgtatataattaatctttatataaatatgatgtgatgagtgagtgagcgtgaatgatgaatattgaacagctgctgtggcatggggagctggagagcctctagtaatggaagatgtaaaagtggatcctcctcaaagattggaagtgagaattc

SEQ ID NO: 114 - DNA, 118335 bp, Arabidopsis thaliana
gaattccatcaaaatgactattactagttgtcttgttcaaaatgtgacagacttgctcctactgttgattgaaggtatctggagaacagtgggtgtgtaggaatgtgtgtgaatatgtgcaagattccaacccaagatttcttcaccaatgagtttggcctcccactcaccatgaacccaagtatgtaacatatctccttttgaccatccttatacattggtgtttgttttcattagccatctctccattttggtttgtagattatgaagacatgagctgcgagatgatatacgggcaagcacctccggcctttgaggaggatgtagccaccaagcaaccttgtctagcagatatatgtaagtcttacaatgctcagattgcatacatgcatgcaagatgtatctaacatgatggtgatgatgttgcctgcaggttctatgtcgaatccaagctccccaatctgccctaaactagaggcatgagtggagtggatcagcagccacttctttgacgggatgtgcaatttccaagcgatatacatactttttttcttttccaaacacatacattacatataaaagacagttgtgaagacgagttagtgttctttgttactattctggttgggttgtgtaaagtatacgataatacacttgagcttactcatcttctttatgttttaagtttgaactcgccatgttggttataacttggatctcaagtgttacttgcagtttgtattgtaatataaaaccaaaaactgagattagcttagctttaaagtaaccctctctgcttatatggatatcagatacttactgtagttttgctttaacgacttactttcatggaatgtttagtttgcggtttggtgctttgatacacactgaaagacttaactttcatttgacttgcacacacaaaaaaagaaaaaagaattctgttccttgttttgtttcctgcaactccaactgactagggagtgaacagaacagagtaaatgtttagataaagaaaatctgttcatagtttaatttatagagagacatatagctaggagaagtggaacagatgaggcattaatgtttgaatgggccaattaattgacacccccaagtgtacgaacacacaaaatgagaggtggttcattgaaagcacagagaagttgtcggcttttcaaagatacactgcccaacaaacaatcgtcatgaaactacaacaaaggtcagtttcatatatcttctaatcgcatttgttagtttacctaagagttagacgccatctgtttgtttctgctacttttccttactctttaacgacgaggtcctgaggaagaatgattgaagctggtaatcatgtgatgactcactctttcagctttacaacacacttccatcttctaaagtgatatttaataacccttactttttttctttctttttcccttttttttccctttatctcaaatatagaaggccaaccaaaaagatgaaggatatgaagatgcagagcagccctgaaacgatgatgaccagaatccccactccagatcctcacagtaccggtgtacgagaagatgcaatggactcagtctgcaaaccctggaagctttatgaaaatccatactactgctcttctcagtctcaacagcatcaacaccaacgcaaggcatttatttgggatctgaatttcataaaggtgttcatggaatctgaactaggaaaagctcaagacgagatcaaggaattgaaggcagaactggactatgagagaaaagctcgaagacgggcagagctgatgatcaagaagctggctaaagatgtggaggaggagagaatggctagagaagcggaggagatgcaaaacaagcggctcttcaaagagttatcgtctgagaagtcagagatggttcggatgaaacgagatcttgaagaagagagacagatgcacaggttggcagaggttttgagagaagagagagttcagatgaagctgatggatgcaaggcttttcttggaggagaagctatctgaattagaggaagctaatagacaaggagagagggagaggaataggatgatgaaacctaagatattggagagagcgtgtagctcaccggctaggaggaggtgcgagaatccgcaaataaagagaggaatcaatccgttcccaagagtgatgagagcaataagatcaaagagtgagaaatggggttcaaagctggagtgccaaaaggttcagctcaaaattctgctcagacaaaagaccaccccaagatgtactcctcttctctcctctcctcctccttgatactgtatgcttgtcttttgttcgcctcgctcaatctcaataattcacatctaagactgaagatgtactaataagattctctttgtctgtccgttagataatattttattcacatggatgtgttatacatagcatatatattgacgtctattaaagatggattggaagaaaatgattatcccattatccaaatttgttatgttgagtcgtctcggacaagatcagacaaatatacatagttttctgcacctaaagctttcttctatcgctggtatagttttgaaggatcttataaggatctataaagaattaacaaaagtttttgaaagattgaatgaatgttttgaaacgatttacaagagattttaatgatctataagattttaaaatgatttacaaatggttttcaacggatttataagaggtttaaaagatttataaaaagttttacaagagtttaaaaaaagattttcaagaatttttaaaaaataaggggttatttaaaggatttacaaagattttataagaggtttaaaaagatttacaagaggttttaatagaattgtataagagtttataaatgatttacaagaattttaacaagatttttttttaagtaattgcagaaaattttagtgtaaaattttcacgtttgcggataatttttgacgaagaaatttcaccttcacattatttggtctcactaaaaaaaggtgatatagtcattttgtatataaaaatgtgtattgtgaaaatagactagaagagaggaagctcattttattgtccaactatatgcaattaacacaattattcgccaactatcgtgtgcacaaatttaatttttaacttgtcgttgacttaacaattttactagttaatagaaaaacgttaaatgactcaattaaaacctaataaatttagaaaatctccaaatttcctcccaaattggtgcaagataacatacttcattacttataagttataacattaaccacacatttaaatatagggaattaaaatctaccagaaatcaaattctaggtctgtaccaccgacaagaaattctcggacgaactacttgtgatgctcgatgtttcacccttggctacggctctcacactctctattagctcatttgttcttccatcttcagacagaatctgtaacagctcttcagtgtttatgatcagattcactttccatattgcacctttgctgctcgtacgtctcctcctcgttttcttctccttttgtcgggtccttatgtggctgtttcttgaaaaaacgtccgtgtatgatcgcttcaacaccctgtggttgtaatccagagacattctgtacggagttatcgcagacaaggactcgctgttggatctcacgtggcagcttcccacaaaagtcttcaactcgtcggagacaatattgggaaagagatagtaggactgaccgggcacgaggaggtggtcgtgagccaggggtttccagaggagatcaacagccgagaaaagagcatggcctgagaatccgtgggagacaaagcccgcggtaacgggggagtagaactcaagaactccaccgtcggattttatgactttgatcaataagtcttcctcttcgtcgcctaaccctccgaataaacagtttcccatgcttgacttgtgtgctcttcttgcctactccatgctctctcgctctatagtctaattataaaggtcagtgagggtgagagacttaagagattccctataattcatcttatttaaactctaaaaagagacaaactatgtgaacacaaaagtagcgtacatcaaaggaaaacgcggtggaatcttctttgcttttcattagttttaatactgctatgtatacccatagctttcttttttggtaactttttcttttggagacatgctatttagttagtgttagttcttttgttctttggtgatggatatatacttaacattaacaaaaacaaacatacaataaagtaactgcaagtgaccataaacatattcaattatataaatgataaatctactcactttaatctatatatatatatatatactttcgtttcttcattcctaaaagcacggcagaagcagagatctattgtcagtggaacattttgagttgtgatatcccaaaaagaaaagaatttggctataaagaatacatcgaatcatattatgttagactaagggagaagagagagagaaaaagaagaagagaataagtaaaagaaaaaggcttagtaaatgggtccattctacttctattgaatcctttattttggccaaaatcctattgaatcctaaaataactaatccaaaagaaagaaaaggtccaaggttctacgaagagacatcggtcggagtctctttccaactttgtctctgaccctattttgaagtctaagtccgattttggcgctagaagctaattctaaaaagatccactcaccaattgatcaaatatatttgatctaatattaaattaatcttctatttttttggacaaactaataatttcattagaattaagcctcaaattctatcataaaatgaaggattacatctaaagaaattagcatccaaagcaacccgaaaggttatggccactgcaacaaaggcagcgaagagcatacgccgggaggaagatccttacaataccaacaaagattgaacatacaatccactccatataggagggaatattgggaagaaaaactgctccatcaaggagatagaagataacaatgactcgacaatgttctacttatatctcactacaaaaaatgtctacattgatagcataacgtagtagcacaactactcaactattattgaagattaattgtaatttttaattttgtatgatagtattttacaaatgttagtaaataattttattaatatagaatttttattaacgctatgatagaatttttctaaccttgaaaactaaaatactcataccgccaaacacttagacaaaaatttctctttttgcatcaaaattatttttgccatattttctcgagaaaaccctaaaacttaaccatcactcctaaagctctctcaaaccgacgaatcgattccgggagccagtgattaaactcgccgccttcgtcgttgaaggtagccaccgtcgttgaaggtagctgcgacacataacctcttttcggccctaattcaccgattaaaccatctctttgagtcccaaattgaaggcatgtctctctgaatatgtagctttatttcttccctttcgttaacctagcttgtttttttttagctgtcgtgaagctcgacaactattttgtttcttaaagtctgaatttatagatttctctcattcgatacttcaaagtttttatcttttgcatgcccgtgttctttgcaaaattataactatttgtttgtgtggtttgatttaggcgtagctggataaataggatgcacaattttgctttgtaaaaatcttagatttttagataacttgtattggcctgataacttgtattgacatgttctcgagatttagaagtttttgttgacattctattacaacaatttgtattgacttgttttttgaatttttaaatcttttcggtgcttgtaatgacatggtctttaaatctttatattatttttggaacttgtcaaacacattcttgcataaacaaacacaaacaaacacatgaaactagatatactcattcaatatttttgttttgcaagtgctgctgtgtaaataatgagaatttgaagctgatatttggctcttattacacgacaggttagtaccatcttaaacattactgtgacttttgtcttgaacattattgtggattattatgtgttgaacatttctatgggttctgtaagccaatatatagcatgaacagcccattggaaaataatttcattaaactccggtacaccggaagttctagatcgaagagaaatagaatgaagaagctaacaaacttttattattaattaacagaatgttacaacaacttaatcaacaatgtcattaactaagcttatatacataagattaaaccaacatcaataaccagaaataaccaatatgtaaaccggtccatatttgcaataattatatctcagaacattcattaaattgttataaatgccatacgtatggcccatatatttttaatactaaaatagcaattttggtgaagaattttccgtaaatccatcacgaatgttagtaggtatgtggtcatgatggatttgttgttttgttgttacagtttcaattacgagtgattgattttaaacccgttgttgatagtttggcaactcattgctatgagttttggtgattaatgatcacataaatttttgaaatttggttgaagaattagcagcaatgaaataaacatgaatttactatcgaaacaagatgttatcaccaaaatatgttggttttaccacaaacaaaaatgcctgatatatctttggtttagaaaagtaagattcacataacatgtattggtacacgtgtcccacctcctttcactgtagatccgcccctatgttgagcagacagataaaacaacacgagcattaaatagatgggacattccatagcccacaagcaatttcacgaaattaaatgagaaatgggtcaagattggatcactcgaaaaactgaggaaaaaaagaagaatacgtaaggagttgaaacggaacgtggactatgtcagcccgaagaacacgtttaatgactatggccccatgcaggaccattcccctttttttgaggtgttaccctgttagatccatatttgttttgaacactatcaaaaaatatttgctaaagaaaaacactatcaaaatatgttacagtattctcttccgttttgcctaaactcgaactcataactttaaacctcctcttttaagattaccatatgcatgtacataaactggtttaacaccaagacaccaaattttaaccacaaaacaccaaacaccaaatacgttggatatcttaacctatttcttactcacttaacctttgtgtgtgtgtgtgcaagtgtattactatatatataaagtaaaatatatgcatatattgttaaaaatatcacattaataatggagacggtttataaaagataagaagttttttctttcacttattgttagttaattttgaataaaacaaatcataatttcacatagtattaaacctatatatgtattacttaaaaaggtaaaatttgatacgagatgaataaacaaaaaaaaatcaaccatttcaaatttacatgttaaaatatctcgatttggatatagtcatatagagatgattttatattgatatataaatcgccttcacttattggcaattagtattgagttgaaaatctataatttttctacatgcattgattcaactattatctttcacatcatgcattaaattagcttgggttccatcgtacattagtgtatacatatgccatcttcttcatcattagataatttttcttataaaataaatgcaattataacaatttgattggatatgtcttgtcatttagttgcggaaaaatcttgacgtctcttcttgtctgaagtcttaagtatataactggaaagtccgtattggagttcaacaaaagaagaaaacgaagacttttagttagatcctacattactgaactcattatatatatctggtgagacattctcctatatatgcagtttcaactttcaaagccagcaaataataaacagaggagaaatatggaaacacaaggcaaagtaatcacttgcaaaggtaattggttgtgtatataattaatctttatataaatatgatgtgatgagtgagtgagcgtgaatgatgaatattgaacagctgctgtggcatggggagctggagagcctctagtaatggaagatgtaaaagtggatcctcctcaaagattggaagtgagaattcgaatcctcttcacttccatctgtcacactgatctcagcgcatggaaaggcgaggtactcactcttcatgttcttcttcttcttcttcttttaattatatctcttcttcctatctcatctctatcttttggtcagaacgaggctcagcgagcataccctcgaatccttggccatgaggcagcagggtaagtggtataaatctggtatatatggatctcatttttcatccctcaatataattgaatgatgaattacaggatagtggagagcgtaggggaaggtgtggaagagatgatggcaggagatcatgtgctccctattttcacaggagagtgtggagactgcagagtgtgcaagcgagacggagccaatctgtgcgagagattccgagtggatccgatgaagaaggtgatggtaaccgatggaaagaccagattcttcaccagcaaagacaacaaaccaatctaccattttctcaacacatccaccttctccgagtacacggtcatagactcggcctgcgtgctcaaggtggaccctctgtttcctctggagaagataagcctcctcagctgcggtgtctccactggtaattaaccatctctgtataatatatatgacatgcatgatgtgttttcttatttaatgaaagagataagtgtttatggaatgaaggagtcggtgcggcgtggaatgtggctgatattcaacctgcctccaccgtcgctatttttggacttggcgctgttggacttgccgtaagtccaggttcctctttgtttgtatggaattggtgacacatagacttaataatgccttgttaataattggggaaacaggtggctgaaggtgcaagagccagaggagcctctaaaatcattgggatcgacatcaaccctgacaagttccaactaggtatgcagatgaacatgcatgtcagtcttaaagtaggttaaagagcattgttactaaatgaagtgtgctttgctggatgaacaggcagagaagcagggattagtgaattcataaatccaaaggagagtgacaaggcagttcatgagagagtaatggagataacagagggaggagtggagtacagcttcgagtgtgcaggaagtatagaagcacttagagaagcctttctgtctacaaactcaggagtgggagtgactgtcatgctgggcgttcacgcaagcccacagcttctccctatccatcccatggagctcttccaaggcagatccatcaccgcctctgttttcggaggcttcaaacccaaaacccaattaccctttttcatcacccagtgcctccaaggtcttctcaatctcgatctcttcatctctcaccagcttcccttccacgatatcaacgaagccatgcagctgcttcaccaaggcaaagctcttcgttgccttctccacctctaaactgaacaaacatcttttacattttccaaatccgtttgattgattgttctactgcttttagagtttccttattgggtctggtccacccccatactaaaataaaagttggaaatgttttctccaacttgctacttacagctacaaaacacacaagttatatcgatttcttgcattagtctttcgatatagttcagtcgacatgaatatgaaagatgcgaaaccctgaactcttttccttcactgaaaattgtgagaactctatggaacttagaacgattgagaagaagcaaaatcagtttaatatcttcctctcgtgtttgtttttataatttctattaccttcactccatcagaaacttagacaagaaaagacggagatgttcattagcacagcgcggtggaactatctttccgcgctctcagaaattcaacactgaaagaataactctcgcttctttttctctttgctattacatgattgatacatccagcaagacaatgactaaagagatagtcttttcacctctctcattccctcattcgttctctgtctacttacatgtacactctctcctacatcctttttcccattcttgcaaatcttctggctactccgaatatcaccgcctttgtcaacagccctttgtccaatgtacatgcaagtgcaatcgcccctcctaccactagtatctttggtatgtttttccccgtcggcttgtctcctgtaacctctgctatcgaacccctctcattcatgaactcctctgcactcactttggtgttgatgtgagccattatggcactcggggataaacctgctcccgctgctttagccctctgatatgcacgtaggcctggctcaatcttcttgactgcaccccacataccctgtctcaccccaagctttgcaatctcccacggtattcccatatcttcatggtgaaatagtagtacctcacatgatgtcatctcaccatcgcctctttttgattcaactacaccatggtaatatccatttgagaaactaaacaacacttaaataacagagacaacttgcttagtagtacctgcacggatacaccagcttgaatagtacaagtcgactcgccttggcttgttttgtctaggtacagacgggtattgtactccctgatgcaaatacaaaggagcatacttactataaacacatgaataaaaagagtgaatttaaaagacaatattcacaagaagaacacatgtttaatagctcgcactagaagaataagttggatatttgcttggttactagcagcgaaagaatggaataccttagtaatgcagtaaaagactcggccagcatcccatatacgacggcctataatatactccctgtcgctacaaaagaaggggaactgcaacagtagcggaagatatgagtaaagagaagggagaagaagcaaacagaacgaagaaaaaagagaaacaagtagcgacctttcgcacccattgcacaaccatagtgcccgtgtccttgcaacgctcgagagtagaagaatacaaaagcatatcatcccacttggaacggaactcatcatcccaaaagaagtccctgaccatctcgggagtggcatcctcaaacacagttctgctacggtactggggaggcccattctggcatcatacaaaaaatgattcaacttggaggaacatgttaaactaaacttaaaggaaggagggaggggggtacctcaggatctcgcctccaagcttgatatgagaaggttggggttgatcggtccatcatttgaatccaacaaggaccgccatctttgacctcaaccaacttccatagatgcctaaaatcatcgtccgttacaaacccagttttctctttggaagaaaggctgcgacccaaagagaagcagagttatttatttagcagaagagtaagaaagaaagagagacaagtggggaaacgggttacatcaatgaaatcatctcaaccttacctggggttaacgtggtgagaagaagttttgaggatggaagtgggaagctgaagattgaggaatttaggtgaattggacaagagtttagaatcgagataagcccacttgggcctccaaacccaaccaaccaaaacaccggcagccacagcaatccagagtggcgcaacaaaaactataaggtcagagaagccgaggctgtgaaactcggtaaagaccaaggaactcaatcccatcatctcgccccctccctccgatggttgggtcttgggagatattgaagcgctgggaggagtcgaggagaccaagagattgaagaagaaggagaataaaaacgagagagaagaggataaggattagaatttgggattactgtaggcccaatttcggcgttcgatgcaatcttcgcctctcgtttctatacacacctctctctcaattttatacacgactaccattacccatttctttaataagtggataaaaaaaagaccaaagtgtttattactgcctgtctccactcgtttcgattctgtggtcgccgcatccctccctcccccttctttttttcttttctgttttgctattatatttgctgctaccatttaaaatttttaagattaaagtctttataaaaaaaaaccttttattaattaaaaaagatcttttgcaaaactaagcatatttcataacttaaaaatatagcattagaatagattttgtatataattggtcatataatcgtggttacatagattctttttctaaaaactctttaattgaaagtataaaaagattagcaaataaaataaaaaaactttaactttttacatatgtaaattaaaattaaaagtatctaaattaaaaaataaatataatcttgtatggtgttagaaataaaataaaaattagaaacaatgatagctatatgccatactttccaaaataaatttagaaccaaattcttaccatgatgaattctttgattttcaacccatataacaatataagatatatatatatatatatatacatgaatatagtggaagatgatgagagaattactatatataagatgtaattaaaaatagacagtgcagatttattttaaaacaaaaaaaaaaaccaaaaaaacaatgtaaatttcatagtctaaaattaaaatttagaactaagcttttacaatgatatttttaaactcatactacgacaacaataaaaaaaaaacttaaaactaaacaaaaaaataatatttgagatttgagatatgtggaaggggatgagaaaataaatgaacgagaaaatgagtattttttattttattttagaaatgtttcattttttttgacacaagttaatttttttatagaaaatgtttaaaaaaatatttaagatttgagatatgtggaaggggacgaaagaataaataaactttacatgtgatacaatgttatgagttactgattttaaaaattatactttatttaacaggatgatttcaattggaaaatttaaaagttttttttttaactaaatgttttaaaagttttatgggggaaaaaagaagaaaacagaaatggaatggattaaaatccaaaaaagaaaatatcgacccaggattggtgaattctttaattaggcatttcgagcggaagagacttttcggggccggcccctttttaagttcgtccagtccattccagctttttgtcctttcacatctaaaagcgggagagccaacaaaacaaccttcttcctcgcgaaaacagagagaaagaggaagaagaagaagaagtctctgagaaattttcgaacatgagggagatcattagcattcatatcggacaagctggtattcaggtcggaaattcttgttgggagctttattgtctcgaacatggtatccaacccgatggcaccatgcccaggtctttatactcatcgctctagtttatgaccatctttattgtttgtgggttcgaatttttgttcttgttattgttattgacatggctctgatgatttagggtagtaataaaaaaaactttgacaagttcatgttttttaataattggatttgttttgcagtgatagtactgttggtgcatgtcatgatgcattcaacacattctttagcgagacaagctcaggccaacatgtgcctcgagctgtgtttcttgatctcgaaccaaccgtcattgacgaagtaagaaccggcacttacagacagcttttccatcccgagcaacttatctctggcaaagaagatgcagccaataactttgctagaggccattacactggttattaacattttccacctctcttgtttttttatagtattcttcttagccttactagattgatccaccttcaggggttaccgaacattgccattttaaactgaaaacatatgttctttcgttttgttttacggtaactagcaaaacattggacattcttaagtatgtatgtctgagttttgagttttgtactagagagtctaacaaagctaagacaaaatttaataacgtaattgtgtgagctttaatgcaattttattcggttgttgtaaattgtgtcatgtgttttcgtggtaataccgggtacttcatatctagataactattcatgtataagctaacaagtagggtatcaatgtccaaatgattgcttgccattgtaacaaagaactctgtcttctttatttgctttgctcaaaatggctctgtttcatccattgcttatgacgagaaacggcatatttaaccatgactggttcatatggtattgaaatatttttccattgatgcagttggaagggaaattgttgacacctgccttgaaaggctgaggaaattggcagacaattgcacagggttacaaggatttttggtattcaatgctgttgggggtggaacaggttctggtttgggttctttactgttggagcgcttgtccgtagattttggaaaaaaatcaaaactcggtttcaccatctacccttctcctcaggtaaccttccacagatacttaaactcttcactgcagaaagataaaatgttcaaactcttttcttggtctcaggtttctacagcagttgtggagccgtataacagtgttctctcgactcattctcttctcgaacacacagatgttgttgttcttttggacaatgaagccatatacgatatctgcaggagatctttagacattgagaggcctacatactccaatttgaaccgcttgatctcccaaaccatctcttcgcttacaacttctctaagatttgacggtgccatcaatgtggacatcaccgagttccagaccaaccttgtaccttaccctcggatccacttcatgctctcctcttatgcacctgtgatttcatctgcaaaggcctaccatgagcagttttcggtccctgagatcacgacttccgtctttgaaccctccaatatgatggctaaatgtgaccctaggcatggcaagtacatggcttgctgtttgatgtatcgtggtgacgttgtgcccaaggatgtcaatacagccgttgctgccatcaaagccaaacgaacaattcagtttgttgactggtaaagagctcacactactagtgtttctttctctcttaagtctccttctactacacatttcaaatctttggtcatgttaaaattaggtgcccaactggattcaagtgcgggataaactaccagccgccttccgttgttccaggtggtgacctggctaaggttcaacgagcggtttgcatgatcagcaataatactgcagttgctgaagtgttctcacgtatagaccataagtttgatctcatgtactccaaaagagcctttgtccattggtatgtaggagagggtatggaagaaggagagttctctgaggctcgtgaggatcttgctgccctcgagaaagattatgaggaagttggtggagaaggagcggaggacgacgacgaagaaggcgatgagtattagaaagacacaagagtgtgtgttcccttgtttctttcttgtgaagtacagtaattatgtctttgtgaatgtgatctctacagttattttgtgatgtttacgggtctctccccttttatttctcatttgtgtttactaaaggattgcatttctagtgcatctcaatacatagtttgaaggatttttggcatttcaaataccgtttacgctctaataaagatccttgtaagaaaatgtacatagtaagttagtaactaatccatgtccatacggaacacaccgcaatggatgttgagagaagatgatgatcttaccagtttaaatttatcatcttcaaagataagaaatttccatccagggaatagtaaaatgtgcaaaggaaaagcagaaccgataacataaaccaaaggatgcagtacaaacaaagttccagatcataaaagaaaaccaagatttcctaaatgtgaagacctgtctttcacaatcttcgaccttatttcttgtcagtaccattctcaagctccttccttaactgacgtgagaagtcgtcattgacatcatcatcatcccagtcatcttcccactgctggctaacttccttcacttcttctttctccaaccaatctgcccaacataaaaagatccatcagtatttactttgaccgtaaaaggacagcaaaaacatccattccacatccaactacacaactcatacaaacagaaaccctctttatcaattctttcaataaaactattagtaaaatcacaaagcaaaatctgttaaacctttaggctactcaatgccctcaaataattcccaaatcctcaataacctttaggctttagtaaatgaagcgttgactattaagactaaacctaatcatcaataagttgctgaaaaaaactgctcttttatccatttagtaagtatgagactatagcttcattgttagaactatatgaaaaaagatctatcaacctatctcacacctgaaattgacatcaaacagattcgttttcatatcagacctactcaactcatacactagtccatctttatcaatcctttcaatacaactactagttaaatctgaagaatcaactaacttgcaaatcaaaatctattaaaatcagaatctgatacaattcatacaaataattctcaattcaaccatataaagcattgcctgtatctatcaatcagttgctaatgaaaatcgctcttatatctatggcatcgtagcttcatcgttaagactataaaaccgatgatgaatcgattcaaaaatcgaagaagaaacaagtaataacaacaaaaattttaccttcgttaatttcaaattcctcgaactcatcgtcgtcctcaaacagatccatctttactacttcagcagtcgctgccttcggttctgccgccatagttacagattgttaaaggaaccaaccagatcgagataacctaagaagaagaagaggaagacgaaaactcgataaaattttccaagttattattgcaaaagcatggaattgataatgatgaaaccctaacctctctgagagctttaacgagagagtaagcgaacttttgtttttcttaagagaagaagcaaataataaagggaaggttttttctttttgtatagaaccggttcgaccgtgttttcctttttgtgaatttgtaaaatttgatggttttctatttattttttaattgctaaaagaaattgtaacattaatgaatttgtaaaataaaactgtagtgtaaaactgtattaaaatatcgatagaacaagtatctggatattccgatttatctaggattcaacttctaagaacatggacaaaagaatcattgtaatatatatatctgtaagaaaacaattaggctcacaaaacctcactaagttcaacaaattcaatctaacctcaaaacatcatccctgataacagaaaccaaacgatcaacacaaccaaagaataagacgaacaagaaaaagaagaggctgaggaagccacaatctgaatagggaaattgcattgtccttgagatatattctgcgttgtaatggtggccaaaccttgaaaatagcaagcactctcatcttgattcttcacttgaaagaacatgttaaacgcatacgacgcgtttccatttgcatcaagagtattgcaagaagatccgtatccaagcgccgtgcaatcagagaaagtgcaggcgtaatctatattagccgcgagttttgtcaagtccttggcttctggattaaacgtacaccacttgttgggtagatacggcacgttttgtgcaccaatcaagaacttactctgtccttgacctgaaagatctataggaaactttggttgcccgtcgaatttaaatattccccaatggcgttcgaacggtcccggtgctatactttttgcatcctcgtcgagtaatccgaacaagtatacctcaatgtaggttggtctcaatggagttcctttgtttgttccaagcctcggtaaaagcccgttgtagaatctgtaagcactgcctgtgaaaaaaccgttttcaaaatcaaaactaaaacacttcataaaggataaaaatccatctaaagaaggtcagatatcaacctgcattagcgtgtttgtcaccctctgttggccaaccaacttctccaacgattattggcatatctccgtgaccaacagctttcaaagacgacaccaaagtatcgaaattggcatcgaaaacgtttgtataatcaataccgttgtcgtttatcggttcagcaccatcgaagaaggcgtagttgagtgggaaatcatcattcccatagagacttaagaaagggtagatgttaattgtgatgggagcattgttcttgccaagaaagtcaacaatctgagtcatttgaccgatgatatcgggacggaatcttcctgcagatggaacgggattgcttgctggtgaatcgtatacatccgcgtttaaagggactgttgctttgacagagtttcctagtccggcttcatttaaagcgttttgaatgttcgcaagtgcagggaatgtgaggtttatgaacgatccattgtatgatttgaggaatggctcattcccaacagctacaaacctgaaacacatccacaagtgattagcttcactgagacatgtaaacacatttttctctaaacatgttctgcattttgacagtactgttaaaagatttgacttttatagatataaatacattttagtggaaacaggttctgcatttgacagtagtgttaaaagatatttgatttcataatcagacaacacagatttcaccagacattgaaaatcaaccctaaacatccaatcttcagaaacaaacatatatagctagacacattttgtctatagacataactcactcatggttatgcatttggcaatgtcataaactaaacaaccatgggtttatgaggtttcgacaaacaaacacaaagaatgttaattttgacgtttagacaaacactacaaccaatcaataacaataacattgagacagaacagagaggaagagagacaaactcacgtgatattgacaccaccatcgaagttataacgagtgacattcttacgaacccaatctttggctcggtcgtaactagtcataaccttaagctgatcattgggaatagcgaccatcacttcaagacccgatccagcgagtgcacccatggttgtctcgtccgcatcaaaaagcttaactttgttgatgttattgtctttaagcatctgaaccactgtctttggaggtagcttatgtgtagccattgttccccaattcacacccaacccatttaccaaaatacccaaatgaccaattacgattacgaatccgacgacgagagccaacagattcgacatcgattttcacctgagaaagatcgaaaaggtgagattttaacccaaaattgtaaaattaacagtttcataaatctaacatttgggaaatgagaaacttttagaggacccattacctctccttagatatggagactgataaaacgcgtacagagagagaagaagaaacgcgtggagactgtagagaaacctaaaaaggtaaactttttggttttggggaaactaaaagagagataaaagttggagatattttcggtgagtttcgttgctaaatgaatgatagtactatttaataatgatgtatcatgacgttgtgggtggatttataacggctctatttctccggagagaacatgtcatgggccaatgctcgttcagtctttgtcctcgtaacaactaataaacaaattagttcatgggacatatggttaccgacataaaaatttcaaaattttggtgcatctgtgatctaattccttgtgatgatttgatcccaacccaaaaccgaatcgaaacaaaattaatcagatcatattttggtttaatcggttaagtgtttctatattagaaaaacgaatttcgatagaaccttagacttacattttattaagagttttaaaccctttgaatcgagattacctttatatacaaaaactgaacctgaactaaactcatatgagatggtctgaactacattttgtttcactttcggtttaggggagtacattcttacattgtgaataatccattacgaccactttaaccgataaattatgaaataaaaatggtaagtgagttaacgaatgataaatttattagtaaaaacaaatagaaactaattacatacataatataaggtctattttgtcatgtatatatacaattgtcttctatttcaaaaaaaataatttaaaaaaaaaaaaaaaaaaaattgtcttctatttcaatttcaacgatgatagtaaaatatgataaagcaatgcatccgaggctccggaccatccgttttctataagtagtaagatgaatttattttctattttaaatattagttattcagaaaatttgaagaccaatcaaaaacaaaagattaaacaaaatcatggttacttattatgtggtgataacaataacataaggacgacccaagacaacttcttatgattataaaaaaaaagaaaaaaaaaatcttatgatcagaaaatgataatttgataagctcgtttataataaagcttgacaattctgattaactttcgttggtggctaagtccactacaaacttcatttgtcttatcttttcttctcctttctctccaccatttgtcttatcttttcctctccttactctccatcaatggcttctcttatctctttttctttgctcccaaaaccaaaagccgtaagaagttcaatttcagctcctcagacacagacaataaatactgaaaagcttgaagataaattcggacgaaaaggcataaaattctcggaatcaaacaacattcctatggtagagcttaaggtcagaaatggaagttcattaaaactgagtctatcagatgctcatgtactttcatataagccaaaggtatactggaaagacgagggattcgaggaagtcctttacacagttgatggtgatgagagcagaggtggggttggtgttgttatcgtaaacggggaagaacctaaaggagggtcttcagtaatctcaggatgtgattggagtgtcaaggatactgattcagacgccattgatgctcttcaggtgattgattcaatacctcaatatatatatcaaattttgtccacacaatgatgaaatctttgggaacgttctcagatcgaacttagctgtacggccggggttctcgacataacgtatatcgtctctctctacccagtaagcatggctacagctctggtggtgaagaacaatggtcgcaaaccagttacccttaaaccggggattatgagttacttgaggttcaagaaacggagtggggcaggaattcaaggactaaagggatgctcttattgtcccaacccgcctttgtcatcgccttttgagctcttgtctccttctgaggcaatgaaggcggaatcttcggggtggttcgggtcggaagaaggggaaaagccggggatttgggcagtagaagattctgttattacacttcttgagaaaaagatgagtagaatatatggtgctcctccggctgagagattaaaggcagtctataacactccaccttccaaatttgaaactatagatcaggtaccattcgtttatattcagtatgaccattcgtttctgcatttggatgcaacatcaatttggtatatatgttccaagttgcatctcgaatgaaaaccaattacataaaaaaaaagaaaaaaaaaaaagttttggatgcaaaaaacaaaataaaaataccaaaaggaatttccaactcatttagtactaaaatatatattaataaatcatacattttgtaaattaataatttccaaaaatttatgaatcgcatcttgacacaaaatatcagaatttcggtttgacgctagcggaattatgtattctcaccaaaattggtccaaaaattgtaaaactctatattggtgataaaactgtattttaacgctataatttaagcgtaacttaaatcatcaatatcataatttcataagtttttttttcagattttctagcaaactcagaaagaaaaagaagcaaaaaacaactgtttatccaaatacaacatcaagatgcaaaaaaaaaaaactattttggtagatgttgaatcttgatatagagtctcaatgtgtggatgtaacatgttacttttaagttttgttttatctacgatgtcttacacaaaactttcaatccaaaaactatttcaattaacttctatatcttatatataattttctctctctgtttattgcttaaggaagattttctaatgctaactatgaactcaatagaatctgatgagtttggaatttgaatttttcaggggagaggattgtttttcaggatgataaggattgggttcgaagagatgtatgtgggatccccaggatcgatgtgggacaagtatgggaagcaacattacttcgtgtgcacaggtccaacgtcaatgctcgttcctgtcgatgtagcctccggagagacatggagaggagcaatggtaatcgagcatgataatttgtaaatttcatttactatagttctgtcttcttcattttttccctctctatttttgttgccattttttcttctatatattcaaaacatgttaatgactatactaaatcaatatacaataatgaacttagtaaatcaaagttgatgtaaaacaaaattgtctcagaaaatatatgagttgcggatttttattttattgatttgtaacgcaacttttaattaagtaagtacaaaaagatttgtgatattgcacatactaaataaacttataagacattgatatgtcacagtatttacctttctcactctaattttaatgttttctgtgttttatcgaaatttttatttttaagtagtataacggttctagaaaatgagttttttgaggaaaactgaaaaacatattacagcaaaataatattgttgattgaaagtcccttctagaatagatcgacaacccctttaaaggcaatatgaggcaacactgccgttgaaaaaattgatcgacaaccttatatgcaatattcgacacctttgtataatattcagtgtaatttggtatgaacagttcgtatccaaccgcatattattatttatataaataatattctccaattttgatttatacaagctaatctaacaaagttgtcgggaaaataaattagttagaatcgtaattagcaacaaaatacacaaataatgtcaaataaaattctaaataaaacaaacatctaggtgggagctactcagatttgtatgtagtatataagatcaacttttagtggtgaataaatgggtgatgataaaaagagaggacgagaagacaaatgataaaattgaacggtaatttatggcaaatgggaaaaaggataaagtacatacgaggctccggaccatccgttttctaaagtagtaatatactaatataaatatatttatattttcatatttaaaatattagttattcagaaaatttgacgaccaatcaacagaaaagaatcattgaaccaatggataccatggaactagctagaagcctagaaccataggttatgatatcaaatcccgaatcatggttacgtattatgtggtttgaacaacaacaaaaaaaaaggttacatagttttgtggtgataacataaccgataagtacccaagacaactttcttatgatcagtatgtgataatttgataagctcgtccacaaaaaaaaaactcgtttataataaaactcgacaattctgattaatttccgttggtgattattgattaacattctaacgttcattttatcaaaacaaaacatgctatcgtacaagatttttttttcctctcttttcttaacatttaaaatgtctcaagaccgctcaaattccaatgtttaattttgataccaaacgttcactttaattaaaaagacatactgatcatgttattgttaacagttccacactatctgtccacaacagagcgataaccaagagaaaaaaaaagaagaagaagaagaccaataatacacaaagatgcgtccaacatgtttggtgcccgaactcttgtcttcaccacattaaaactgactcgtttgggaccactcaattctccaatcaaagtatcaaacagtcaaggtcggtgtaggagtcgagctccggcttgtaggctccactcttccagcgaaatgaccccatggtttagtcgacacgtcgtcttcgtcattgtatgcgtaagcaaatcctccatgacgtgtcatgtccattcctgccatctcatcttctgctgatatcctcaaaagattcatcttatgtaacccataaaacaacggtcccatagttaccgtcacccacccaacgatcacaataatctgaacgatctgcgcggcgagcagttttcctcccccgcccatgaacagtccgtaaggcctatcaccggagtaaatctcgttaacgtattctttccttgcgaacagcccggtaaagattaatccccatgctccacatccaccgtggagctgagcagcctcgagtgggtcatcatatttaagtttcttggcaagcaagttaaatccgattaaaacccatgatgccacaaagccacatactatagcagcccacggctccaccacggcacatccggaggttatagctgcaaagccgcctagaagtccgttgcatacgtcaataacgttccaatgacctgctaaaagccgtttactgaatagagtagtcaacgcagcggtgcagccagaaagcgttgtggtgaccgcggtgcgacctacagcgctccattgaccataatatggccgagacttgtcgtagcctttaagaatggttaaaaaggaaccagggttaaacccataccatccaaaccacaacaagaaggtaccaagcacgacaagggatgcactgtgaccacgtaaagccacggaccggcctgaccggtcaaatctacctattcttggtccttcaactaacgctccacataaaccggcaattccacctaccatgtgaacaactcctgaacctgcgaaatcaatagcacctgagccaaacaagagattgttgtcagaccgggacgcgctagcccatccatcacttgaccagaaccagtgcgagactgtcgggtaaacaaaaccggtcaagaaagtagagtagataaggtaagcaacgaattgcgttcgctcggcgatggaaccgctagtgattccggccgcggctatggcaaaagcccattggtagaggaaaaagctgaagtcggagccggggcgttcagggtaagagcttaaagcgaagaagctatggtggcgaccgatgaatccgttggaaggtgtaccaaaggcgaatgcgaatccgaagaggtagtaagagatggctccagcggcagcatcaaggacattggtaagcatgatgttcatagtgttcttggctcggactgatccagcacaaagcatagcgaaaccgagctgcatggcaaagacaaggtaggcggagaagaggagatacgtgttgtcgacggcataagttgtgtcggagagtttgttggagatgtttgaaatttgggaacataaaaaggttgccgcggcgagggaagatgttgagttagaagaagaggataggagggcagatagatctacggcagagcatgtggtggttgcggtgtccatggtggagagggagggagggagagatagagagagggtacttgattgtggaacgtgtttgcttaagtgagtacttgtggtgagagtgtctttggtgtatttaaagtggaaaaaagcatatttatttcgttacatcacaaaaagttgcggtactacttactcttcttctagttgaggttttaaaagaagttttctgaattttaaaattctaggtctctggtttaagtttttttaaacagtagtaatcaaactaaaataaaattaataaatttgttttggtatagttttgttttagtttctattcagttttgaacatatttaaagttaattttttaaagaagatttttttattttaataagatatttaatcagtttttgtgtgcaattaattttggttatacgaataaaaaaagaaaaaagaaaattcttataatatttcgtttagtgtttgaatcgtttattttagtatgacaaggaatcgggtcagcatttgtttatgagaaacaattaattaaacatcgctacatagaagtacgacattaaagaacaagttcaagcatatgacgatatgattcttttaaatgaatttgtatgtctatttttccaactcaatattttatatgaactagttaatgttcttacaaaggagaaataatttattttttttgacggcacgattcaaaggagaaataatttgatttcttttttggaattaaaataatttgaaaaatgtaatttttcgtttcgtttgtatcgatgaagtcaatagttgatagatcatgaatgatgtatcatttatatgaatgtgatatagggggcaaggacgatcactcaaatagttataaaattatcacgctagattaaatataaaaattattttcaacttgactacaactacttcacaactgaatacgtaattcgacttgaataataggcattatttgatgctgtgtgatttttagcgccatttatttttgtatttttagttaatcaaacaaatatgttgtaatttgaggtaccgatttcacatagaatttatattgcactacgtattagagaataaactgttaaagctacaaactatatatagggttcaattttgtgattacaggaaaaatatatatgcaacaaaggaaagatgaacagattcaatagtaaaatcgtattaggttttcacggaatcacagtgatagtaggaaatcacgcaacaaagaaaaaaacaaaatgaatggacatatgaacagtgaaaatgtttttatattacgttaaatgtttttaaaatgcgatttatgaaaaaatgggtaaaaataaatgcgatttatgaaaaaatgggtaaaattagagtgttatcagcaagatccgatccaaaaccaattgttactatgcaggataatgcgagatgggcattcgagtcaggttctgataaaatccgatcgggtacaggtttttttggatagagaagtttaggatccaatagagtaattctaaaatatcggtttgattttggttcgggtccaatcgggttcgaatatagattttcaggccttttttggaatcgatacccaaattttcgaataaatacccggattttcggattcgggtcgaattcgaattcggttttttggtagagaaatttaagacaaataagataaatcttcgaattcggatctaatttttcgggtcggttccagtttgagtaatcggttccggttttttgccgccactaaatttgctagagtcaaaatatggtaaaaactgccgcaaaagtgaaccgctaaccacgtgattaaatacacttttctggtaaacaatataactttgacggtcattcaaatgctgaaggacgtgttgctcactagcatagtttatgtcattctacacaagaagatctagtcctcgtagcttccaaaaattttcttttctactcctggaagataatcgtttcttttcatccttcaaacttaccaaacgtttatacgattaacatagggttttgtctccagcgattatttgatttatgtgtgcttttgactcttgaaaacttcttcacgttctctggcattacgtatgaagacataataaaaaaaaactctattgcatttctccattactttttttcatctcaacttagatagtttttcaattaaatttatctgattatattggtttatcaacctttttaatcctacgattggtggggattataatatagtaataaacagaaaagataaatccttaacgaagataaacccacagaaggcaatgacagacgaagccacaatgtcgcactaaacgaattttagtaacaaatcatattcataatacaataacgtaattagaagatttagtagtataatctagtctgttatagactgaaagcaaaaactaaagacgcataaaatttaacccatttgagacattaccatttaacaaaatcgaagtacccgtatcaaataaaaaaaatgagatgagtgcttctcaacaaagaacacagaaggatctgataatccaaagtcaggtatatctatatattgtatattgacctctgtgtatctatattctcatgcgaaagaaaaatgatacaatttcatccgcgactcaagggattatgcttaatgagcctctcctacaaaatggattcaacagagatggcgaaaacatgtttcctcctacccacttacattatcatcatcgctttcactgtcatcgctgcaaatgtaacaaattgtacttaactttcagaccaagggaactaaatttacccataacaagaaagatttgatcagtatagggcttcacgcattagctaaggttatagattttattattcgtaagtatatccacagaaggatgaagagaagccaaaactaaagccatcggacttgagcatattttttaccattgttattttctcgagggtctgaaaaaccgcttttcatgtatagattgaaaggtatagcaagcaaaatgattttcgtatgtgaagaagattaagtacctttgttcaggaaacttggataaccgtcgggcatccaatcctgtaatgtatttttgagctgcttgaacattttctgcgcctgagaccaatcaaagaaattagtaatatgtgaccctgttgctataaaaacaactgcaccgaaactttgccaacatattgtgggcataaaaaactgagagaagttcgacagattcaataccttttgttaattggaacacgtgcaaagcacatctttctgcagcaagtctcactggtgtgttcccatccttcaaacattcagctagaggaggtccgataacacttatatttgccatggttgctgatggattatcctgtaaaataacgtcttgcattactactgcacgtatcattgacgaatcaatccacacgaatgactacttctctagcttacacttacttttgcaaaagctttaagtgaagagagtgctcttcttcgaacctcactcgaatcatcatgcaaagctgagacaatcgatgaaaggacatcgataaccacttttgtgttggaaggatccgtcgcaagttgttttagcaaaagccttcccaaggcctttgtcgagctttcacgtaatggaaactattaaaaggaagatgtcagaaaaccattatagagaataagaggtaaacaatatttcttacgaaggtaccttctcatccttcaaagagctcttaagagaatttaacatagaggaaaagagcgatgacgtcataatggtggaaggattgtgtttcagcaaggatgaaatgcagagaactgagccatgcctagcaccccaattttgcgaagcagataaatcattgacctcttgaagcagaacactgagttgtgcagcttccaagtactgcatatataggaaagtaagaagcttaggcttcaccagagcattatagtcatcaatacttacacacaccctaattatacttctaacaaaatacattaaaataaaggtaagctcgagagctgaaccttgcagcataatagcatcacaggagaagtgtcaaaaatagtatcgggtctgtggtgtgaaccacaagactaaaaagaaaagtttcctatgtatgtaagaaccctacctgtgataaaacacccagcatgcttgtggcagatattcgaacttggtcatcctcatggtgcattagatcctttaggagatcaaaaatgcgtactctaacagcaggcccaatgctcttcccagcatgctttattacacctctcattgcagataggatggcctcacgtaccccagaatctgcagcctgatacacaaaacaattttatgaacaattaagaactagatagactgataaaaaaataactgcattagctgctgaaagaaaatgcaacaagtacctggaaacttgtcatcaaatcaccaactaatgggtcaatccttgtgcttaatgcactaagctttcccagggcaaccgcagcactagaacggatggtcctacagttgtaaaggtattaaaccgaagtacacaagaacaagatattgacaaatggagcatatgttagatgttcttacgaaagaactccattttataggaaatgtattccatgtgtcatgtaaattcaacagtacattacttggaaaagaaaaacatgtaagagagctgactataaactttaagatgaaaaatttcacactaatctactccagcaaggcagatgtagccttcttctaattgaagacatataaaactcggtaaaaaggtatcatatcaaaattaacatttgtgaatttcattcatgtatctctttaattgtaatctagtctcttcgattaaatccaaactgtgtagaagtagttctttcctatcactagaaattcataaacttcactttcactcaagttgacacaaggactaaccttgtagagtcttgcagacacttgacaaatgttgtttgcagttgagggaggaatggctttagcgccatcccacccctttgtattaggatgattaatgtagccaagatagcacttttgacttgccatggaaaccggtctccaatgattcgaataagaggcctgaaataataagacaaggtatctcagaacaatatacaatgattcataataaaatttgatggtaattttcagtcaaaaatcttcttaacaccatgcacaatcacttctaagcctaagaaattaaagcttgtttctggacctttgcaactcagaacatcaattcatccagataaaactatactacccaagcaaagtaaaaaaaataatacaaatggatttgtaacagaagaagaagtatcgacaaaaggaatgaagattcacacactacataccctgttataggtatgacgaactccttcaaagcttgctcgctagtaacttcaataagttcaccaagaccaattgcagcttgctctcttagttcagcagatccacttattagaccctgaaatcaaagcaagaaaataatgaagggtcgagctgagaacgaagtacaaaactgcctgattgctcttgtacgtgcaaacaataaaggggaattttttttctcattctttacaatgcaactcgcctttgggagtaaaaaagccaatgtgatattagctcaagccacccagaagctactgctaatacacaatttaaatgatctgatttaaggtggccttaagcgctagaaaagtaaggtataaagaatacctgtagaaatactggaagtaatggcttaagggacttggggaggcatagaccaggaataacaacatatcctccctgcaattcaaataagtatatattttagagatagtagtctacagaaaatatcgattcatccgtattatgaacgctcattaatctcttatatagtgacattctttgaaaatagcaaaaagttcaccttacgcttcctgcgctctttgtccctagctgtagatacagcatcacgtacaagttttatatatgaaggaagtacttcctttggaactgaaccaataaccctagccaaagcttcccaggaaacctgtttaaaagaaaataagttagacataacattgcttcaattcttttctttctggtcaagtagcctaccgcaaccgttgttgaatcagaatcactgagcataacaatcaaggtagatatcatgtttggagcttcatcaattaagtaaagcttgctactcttgaagaagtaaccaatcagatatgcagaacttcttctaattgaagcctgaaaacgaaatacaaacctaaattacttacatgctaaaataaaaatactttatttaaaaaattacaaacaaacctgactatcagacactcctttgagaagttctgataatagagtctcaacgccttcttcatcaatgacaagcaccactctctctgcggcctcttgtgccaattcttggacttcctgcaaaaagaaagagaatcttaaccatagataacaatagctttcatacaaatataagagtgaagaaatcttaattttttttaccttgttttcacctcccattgcagagagcaaagcaggaagtatggtcccaagatgcgtgttaaaaccagcaccagcaacctcagctaaggctcccaaagcatgagcatttaaggcactatacacatcatttaaacgtttaagacagccagaaagtatttcatcatgcttgatgatgcatatctatataacgagaaaaaagaaacacatacgagagaggaagatggacaagcttgggcaagatgtgtggaagaacagctgctgtcctaacactgcaattccaaaagtaaattcagtaaaccagaaaactttgaacggtaaggggaagaagaacctgagaacacagtagtagagaaccttataatttgtttaagtccatccaaggcagtagtagacatttcatcatcttctaaggcttccaaaagagttggaataatctcatccattgcttgcagtccagcactctgcattacaaacgtagatgagcgatacatatagagtgaactagaacaatctgataagcaacaaaagtccgaataggtaccttatacagagtgctgaatgctagtccagcagattcccgaacctcgagagcactatagaagaaagttgtagaagtttagaatgttaatttttaatagcataaagaaacatgcatacagaataaatcaaacctatcacaaagtgctgtcctaattgtgggaataagctgatccatgaaactcagcaactgactccttccagcacttgccatcacttcattcaggccaatgcatacaccctgtcaattatgaaatataatataatgtcaagctgttagatgaataacatgtgcctaataagtctgcatatcagatttaaaacaaacaatcatatgcttaggatcagttgatcgatatgaaaacatttcagtatcacaaatggacataaaacaacgcagcaagacacaaatcatgcagtgatacacagctcatttaagagaaatgaaataaatacatgtcacaattacttgaaaaaagaaacggtgccagctctactaagataaaataacactgaaatatttacttcatggttatcatggtcgcaacaataacttcaaccaaaataactatgctctacggtgtaaagtttttgagaaagagagataaaatgattgattcatcacaaagcttacttgtcttttgtcaacatctgggtctttcagtcctttagataaaattggaatgataagaggaagcaccctttcaccaagcttcctaaccagctctccaagtgatcttcctgctacctacacagtataatagactcatacaactgccggttaaaatgtaaggaatgaaacaaaaaaagggtaggatacaaacctggcgcctctcagaagatggtgatgccaaagaagaaattaaggtactcatcaaaattggcattatttccttcaacgtctttggtgtatttgctacgatggttttccatacatgtagtgccgcctgcacagagcaggtattttaattttgaactcaaacttataagtacattcaagcaaactcatacataaagcattaacaacattacctgacgaacagacaaactaacatcagtccggaccatatataacgctgcaagaacttcattgcgcttgtccattcctaaaatatcaataatggcacgaccctgcgcttcagtacttgcaccttcatcatcacttccaccctccagtagagctttgcccgatgtaccagcaacctagtacaaaagctccaaatatcaactattgacaactttgtgacctttttcctttttcaaaggtgttttggtgatagcttcatttttctgtagtacttaaaataatcgtacaatcttttcttttctatcctgtacatttactaatacacactaaaaaacgaagcattgcaacatttataataggctaggaggatgagaacattggttaccacgtaaatactaggctacaggttttgaaaggtaggataaacaacaagaaaaatacaacacaaaaatgctgttaaccttgaacaatagatccccaagcagttcaacagaactttgacggatacgccaattatcattgaaaataccatcctccacagctggaagaagaagaggcagagacctgcaaaaccgatgatactactattaagtacaggatccaatctcctggtacaagaccttaagtcaaacagaattaatttatttaatgaaccacaaacattaaattgcacctactaacaccatcaaaggaactaatcaaatggcttaaaaatctaatcaatctatggatcatgttaagtcaacattagataagctagttaactatgccaaaaaattcagagaagtatatatagagtaaattcatacgttgttgcatggtgctccaccagtacatggccagcccccagggctgcatcacgaacagattcattctcatcggcaagacctaaaacatcatagagcaccaccaatttagtcaatgagtcaaaaggtagttcagaagttaaaagtctgccgaaaaagataggttcaccatccagaatggccggtaaaacaagctgcaagtacttctggaactgagcacccaaggatcttggcaagaactgcgagtaacaaacaaaaggttttataattttttacaaaactgacatttgaggaacatctaaggagcaactggtttcaccttgaaaagcgtaaggtatccatctcggaccgatgctttttgatgagaacaatgacgaatgaggtcaggaagtatattctcaaagtaatctgtcccaagagctgctataacctgaaacgaaaggagaaaacgttctaacagatgcagctacaatttggggaaacatttgttaagcagactctgagattaatgatttgtaagttgccgtatttccatttgccatacaccatatcagtttcaaatgtacttgattgaaacattaaaagaaggtaccgaatcaagcgagtacaaatacagctacgtttatttaacttaaatgtaaattaagagacttaatcagcttataattgaacagtaaaccctaatactcatgcaatgatgtattggaaactgtgaagataacaagattaagctcatagtgttaaagccaccagataatatagtgtatttccacaacatcaaccaggcgttttgactaaatgaaacaatgccacaaaaaagcacatctttttctacatacctcacttaatccctgagcggctccatatctttcaacattgcttgtatcagattttagagtttcaaacagccacggaacaagatctgggaaattatcctctcccattcctctaataagtgacccaacagcccttgctgcaacagaacgtacttcgggaattggatccacaagaacctgacaactccagtgttcagttaataaacatcttgtgcaagagacaactcattattttggcacgaacagcagattacctttttaacctcaggaaggagcaatcctatgtaaggaatcatatcctttggctctgtcaccaaagaacacatattaccgacaatttgagaagctttcttttttgtttcagaacttctttctctcaatcctctatgtactattggtaccaacagtgcaagcgagggggcatcaacagaattaacgaatgttgtctgtaataagagaagaaagatttagaaaaaaacagaaaagaagataagtataatcgaagacaattaaatacggaagccttacttgaagaagggtgtcaagagcatggcgtgtgtactcattgggatctgttaaggccaatagaagggtggggacaagagaggatatctctgggttctttatgacacttccaacctaaatataatggtgagacggaactctagtcaataatgtccacaaaatatggagtttcttctgttctatcagtctaacctgctgaagtgctaactgcccggctgactggacttttggatgtgtatccgtcaaaacctgtatagttttaactaatgaaatcagataatacaaataatcaagggagggaaaatcattcccaggtttatacttaagaagcaactgaattctacatacatacacacctctgtaagttttggcacaaccctaggaagacattgggacagttgctgaggagcacaaaatgccatagcaccgaggagctgtacactgctttgctttgttctccatgctttatcttcaagtccctatcagaaagaatgaaatcaacaaaaaagtacctgtcatgtaagaccaatgaacaaatgcaactaggtataccaagtttagtatttgaaccttatttctaaggagcagcactcaaatagggtaaaagtagaagggaaaaaggagttataatcaaaatactattattgaagcattagtaaactttcaatctatcctagtcaagcgcaaaacatattaaaattagaaagaagatagcaatatcgcataattaaccgaatcaaaaagatgatcatgagcagggcacatggcaatgcacaaaaccttagttatcattaatcttgaaaatctttagaattctataaattatcaccttgagtagagaaggaaggacaagtttcacaccatatgcagatagttgagacatcatagctcgagcagcacattctgctgcttcgcgaactgctccgacttggtcagagaacgacaccagaagtaagggtaacatctttatcacatacctaaaccaaaagatagaaataagattattaccaagttgcattagcttttggcatacccatcattaaaaaattctcttacggttcaaataattttccaagcttctcgcagaggcattcaaatgcgagtaatgctccttcacgacgtttagcagaatttctgcagccaaaacacaaacaacacagcagaagtgaaccaaggttcatcatagtgagcttctacattctacatattatatctgtgatacaaaatgatataacaccaatgacataagaaaaaaacagcagttaattaacccactactatggaatattgacttgcaaagcagccttttcatgtgaatatacatttgactgtgtctacaatgtattactgaagacataaccagtcgagctactccatcaaaatgtactatttgactctaattgactctatgtttggcgccacagtactataatgaacagctacaaaaccttagaaaatataaataaaaacatccaaacacaaacttgaatggcatcacaagccaacatgaactccaaaagcgtgcaatatacaattaattttaaatatcatattaccatataaataggaagttaaaaagatgcacaaggaatacctgtcaataagtgcttcttgcaaagtgactataagaccatatttcttcaagctagaaattccaaagcccataactactcccgcaagaccaaaagctgctcctctacgctcaccatatttatcactcttcattagcttatccaagagcctcaaaaaaagggcaggggcctcctcctaacaaatcatcagagatagatcttaagcttcaccaaaccgactgatatactccttaggccaaagccactaggaaccaaaggtatagtaaaatttgtttcggtaaggtcataaaatatgtaattaacatacttgctttgataacacaagtggagaaaggcatgtcgagacagcacgttgcacagattctgatggtgtattcaacacctccaacagcttttccacaacattatgtactttaggatcatcctgccatcataagtgaatatataagatagagaaggaaatcatgtgcaaagtgtcgagatttaagcaaaaggtagagttatcactcttgctaagtgctttgctagtgctccagtgaatataacaacaccctcacgaaccaagtcatattcctcttcatcagatgcctacatgataagagatttgatgaagctccgaaggtatttgttgtaatcatgaaacaaacaatgtatccagcaggttttcagttgcttgtagaacaaacctctttatttaaataattctcaaagatggggaacagcaatgaaacgttttctttgccatgcttatcaataatcatgataccagcattgatcatctttccacgaacatctgtgttgggatcagcctgcacatgagaaaaacactcagtttcatatattttctgaaagtcaaaagattcaagctatagtttctgaaaacaacataaaatgtgggtttctaggtgataaattgtgaaacccaaatcctttgcaacatggctcagagggggagggttcttttatttgacaagcattcatctgacaagatgagaagaaataccagtgcgcgggatatcaaaaaggtcataacagcaggaaggtcctttgttgtcaatacgtcagcagcagattgcagtgctaaggcaattccttgccttcctatccaaccagcatcaaagacatcctcaccagacgtagcatcacggatgtacagagaaaataaagttgaaagggataactgcaaaaccaattaatgtttaaaacccatacttatgccacaaaaagtagtaattcaaaaaatgcaaagacctggattgatgacgggctttcatgaagagcatcagccagtgcttctgctgcagctaaacggacgttgagatttatatgagaaagtgctttaaagattcctgaataatcagtccccaaatcatgaccatagcgggcccataaatcatctgctgattcagccactgactgcaagcataaagatcacagagcatcagattgtgcaacagcgaaaaacataggaggacaataactttgttagcctcagtcaagtacatcaatttatcaatttattatagttgacgcagcaaaaaattagaaaacctgtattatgtacaatacaaaaagataacataactagatatcacatcaaattcaggaggttaaccttttcagggtcatgtagagctatccaaatgtttgttgctattttaacattctgaggaagggagcatttggaaacagctggaatacacttcacagcgtttaagcaggcgagtctgacatgaacatcttttgaatagactccatagagcgcctgtaaacaaaacaaaatatgaaatacaactctctcgaaccggaaattttgctcacaatacatagttacaagaaatacatttgcgacatcatctgcttgcaatccaagacacaattcattcagtgcaggtccaactgatgcttgatacgcgggaacaacacctagcacatgatatagaacctgaaacaaatttagtttagatgttatatttgagaaagggaagctggctatattaacaatatcactcgacataaataaaaaatggaaagaaatgtgcacaatgtaattgccaccaaaattcaacaaatgtatagtataaaaacagacagggttcaagtcaccaaactgatatcatccggagtcttggaagtggcagcatcggatctagatgcatgtataaaatctgcagcacatcatcatggagttttgtccgctttgatgacagtaaaattcgctccagtatctggcaagacaaatatagttcgttgagtaaaaggaggtataagttagaatactgtcaacaggaatggtaagaaacacaccgggaaaatgaacgtgaatgtatctacaggaagtggtcctgatttacaagatatcgataacccatttacaatcctctcaaaaagaccctcatatgttttcccagccttgtcaactgatggacgaaaatcaaatgaagtatcaacttcatcaatcgcgatcaaacgcagagcagttgaaatttctagagcccagttacacagtggctgaactgtacaacgtgcaagcttcaccaagttttcaaaggctgcagcacttacaataggtgatcgcagcaatggatccaaaaaagtagcctgataaagtgataaggtgagtgtcataggttaatcttagaattacaggagcctgatatgtcaaaggaataatattcatgtatataacaatgagtaacagtgccagtggcagaggaatgaaaataattatttctgaaatcgattcattgactatatagcatatggaaaagtaacaaagcttttacataccaaaaaaggtaactggctgtgacaaaacacaggattagcaagacccatctccccaagggcatgaagcaccaacgaaagacttttttgtatcctgtgaacattttcccgtgttgaggcctcctctttgagcatcagttcccgtgcctcttcctttgccgtttttcctttgtctgcaattaataattcgctgaataatatatatatgctgggggcataacgttaaaacttaaaactatagagtgcttcgttagatatgtaccagctttctttgtcaactttgcagtgtcccttctccctgagtttgcagtttctctactagccaatcctttctttagagaatgattagaactctacaacaagcaataagaagaagatgttattagattcaatatgctaaaagtggaatcatgtttcaagtttataacataataaatagaataaacccatgtcagtaccggctcctgctttgtatacttggcaccaattgtctgagcaacatagacaccttgctcacttaaaagcatcccctcaggtgtatgaaagatctgaataagaaatatacaaaaatattaatattcactactcaaaacttgcagctgaaaagtaataacaacccattgcactctgtatgaaatgtcagagtaaaatctagaactcagcaagtgtctacagagagaggagggaaatgctaacaccataatctactaaaaagaatacatatggtaaaagtcaggagatttaccttaatgtcagtctctgagagcatatcatgagacagtcgatctggaaggtcttgtagatgctagaaaaattaaacataagacatcaggaaacaagttaaaccggacaatatctttgattagtaaaataatttccttaaaatacatataccatcttgaacactgtgaatgtatcctctggtgccagagacatcatggtggacaaggaatatacggccgcttgctgctccggagttttagcactcgttaaacccattggtccaagtagactctgaaacaatcatttatatcaatagttgattagtaatgccaagaaaccacaagtttcggcacatagaagtcattgacagtcatgagattaccttgcaaacactttccccattggtagacaaaaaagtagcaacatcaaaaccacaagttttgagacacttttgcaatctctgtgtatatcaggtggtgtaaatcactttttaaaagtgcaaagaaaagagatatgagtaagtagaattaaccatgtcgaatgactaatgtcaagattaccttccaaacagcatctctttttccagtaccaactatgctgggatgatgcgagcaaaatatggcacgaacaatccatgagcttggaggtccagcaactgctgccgatgaaatgacaatcaaagccttcactaacacctctacagaggggacgaaaggagcttgatgatccgcgggattatctgcgtcactacagaggtgccaagttagttcctaaatgaataagtcggtgttggcatttaggtccaaacctttcaaaatgtcaaatgaatcaaactgttacaaaaagtcaagaaatattaggagataacatcagagctaactaaacactaaacaggcagcagtatacttagtggcttggtggtatgaaataagaatacaaaaagagcttatcatttgtacctggttctagaagaaacgatttggtccccagttatggaaagaaaatccgagaactcgtctaaaagagtagtggctagctgtgaagtcgcgaggaagatcttcgtaacagaattgtaagctgttttacgaacattccagcttggatggcaaagcagaaagagaagcaactgcatggaaaataaatgaaacataagtccagaacagggagaaacggttcagaaaacatgaactcgcttaggctacctgtgatagtgatttcaatgaaaatgcttccaaaaccctgaaaccaggcaggagagatagttaaaacctctacaaacagtcaaacaccgaatctcacacattaggcaggaggtttacctggaggagtgttccacaaggagcacctcaagaaggtctacacatactacacaatcatcacttgaaagttttgaggcctttcagttgagacatgcaaagataagaaagaaaacgaagaaaaatgccgcaaaacaaaaagtaagtaccctgccatgacaagagcagaccacagaataagtaccagaagaaaactttagaaaatattaccaaagtaatttgcacaagtgaaggctcattttgagatatcaaagtccataatttctccttcaccatagtatcctctggatttcaaaaagaagaaaaatacgaataaggataaagcaatgaaggaccttcagattatactgaataagaggaatgtgaaacataagctgctggtttgaacctgctttgatgtcacaggcagcaattttggaaacgatcagtagcgcatatatcccatccagacgttgtactgcctttgtaaatcccgtctttacaagttgaattaaaggggatagcaagtctgatatctgtggtatatattcagtagcttatttagctaatgagagggttaatataatagacgccagaaaagatgtttgcaaggagacctgtgatatggtatcgggatttctgcatatgattcgtacacagcggagatgccccctccttagagcttctttctccttaaggccggcagcaatgaaagatactaagtttggttggatggcaacagaagatcgtgatgcccatgaagctacagcagacaaaattgaaagttttacgtcttcatttcctataagataaaacagtaatcagttagcagacgacgataaggtaaagagttgaaagataaatgccaaggatgataactgaaacagggaacatataaccaaatgtggaaaaatatggaaatgaggacattttccaacttctatttctaacgtttggttcacacaacggaatatgaacaacagttaatattttaccttcatccttgtagcaggctatgagaaagctgcatatcgtcctcgacaaactaccaatatactttccttcaggagcacttgccagttcttgcactgcattcagcattccaattctttgatggggagattgaagtcttccttcagaaccttaagacaaaagctcgcagttcattatataatatcaattaggaaaaaattcatctaccaccaagcttatcttctgtctataaacagagacaaatcagactcacagatatatctaaatgaggaagaagattcattgaacaacatgtaaaggtgatgttaataataaaattgatcacaaaggcataaagaccaacctccaattatggctttaactgacgcaaacattgcttctatagtatcaggattacttgatttttcacttaagcacataaccattgataaagctcctagacgcctgtcttcatccgtatgccgagcctgtggtagtataactggtagcagttccagggcatacttacttagatcaatgtttacatttgctaatagaaatccaactgattccaggacaatttctggattacgcttcaacattttaacagctgcaggaaggatgacagtttggaattcctcatgtgacaagcgttgaagaagaggtttgaaacaattactaagatttggtttctgcttttctctagaattcaggacatctttaacatagatatcaacaaatatggcctgcgaatgagaaacaaacagattgatgatttaaaaaaacaaaaattgagaggcaaacaaaacatttgcaaatctagtttgtttaagaagcagagcaaaataggaaaagtgaatttaattatacctttgactgttcaaatagagcaggagacgaacaagagaactcaagcagtagtcctaataactcagggctatccttgtacggaatccgtgaacctttaacttcatccatatataaactgtagatagcttgtgactacaaaaacaaaaaccgaattctttaatcaatacagttcatacattagattatttcatacaaatgtacagtgtcaagccagacctgagagaacaaatggaacataaatcttttacaagccctccgcatacggaaagagctctccataatgatacgaagtaatgaagcctgcgttgatgcaactctaacaaatgcattcttcgaaacagtagcgaattgacttttttccagaagaagacatgaccaaattagtagtctgtaacagactgtatcaaaacaaaatttcaactgcttttccataacttgaacaagcatggccgcaaaagttttcatgaaggtaacatttcccagtccctttacaatcaaatcatctacagctttccgtgaggcacggtcatcatatatagccaatgtttggaatatcatgtcaactataacaggcgcaatatcagacgtcatatctgcaaataaatcattcagagcaccagttcaatgtacaatctcatatctgcaaatacttctaaggacaaatccagttcaatgtgaatgttttgaacattaaacttcaaatgactatggtttaatacgagtttagtcttagagtataatcgcaacagtggaattattcgaatcgataatgaatggttaccggaattctggagaatctcggggatatcatggcggaagatccggagtctgattaaagtggagcttgtagagacagagccagagatggagagaagagactccaacggagaagccatttctttccacggagattgaccggggccaggttggtaggtcagaacaatcgtaaaagggtaaaacggtgaagcttcttcttcttcttcgtctctgtggctactagggtttaggctaagccagtgggttagtttgcagaagatgaagagtgaaagaaactgaaaatgaatctgaaagtttgtttttgggcttcgatttaagtttggtttgttcattcgggcttttaaagtccatggataatggattcacttttaatgttggaatttgtgtgtgttttttggtgggaagaatttgtgtgttaaaaaaactagatctaagacaaaatataattaggggttttctcctgtcttctctctccccaaacctttcagagaggagacaccatcgttcatcctttttgattccggtttgtccggatttgtacatattctcgtctctgtgcgagataaataaagttccgactttagatcggatttccttaccggcaaagtctggtttagatctcttttacaactgcgatgtcgaagccctctgttttacttccaaatctcgtctgatctctctaatcttttgtggaattatatcttcgtcacttatttttgctcatgtcataggagcaaagaacagattacatcaattctcgatgtagtcagtggtggagcctccctggagatggtgatgttcagcgaatttcgaaacagtttggaattgggatccacagaaggaaagaggacgttcaccgcttcagagctgatcggtggtggctcatcggagtttttagcggtttccggcgaactaacggcggagcttgcatctgacgcgtggcaatgtgaagaccacgtatcatatacgtgtccaaccctaaatcaactatactttaattgtattttatttctctgtttgatttagttttgggcctggcctattaatttccatatgtaatcctctttggaccttctgtaatctgcccaatttgggctttatcaatcaaaatggccgacaaaaaataaataaaaaattgtgtgttaaaaatgataaattctaaacaaaaattagacaacaacactcacttaaatcacatcaaacaacatataaacggttataaatatgtatattattgagttaaaagttatagatttatgtctgtatagttagatattagaaaatacactaaaaatacactttcttaagatcacttaaaacggcttaaatccatttaataacacatgcatattaattttttacaaaaaaaaaacacaaaataatttttaaaccaatcatgcatacgtgtttgcggtccactatttttttctaagtaaatcccatcaatttttgcaatccatgttcgtttttgacgacatcgccgcttagaagctcctctatatgctttccataagatatgatgatattgaccttgtcttaaaagacacttccatattgttcttttgcttacatgctcgccgaaactaaattcatacttaccattgaataagacatcgtggacggatatagtgttgtctttagatgtgcaattaactttgagaatactattgggagcaagttcatttcgaaattctaatgtgttatccttgcaaccccatggtactactgtccaactttcatttaaaccaaaatatatggaaatgactattagaaaaacaatgagatggttcatttctcggattcataagttcttttgtagtaatatgaatctaagacatcaaagtgtagtatatggagacattatgaaggcattagctaaatttaaacacaaacatgaaccaataaacctttggctagagaaacatttatcatcgaaaaacaaggtggaccaataagttcaaaataaaataattaacttctaattctcaccactaaattaaacaaaccaaaaaagtcaaatatcttactaaattcttggaaatgttttattttgataatactagatgtcagttctcggtttgatcggtttaaatagggacataactaaatgtttagtgtaaattatggtttggtttggttcggtttgagttcagttaattcggttcagttcagtttggctaggtttggttcagtttggctaggttcggtcaaaatgcacatccctaatgaaaacatagagacgataagagtcaaaagtggtaaaaactgtgacatatctaaaccgctatgtcatagtctagacaattattgcagtcgctcgtagcacggttctcaattaagattttagcttgtacaacaggcttggttatgatttatgaagttaccttggtggtcgaccatgtgggtgtgtgctgaggtcaaccacagatgaggttagatgagggcgacccaaaatcaatcttttaggccaacttcttcctttgcacaagtttgccgccaaattgacatgtcttttatacttaagagatttgacattcaattatcaatgtttcaaaaaaaaaagatcattcaatttggtacttcaacaaatgtcaaatctcttaagtacatgtccaatgcgctgttttgcttcttctttttttgcattttccacgttctcgacatgtaaagacgtaagacacacgacaatactagaagtgaaactatatctttaggtcataaaaccgcataaaacgattaaattattataaaaaatgtatggcaattatgtgaatttcaagcatagaagttttcttcctttattgtcttttcatgattgaaactcacaatcgttatagtatacgacacaactcattattatttttaacaagggtttagaacaacataaattggttttaagatacttaattgtcatattaactaagaataatttgtgttctatttccatttagttatcataagtgaagatcagtgtttgaagggcagtgagtgaaattaaagaaactaaaaatagccatttgtttcttaatgtccacctcatccttgatatatatctcaatacgttttataatttgcttgtgtggttgggagagagagaaatgagaacgtaaaagaaggaaaacacgaaaacaacacaaaaggatttggttggtttgcttttaaaatgctaaatgacagatacatacgggtaagaaggcgtgactccctctcctcccctcccactttttcatcattggccatttataaatttaattctcaattcactccaaatctcatcatctcacgtttctttatcgatggagggttcgtctacaagccacaaacgcaagaaaaatgacgagcatactaagaagagcaagaaaagacaacatgtgagagccaacaatgtagaaaacaagatggaagagaagagaagtgggagtaatgaagagagtttgggagtttttgagttcccgtggatgaaggagagtatgatctcaacctcacttgattggagtctaccggaatctatgtttccggtcttagatgatggtaatgagatgtttgaagagattagtgatgtgagatggccagtgaaaagggttagtaattataggttggagtttgaggcttttgaatgcatttggacttctattttggattagattgaaatatttgttagccatgtacttcaaattgcattgagagtctaggaccaaacatttttcatttttgtttttgtgttgataataatgtgtttgttgagatgtaaaagagagtagaaggaacggagtagtgtttggttatttagatacgacggaaaagtaagggatagaggagcaacatttctttctgcaaagaaaataaaatgaattttgcattagtatacatgtcgacgttaacatttcctttacgattcaacttcgtcactcgccaagctttgtggcctccctccaggacatgacaaaactaagcaaaaacgtttcactgatggcatgcatgaagattccatgtttgatcatcgacacacaaccactgtttggaatcatatattttctgacctcaacttcaacacaagacccagtattaacaaagttcatgtaactgtttgataagaaaaattgatgttatcttatccataactggaacaatgtgctgtgaaaagttgaaaatcctgaatgttttgaccaattcaaggctaaaaacaaagattgttaacaaagtttggataaaagactgagccaaaaattaactcaagataatttaaaagctcatgccaaaattttggaaacaaataagtataaatcaacgatataacttaactaaattttggaagatttcacatttcacaagtttttcttttcttaacatgttattttctatatgaacatctaatttataaataaaacatattgaaggttgtaattttagatttaggatgataaattagttcacataaataaaagagaaatacatattacgggaaaaatattatgtttcgtaatatacaaatattgaaagaacaaaatcaaaatcaaaactaaaatttatttaaatctatttcaaaaggaatatgatcctaaattctattaaagttacgaccaaaaaaatataatctattaaagttattactttttaacttttacctaccatttgacaaattcgttcttatttagttatagaaaataatagttaatcgttaaattatattttggtgtcataaaaataataatatatatttttgttgttgtgcaaagcagcaaaggtgtcataataaaatccaactcacattaaaaccagcggacaaggagttaaattcaccgtactacacggtctgagctgattgcgtgttctcttaaaactccagttcaccgacgaacaacgaagtatcgtggaatccatttcatgggccgaagatttctcacttctcttcagtgtataacttctctagttctctgtgttcttgtatatatgcacaccccatgttcgatgaaattacgaaaccatgtaatcgttatcaaatcctcatctattttcttaaatgttgcaggaatctgggaaagtaatcgtttttggcttaattctgatttgggttcttacttatatagtcaacatgcttctggtttctcctgcttgtagaggtgtttatcttcagaccatagatccaaagccaattgatttctcagctagagcctcttatgcactttgctttcaggtaaccatttcatctcctgtaactttgatcttgttgattcctatcttgaagttgtaaagtttggatttttcttcttttatgtagattcctacttcaatccctaaaagagagtgtttgatgaggttaggaacggtcttttgttttaatcagaagcatagagagcagacaagttttaagaaacggtatgtatctacgcagaatgtggatcttcctcctattttaccaaagaacaagaagaaaccttatcctattccttttaagcaaatccaagaagaggctaggaaagataagaaacttgctcagatgggtatagagaaacagttggatcctcctaaaaatggattgctagttcccaatcttgttcctgtggctgatcaagtgatagataactggaagttgttgatcaagggtttagcacagcttcttcatgttgttcccgtctttgcttgtagtgaatgtggagcggttcatgtggctaatgttggtcataacattagggattgtaatggtccaacgaattcacagcgacgtggttctcattcttgggttaagggtaccattaacgatgttcttattcctgttgagtcgtaccacatgtatgaccctttcgggcggcggattaagcatgaaacacggtttgagtatgaaagaatcccagcacttgttgagctatgtattcaagctggagttgagatccctgagtatccttgtcgcagaaggacacagccaatcagaatgatggggaagagagtgatcgatcgaggtggatatcataaagagcctgaaaagcctcagacatcatcatcattatcatctccattagccgagcttgatactcttggtgtttttgaaaggtatccacctcccactccagaggatatacctaagatagcacaggaaacaatggatgcttatgagaaagtgagattgggggtgacgaaattaatgaggaaattcacagtgaaagcatgcggatattgttctgaagtgcatgtaggaccatggggacatagtgtaaagctgtgcggagagttcaagcaccaatggagagatgggaagcacggatggcaagatgctcttgtggacgaagtctttcctccaaactatgtatggcatgtgagagaccttaagggaaatccgcttaccggaaacctcagaaggttttatggtaaagcccctgctttggttgagatttgtatgcacagtggagctcgggttcctcaacgctataaggccatgatgaggcttgacatcattgttcctgattcacaggaagccgacatggtcgcataagtccttggaaatgttcaaagtagaactcctttgttaggataaagaagctgaaaataaaatgagctggctagctaggatctttcctcgtaggagacattagaaatcttgtcatatagtgtattttgcaatttgggtgtaaaatattttagaaatcttgtcatatagaaatattttagatatttgtttgattctctatcattgacaactaacccggtcactggtaattataatggagacgacttcagtggtatttgtttaaattatttctttgtcttgaaagattctaaagatgttttgatccaacgagtttttgctgaaaaactgaatgatggaaacggatttctcgttggtgcgtaaggaggaggaagaagaagaagataacaggaatgggatgagttatttgtcaatggagatgatgaagaaggtgagctccatggcggctccaatggtggcagtttcggtttctcaattcctccttcaagtcatctccatggttatggctggtcatttggacgagctctcgctctcagctgtcgcaattgccacttccctcaccaatgtcactggtttcagcctcatcgttgggtttgcaggtgcgttagacactctttgcggtcaagcttttggagcagaacaatttggaaaaattggtgcatacacttacagctcaatgctctgtcttctcgttttctgtttttcaatctctatcgtatggtttttcatggacaagctcttggagattttccatcaagatcctctcatctctcaattagcttgcagatactcaatctggctcataccggctttattcggattcactcttcttcaacctatgactcggtatttccagtcacaaggaataactcttcctctcttcgtgagctctcttggagctctttgttttcacattcctttctgttggcttcttgtctataaactgaaatttggaatagttggcgccgctttgtccatcggtttttcatattggctcaacgtatttttgctttggattttcatgagatactctgctttgcatcgtgaaatgaagaatcttggtttgcaagaactcatctcgagcatgaagcagttcatcgccctcgcgatcccctctgcaatgatgatatggtaatttacatatctacatccaaaaaaaacaaatctcagcaagatttaaaagcttcttggtctgactctgatctacaatgaatccataattttttttgttctttgttctttctttttttgtgtgtaagtaaagcctggaatggtggtcgtttgagattctactactaatgtctggactcttaccaaactcaaagctcgaaacatcggtgatatccatttggtacatacatatcattttgtaaaataattcaaacagtcaaaaagcttgtgatattcctaacttctattcatggaacagcctcacaacatcggctgtgcatttcgttctggtgaatgcgataggagcatccgcaaggttttatagatttcaattgttcacaagaatctgattttttcatgtaacatagtatctcttaacctattttatcctgtttaacactatagcacacatgtctcaaacgagctaggagctggaaatcatagggcagctcgagccgcggttaattctgccattttccttggtggtgttggtgcattaataacaaccatcacactttacagttaccgaaaaagttggggttatgtattcagcaacgagagagaagtggttcgctacgcaacccaaatcacacccattctctgcctatccattttcgttaacagctttctcgccgtgctctcaggtaagacgattatactttgtttcttgaaccccaagaaagtaggttcaaatcaagaattctttcatatttcaggggttgccagaggatcagggtggcaacgtataggaggttatgcaagcttaggatcatattatcttgtcggaatcccgttaggatggttcttgtgttttgtcatgaaattgagagggaaaggactttggattggtatactcatagcctccactatccaactcattgtttttgctcttgtcaccttcttcaccaattgggaacaagaggtatataaattactaatcattttacttctagttacggttacagttttgaatctggttttggtttgtgtttcaggcaacgaaagctagagacagagtattcgagatgacacctcaagtcaaaggcaaccaaaaaacacaaattatagtagaagaggatacacaagttttacttaatcatattgcagaaactgtgtaaaagtgtaaaaccacttaatgcaactctattggtctccttcgttttagcatctaattactactcttggatgctttacatttgcatgatgtgtgattttaaaattctatgatcgatgcgtcttgagaatatagattcttatttcaagtttgtcagggcacacactacccatttcactttagaagaatttggaatccaattttatgcacataaactaacagaggtcacctaaaaccatttgcctaaagatagatgcgaagttatgaattccttaaatacagaaaatttgaaagtttggatgtatttgtttcattaaacaccatacgaaaactatcataagttgaaacgatacataaaagatcaacatggtcactcgtaagaaattagacttacaaattgagtagtctaatctttttttttttttagactatcatatttttactatttttattagaatttgttttatttctcacgaataactctttctctatataaattctaaaagtattaaatcttcaacatctatgcatgatatatgtgtttgtaaacgttaaataaaaatgataatgcaaacatagtcgctacacgctaacacaaacactaaaaatttaagaccagttttattataggtatgtagcatgtacttcaggagaaaaatacactattcttaagaaataaattgggtagtataataagaataagaaggtttagtgagctacatttgagagcaatccgttttcttaaacgacacagttccagaaacagtgtcgtatccaacaaggaagttcatttgcgccaagtttccaaaaatggttagttgttcatttgcagcaaatgcaaagcaagacacatcttcagacactgccacaaacgtattcaaattgccgagtttcacatcacctcctttgaaatgaacagttatgtctggaactttaaaactagagctgtctctataacaaagactcagaataccatcgggatcttgcactcgctctgctttgattgtagaagcaacgacagattcaagctcatagtaaaaattggatggcaatagagttagagtggtaccggagtcgataacaatgtttccttctccggtcccaaagattgtgcttgtgaattgaattttcttgcttcccacgctaatggcttctaggtttaggaaatagtatgtggcgggatctttcttgaccatggaggtggacacaactccatcgcccgagacaatgccgtttgttccaaagttgatcttgctcgttaggccggtttcagaggtgaaaggtactaaacaataggagaatttaccgttgatggatttcctgagttgtgagaccaacgatgtagatcctcctccgagtccgatgatccctgagccagccgggtcaaaggttccagtgttttcgtgtccgcaaccaatgatcatgtttctgagtgacacagggcggcgaccgctagatcccatcgtcacggtgtcaacggcaacgtcacctttggtgtatgaattgtcaccgtatgtaatcgtataagaacaagtgttttcatctgtggaacaagaagcatcttctagggcacgacattggcttgaggagcaagaaacctttctatatgtggaagattctttaggatcaaagagtggagatgtctgctggtaacaatcttcgcaaggattgcattgagtccaaatcaagtcgctgccagtatccgcaatcgctagtatcgggaccgggggcgtcccgatggatatgttcatgagatactcaccgcggttggaagtgataaaagattgtggtgagtttggtgaagcatcatcattgctgaattggagtgtactgcgagcggagcggcggatagcatttctcatacgttgtgaagaggtttcggcggaattgtagaacggtgatttgggagaatcgcggtggatcagatcaatggtgaagccatctttcggataggcgttcacgtttgagagtaacaaaagggacaagagagttgcaaaaattagagaagccattttgagaatcctttgagagacgtaactatagactatagctatttgaataaccatattgttgactacatgaatgagttgacttatttgtaatgttttatgatttttggtaattattaaatgcaaaacgtagttatggtaataaatgcaacaaattaaggattgtaatgttctttgaatattgaatattttatttcaataagagaatctatgaatataaaaaatttaagaatggtctttgaatattgaagatcttatttcatttagagaacctatgaatataaaaaggacaactttttgggtttaggctataatacttgaaaatgtatatattatgaaaaccattaaaaagaaacttttaaattgatgaaatattattaaagggaaaaaatgaaaaatgatgttttattttatgaaacagaatcttggtgaaatgaatttaaccaatattaatacaaaacaatataccacatgttaaattctaaaattaatagtattcaaagaaaaaatataatcgtaaatactagcaaaacacaatattaaaaaaaaatacaacttttagttttaacactaaaattaaaaacgataaatatttttgggtttctgttagtccctctgttccagcaaatttgatgttgtgagattcttacacaaattaagaaaaacaactattacattttaatattattgttttgttagtttaataatattaaaaaaaaattttgattaacaataaaagtaataataatattgatattcaatttttgtggaaaaaaaataatttaatattattgttttgttagtttaataatattaatttgttttttattagcaataaaaataataataatattgatattcaatctttgtggaaaaaaagaaataaaaataagggtgagtattttttaacagaaatattgtttgtaatgcgggtcggtctccagtatttaccagaaacggcggtgttttccattgtctacgcatctaccaaaatcaaaatccaccgaagaaccctagaaatcgttttttctatacaaaactcgaaagtagaggtcgatttatttcttctccgacaaatcaccatcttggttttattgccatagtctttcaattaccacaagtatgttactgtgttcaactcctctcatcactgtaatcgaacctgaatgatatttcagaattcagagtctcaatctcccaacttagttccttgaattcgaaaaagggtaaacttattttctttgttacttccgtttacttgtaacaaactgattcttcagctaaatactgcagtaagtaattgtgtctagggttcttagagaaatcttcttggttctatacattatttctgcaaaattgtcacctttatgtttacctcttcattgttatgagatttatgttcgtttacattcagatttttgaaaattgcagcagtttctgttatccatgatgccaaactggtctcagctcccggaagagctactcaaccttatctccaagaatctagacaactgttttgatgtcgttcatgctcgatctatttgtcgttcgtggcgatccgcatttccctttccttctagcttatcaaccctaagttactctcttcccacgtttgctaagttcccattagtaagcaaagacttgtgtacactcaagaagatccaaatcttcctctttagagctcgaaaccctgctgctgatatacccgagtattttcttggaggaatagaccaagatcagtcaaatgatcatatggaacttccatctcctcttcaatgttctgtgaaagtgaagttcccacaatctgatccattcttggtgaacatgcttgactaccagatcattcctttaggctttcaatacataatgatcggttgggatcctgaatcattggcaaatggttacgtaggcgttgcttttcttccggtaaagaagaacggaggagacgaattcgttgtgcttcttcgctaccgtaatcatttgttggtgttgagaagttctgaaatgaggtggatgaaggtcaagaaaacctccattgcttcatgcaagggtttagtcagttttagaggtagattttatgtaacttttcttaacggggacatttacgttttcgatccttattcgttggaacagactctcctgatgccctcagagcctctgcgctcgagcaagtatctgattccaaatggcagtgatgagcttttcctggttgagaagttcaacccatttcctgaagctgatgtattggatttgagtcggttcgcatgtagagtgagtaggctagatgaggaggctggtcaatgggttgaggtgatcgatttgggagaccgtgtgttgtttattggacactttggaaatgtctgctgctcagctaaggagcttcctgatggttgtggtgtgagtgggaactcaattttgttcaccaatgagccaggctatgtaacgtttgcctataaatacggagtacatacaggaagggcggaagacgaacttaatatttggagattctcaagagaaatacgagtaatgatcgtcaacacatttcctgttgtggctcttcggcttgagaggcaagctgaaaatctcgctttggatacctgagacgtactgttggttctgtttttattagattttgtgatctttaatggtaccctttgttctgaagtgtgtatgttgtgtcactgtgatatgatgatgactagaatacttgtctttgagttttaatatttgttttgttctcaactttcttgttatcaacatcagacaaatatgtctataaaaatggttgtctcatgaactctaaaagctgtctggctgtgtttttgctatcacatggccgtgtgttcgaaagaaatccgtttttgtcccaaagtcagatgagtagcccaactccatatagtcgatatatgcagcagatgcacaatgatggcctctgacacatggtgttccaacttccaagccactttcatggctataaacttgaaagactgtacattctggataataagatgggtcatgtccatctcttatttatgccttggagccgaagttgagccgcacaagagattgaatgagcttcagccatttctttctcagtagaactttgataaggcattattttagtgtagtttaagcatagacatagatttgttgggaattgttgctttgtttgacagcttaccaactgagttggattttgaaaggaaactaggggaaactggtaaatttctgctaaataatgaaggaactcgattgttttttattccaaacttgtgcagctttcatgtcgtcccctctgccataccctttagacagcttctgttcttgcttttgactctgtttagagcctcttgcttgttgtagattgattttattttgtgactatggctacattatggttcaaagtagtgctgcgcctgcctagcatattcaatgggtaaaaaatccagagtcatcttcatgtttaaactggtccaaaagctgcaaagagcaacacttctcctgtagttgtattcttcagatggtaatgattaagataaacttggtaggcttgagttgtcttgtacttttagatttgtagtgatgtaccaaatctgaggtttaggcgtggaagctttgaccgtgtatcagggaaggtgttgaagaacaagaccatagattaattgtcaggttgtttctgatgcagagaaacttgaaaggataagaacaatcaagaatagaagcagatcttgtttagttcatgcttgttttgttgtcctaaggagagataaacactggttttgttaattcatttcagtcgtaaatttttacatcaaatctctcatcttgtaactcttttgtttcaattacttccccaaccatagagtttgagtaaatcagaaaaaaatagtattatccaaccgttcaaccaatccgtgcgttgtttctatattttcgtagcagttgagttataaacacatttattatggtgacaatatgagaagcttaacttgaatcagaattcacccacataactgcaagagtcacaagagaagcatagattgaagtaggcagcttctgcacaactttgccaactccagggacaccttccgtggccttcttcgtcgcaatagccacagtgggagcaacaatcaaagctatgatcaaaccctgactaaccacgttaaacgtctcagccgtaatctgctcaataaacttcacaaactcttccctatcaagttctccatccaagttgatatcacagtcctgttacaagaacatcacacaaccattatgaccactcaagttgcctagaccgaaaagaaatagtaacattatctgatttttcaacctattcttccaaaatcagagtccagatgatttcaagtgtagtgttacaaacagtggttaatactaaacgtttaaagctaaacgcaatcgccaaaagaacatccgtttctgctttaaaaattgcattttgactttttctttacacaaataaccacaaacgcaaaagaagtaattcagcgtttgcgttttaaaagcgtttcaaggaagtgaaagtaccgtcataatgctattgactagatccttagaaggtggatcgaaatgaggaccaggcaatctcttgtttatgtcactgacaagattacacaacaagacaaaaattgtcagagattaaacataaaagtttctaaatctgtaaattaacactaaaaaaatgttatggaaccaaaagattttacttgtaaacgagaagaacagcgatgtataactcttcaaacgtaagattggctcttccggtttgcatcttgaaccgatcgaaaacacgatcacatatcgcttgtacctgcttatgtctccactctttacctgcaatttaacattgccatatacatattatacataacaaaagaagcaattttattacatatgcacaattacttgaccataaaactgattataaatgaaccaatgtgagaaactgaaaacaattttacaaacctcggagcttgttaaagacttgtcccatggcgatggataatcttcttctcgtctgattgattgcacaaaaatgattttttttttttttaatatgtggatctgagtgggggtggaggcgtgagcgtgacgaatttgggccaatttatatgttggtcaacggcccatttatttgcgcaagctaatgaatcatgggctcaaatgggccttaatcgttaatggtgaagaaatgtaaatgggagagagaaggcagcgaaagcgaaacaagagacgtagctgaataccacagaaacatggagccagtatctgcttccaccaatcccatctcttctttccatatctccatttttttttatatctcctaattatcatattcgtttttttcactataatctaaacttctccaattgttgaaaccattttatatttatctcttcttattttctgcatggtggtttgaattaggccaccaaaaaactcttggataaaaaaaaaactgagaaacagaaaaaagaaaaaacaaaacacacattctcgatttgtctgtgccacacacactctcttgcacattcttgtctcgacaatactctcaggtgcgttattggctttgctctttaagatcttactcaaaatctctgtctttggaatctatccatagatgcaaaatttgattttgaagtgattcttcatcttcttaattgggtttcaatggattagtcaaatttgggtagtaatgattggcttcgagctcagaactagaataaagtacaattcttttgctggattacgttattaacttttgtaattttcaatacccacaagttgatattgattctttgtgtctgaaattgtgttatgatatctaaagtattgatttttgttagcagaatacgatcttgaagagcaaagattgttcctttattgatgaattgagtgcaaaagagtgttatataatggctactgcagctgttataggactcaacactggcaaaagattgttgagttcatcgttttatcactcagatgttacagagaagtttctatctgtaaatgatcattgttcatcacagtatcatattgcttcaacgaaaagcgggataactgcgaaaaaggcgtcgaactatagtccgagttttccttcgtcgaatcgtcacacacaatctgctaaagctttgaaagagagtgtagatgttgcttctactgagaagccatggctacctaatggaactgataaggaattggaagaagaatgttatgatgatgatgatctaattagtcattctgttgaggcaattttactgttacagaagtctatgttagagaaaagttggaatctttcatttgaaaaggcggtgtcgagtgagtatccgggcaaggggactatacggaagaagaagattccggttatcacctgttcagggatttcagctcgtcaaagaaggattggtgctaagaagaaaactaatatgactcatgttaaagcagtttctgatgtttctagtggaaagcaagttagaggttatgtgaaaggtgtaataagtgaagatgtgcttagtcatgtggaagttgtgcgcttgtctaagaaaatcaaatctggtcttcgtcttgatgatcataagtcaaggtaaagtaaacatactatacttagaaaaaagagctgaaagtgtattatagtgcaagactaaattattgtcttgtgaaatattagattgaaggatagattaggctgtgagccttctgatgaacagcttgcagtatctttgaagatatctcgggccgagcttcaggcgtggttgatggagtgtcatctagctagagagaagttggctatgagtaatgtgcgtttggttatgtctattgctcagcgttatgataatttgggagcagaaatgtctgaccttgttcaggtaatttcaaagtcattttgtgtactctttgttatagcttttcatgaacttttctataagatagatttttgttttctactatgaagggtggtcttatcggacttttgcggggaatagagaaatttgattcttccaaaggtttcagaatttcaacttatgtatattggtggattcgacaggtgagaataaccattttttgtgcttgccaatatggctagaatgtaaaacctgacaagtgatactctatgtttcaaatatctataagggtgtctcaagagcactagtggacaactcaagaaccttgaggttacctactcacctacatgaaagactcggtttaatccgaaatgcaaagcttagacttcaagagaaaggaatcacaccctccattgatgtaagtgtaacatttaaacaattatggtttctcaagtctacattgtgtatgcttatagtgattgttctttccagaggattgcagagtctctaaacatgtcgcagaagaaagttagaaatgcaacagaggtaaagaaaactaaatttttagttcatgtccctttcgttttcgaggggatctatgtgtatttgtgcttactctcttgcatttgcaaaatacaggctgtaagcaaagtattttctctagacagagatgcatttccttctttgaatggtctccctggagaaactcatcacagtgtgagtctctttttcggtttctcttaaaacaaaacgacgattttgttttcaccatccatgtttccatgtgtctctcctctccagtttataacgatttgcttgtttgtttcactatttccagtacattgcggatactcgtttggagaacaatccgtggcacgggtatgatgatttggcactcaaggtaaaaaaaaaaaaagaacaagtcataagtgaagctacatttaatacaatggttctgattttctctatcatgaaacactagagtttgagcatatgagattgatgataaaattgcaggaggaagtaagcaagcttataagtgcaacactcggagaacgggaaaaagagatcattcgattatactatggtctagacaaagaatgtctcacatgggaagacattagtaaacggtatgtatccaatcttaagccttttggtccattgttgcatcatcaacatcattctttaaactgtctcttgaaaaattgtaggataggattatcgagagagagggtgagacaggtagggcttgtggcactggagaaactaaaacacgcagcgaggaagagaaaaatggaggcaatgatccttaagaattgattttgtttttgtacattttgattacatcagagccatagagagcggttgtgaatgtgtatatatacaggacaaaaaagggggaagagtactactctcttttatttttttatcttccttgcttctttcgtaaactgagttgagaaacaagagacagttatgtaatatggcttcacgtaaacttcatcattcctcatatattatcaacttatccggtgttttgttttctttctgcgaaagcgataatactccgcattagagactattcaatttctaacttttcacaaatcttgaatgttcagttttaaagttttatccgagtcgagtctcctaggtaccgtaccataatttgttttgttttcgacgtgatagagggtcttttctttggcaccactcctcagtgatagcatcgattctttacaaagaatatgactttgacgagaaatttgtcctctttccgccttttcctttcctttataagggtaacggtcctaaccattatcaaatttctacatatgtatttctcgtcaaagtaatctttgtaaagatcacaatatcaccttaggtgatttttctagttaacaatatagttataaaaatagagataatatagcactccggtttcaggaatacagtggtgcatgcaaagagatttaaaagaattgatttttggttacctatatcatcaaaatacacttatctttttggtcaaaatacacttatctttttggtcaaaatacactctagtaccacaaggtaattagtttcacactaaaaaaagaagggtttaagaaatccgaggcggatcctacattattcgccctccaaggcatacctactcttcgatagttggagactgccgcttaggcaaagttgaaaagctagataagattcaactttaaaataattgataagtaaaaagaacacatcaaattactttattttgagaaaaaatgttgtctaattaatgtgtttttaaaatttatatctaatatggtcaaataaattaatacatatctcttatgtatttataattggactatcattggaattgaatttctttcaataattgaagactttaattatttgtaaatttaaccaataattgtatagatcttaatcaatttacgagttacctaattttaattctttgaaatttaacaactttgactaatcatatatctaaacaatcatatgatgtcatatatgttttttcaaactttgtattccaaatctctttgcatttttttgttactttaaaatagtctttttagtaaaaaatagatgtttgactaataaaattgaaatggctggtatatttaagaaacaaatcaaagattgtttagtactaaatttttatccaaatttggtaataagatatttcaaaatcacccaaaaatgtatctattctttttgaaatttccattatcaattaaaaaaaagtaaaagataaattaacacattaaatattatataattaggtagataaaaagaaaaggcttgggattgtaaaaaaaaaaaaaaaccataaacagttattttaaagtatatcataaatacaatttcgaatatgtccaaatgtaaatacactgcatacaatgaatataatatatgctggcaacaagttctgtgtcccattatatagttagacccatatactaaaaatgattttgataaatttgtaaaattcacttaacatatacatatacttttataatatgaattgcaagaaaacatattaacctataagctaattttttttagtttatttttctttctgttttatgtattaggtagaattcaaatgtcaatagtcaaggaaatttgctagtggggtgaaatttacatataataggtacaagtcaaattatgtataacaaaataaatttttaaatgtcaatagcttggaaatattttttaaccgctacttaaaaactttcataaaacctataagttatagtagaacttccagatagagtgacacgaatttagcttagctaatcaaatcctcacattccttatcttaaataaccttcgaaaaaagtgtgatccacatgtctgtataaaacgaaccgattagattgtgacaacaatacattccaacaatttatccatcacttttccatcctccaaaatttttgcagtaaaatctcttttcactttcaaatcaattatgtcacatcccaccgtagaacaactacatgctttccatgcacaagaaagagagatattctctaaactagttcaaaaactccgaagaccaccagctgagtcacttcttgtcatggccacatggctttggtttgaagactttggcttcggaaacattttctccatcatcacggtttttagcgatctactcattgtagatctcgctaacgaggctgtcttgtgctttcggtgccttgaatctgaccagcccccaaatgatgtcagtcagatccctctcaccgagagattcatgaaaaatgacatatcccttcaaataatccacaatcatcgatacactgccattacgggaataaagaactttttaaccactatttgttctagaatattctctgatatccttcaacgagttcttccatcttcatcatcctcattcatcaccaatctccgccaccctctcatcattcccggtttccctcatccaacttttgggagcatcaacgtattgcctaatatcgttgctagggataatcttccaaacgcaaattcatttctttttcctcatggtctttggggctggaacgctaaccatgtcgcgactgataaagaacggacggtatttctaacgttttctcgtggttttcccgtgtcacatgctgaggtgattcatctcttcaccgagatatatggagaagattgtgtcgaaagcgtttacatgccagaggacggtggaaattcctccaatgacaacacaaattgcaatggtcatcagcaacaaccactattcgcgaagatggtcttggactcggttgttaccgtagatcgtatactcagcggccaggaaaaacaaaagtataagatcaatggaaagcatatttgggctcgtaagttcaagaataataaagacggtcttatctaattaaataaagtcataaggatttttagtttctagtttttcaatttgctggtgtcaaatcccttatcttatattgtagtctaataattagaaaccatatgtaacgtttcgacgatggtatcttcacttaatttgacgggaatgtgtttcacttaagtttgaggtttgaggtgactttagatatccaatatatttcacatttcttttaagcaagagtggtactcaatatttttatgcactaccatatctctaatgttttctcaacataaaatataattcacacgtttaaaataaatagcttttgatcaaccaagcttctaacgatactacgctgatttgggggaaatcaccatcatcgtcaccgtcactgtcaccgtcggttcctcctttgaatgaattttagtaggatccctttgatgtcattgacaaccgccatcatcatcgtctctattaccaccgttgatgctgccacgagcaccactgacgttaaaaccaccaggactaccaccacaacaaccactatcaccactaacaaagagaccaagttttttcataaactaccttccatgtttaattactatagtttgaatatagagtgctagtttcttaatttattaataaaaaaatggtagtcttgcacaaatttttcttctttataaagaaagatatcacaaaattttatcaattaaatttattgaataaaacaaaagattttctctcttctattgtttacctttctttttagtaagtaattaagtctaaatgtgcaagaaatccacagataataaattcaaagagataaactttgatgttgttagaaatggaggataatcatacaatagacggatcggtttctcgagtaattgtttttttattaaacggattataccaaatttagaccgattttcaccaataatcaaatcaaacagaaccgaaccaaattaccttcattaattggaaaaaaatcgaatttagccaaaaataaccaagttaaccggatttttttaaaatgaatacagagattatcgacagtggaaaaaggaaaagaactcgaaaagaagaccataaacgcagaaccataagcatacacagacgaatgttaagcgattagttttaacacatttcataggtcttttaaatgtatattatcgagtctttgatatcgagaacatatagttttcgatatcttttagtgtttttggatttgtggacctgctggggttaaaagaggtgtgttggaagagaaatgaagccaaatgagtcaagtgaagtaattggagatgcagagcagtgcaaaagcgtcatcactaattagtttggccgcctctgatagaagacttcctaccgatagatctttctcaactttgtacacaagatagagtaggatataatctctttattgatcaaagtatgataacaaagtataacaatcaaggcacatcaaatcaatttataaaccctagtcacgtttcaagaatccaaataggaaatacacaataaatattgtcttgtagagattgcaaatagttgttaagacgaagaacaaactatttttatttattacgtgggtcatattcaaaattgaataaatgtaaatttactgtaaatgatgcacttttggataaatcctgacaaaaactagatttatatcgttcataaacctttcacatatcagccattgcaaccatatgaagttttgaaaataagcttgtaggtgatttttgggaggatttactcacatgactaaattgggcccatgagtgaaagtgaagcccatttgtaaaataaatgtcacactacacacaaaaaccctaaaaatcatttcagtcttctcaaggtttttgaaatttctatcttccatttccatctgatgaatctctgacgatgtctttgagaactcgagcatcgtcatggcctcgtcttctacttcgccggaaccctagatcttcattttctcgtcagatatctactctcgattcctcaacatcaacatttcccagaagaatctccggttactactcctcctccttctttcccgtaaatcaaacgccatggatctcatctcagaggtaccgtttcttctcctcaagcacaatgtcaccatcggaagctgatagagtagtgagagaacttatagcagaggttgagaaagagaagcagcgtgagagagaggagagacaaagacaaggacttgattacaaagacattgatgccgaagacgaagaagattacttagggattgagccgtttatcgagaagcttaagaagcagaatttgaaagatgatggtgaattaaataggcgtgaagagtcttctgattcggatagtgaatatgatgagattgatttggatgaagagaggaagaaagaagatatctttaataagaagtttcagagacataaggagcttcttcagactcttaccaagtcaggtatatgaacatttgtttatggcttagaaatggtttatggtttgttttctgattagttctaagttgttgtgttattgtttggcagagacacttgatgaggcatttagatggatgaacaaattagacaaatttgaggagaagcatttcaagcttagacctgagtatagggttattggtgagctgatgaatcgtttgaaggtagctgaagggaaagagaagtttgttctgcagcagaaattgaatagagctatgaggttggttgagtggaaagaggcttttgatccaaacaaccctgctaattatggagttattgaacgtgataatgttcaaggtggtggtgaagaaagagaagagcgtcttgttgctgatgggcctaaggatgacaatgatgatgatgatgatgaagaggagtttgatgacatgaaagaaagggatgatattttgttggagaagctgaatgcgattgacaagaaacttgagattaagctttctgagcttgatcatacctttgggaagaaggggaaacggttggaagaggagattagagagctggctgaagacagaaatgctttgacagagaagaaaagacaacctttatacagaaaagtaagtgcattctctatatgtcaggcttggtaagcaatagagtttgatcttgatttagaacttttcgtggtaaccattgtagctgtagtgctgtaactgctttattgagagaagcacatagccaaaaagttcaggcttggtgttgcttcaaaatgcgttatgtgctagtacaatgcggcatatctctattaagagatgtttgcattttccacgatattaccttaattctcttataagttcaaccatacattctattagattataacaaatggatcaatttcctttcatgcaatatgaatacttaagaaggccagtagtctaatagttacatgagtttatgataccctttgtttggtatgttctgaagttatcttttctttgaccatggtggatattgccatacatcttttctctcaatttattactgaaattattagcatagctgatcaggttatttcttattttttgcagggatatgatgtgcatgtgatagatgtaaaaaaagtttgtaaggtcacaaaggtatagttgtttgacattctctcttttgtatctcttaattcacttgctcggctataataaaagacatgtatttttagggtggcagggttgaaaggtacactgcattgatggtttgcggaaactatgaaggtatcattgggtatgcaaaagcaaaagctgagactggccaatctgcaatgcagaaggtaatctcacattaccatttgtcattttgatgggagagacaagtatggtggtgtcttataaaaatggacactacaggtctcgacagtacgttcatttgtgactagtggcaggatcttattgtagcaaagataagcatccaagtgattctgatacaaagctaattttatttgtttgtactgcctagcgttgaggacatgagacgttctaaaatcttgagtttaggtcaactgaaatttaatataccactaccttaggttcactcaaatttcagcttttattggcatagaagcttttagtaggtagggactaaagtacatagtatgcatctttttgtaaaaaaattgatgttcttttgtgcataaaggctttaattcaactagattggtgccgttccccaaatgcaccaaatgagaaagcttatgttcaactttaggttgtttgacaaggctctttccttattggtttgtgcatgaatgtccatatttctatattgcttttaattcgtgaactggtcaaaggacttaaaacatacaatttgtggtatactagtcttgttctgttatgatgcatttatatttctttctatatccttctttagttagttctcatggtctcttttataacaacggtaaaacaggcatatgagaaatgctttcagaatcttcattacgtagagcggcatgaggagcacaccattgcacacgcaatacagacttcttacaagaaaaccaaggtatctatttgagttcctttctgacagtactattgatgccacttatctatataaatatatccttaataaacttgaatctgcaactagttatatctgtggcctgcaccaaccacgacgggaatgaaagctgggagagttgtcaaaacaatcttgctcctagcagggttcaaaaatatcaaatcaaaggtgcattttttgcttcatcctgatataacatcgattcttgttttccgctggagttaaaagtattgttgtggtccgaattttcaggtgattggttcaaggaattcatacaacaccgttaaggcagtgttgaaggccttgaatgcggtgagtgttctgagctgatgacaaaaagtcaaatcaattttagttaaaaccttattaatgtctttttctttttgtcaggtcgaaacaccaaaggatgttcaggagaagtttggccggacagttgttgagaaatatctgctgtgagatctgcaattaacgcctttgggtatgtatttgctgagttttggttgaagtctaatgtttggctttagattagtagtgtgtttcttactctacaattgaaatatttttacgatgttggggaaaaataaagaagttaagaatacactatcctttcaccaattttattagctttagttctggttttggttctggttcctgatacaatgtcgtaatcgtcgtaggaaccttgttcagtttggttgtattagtactcaaacgtttcaaaaattgaaatcataaaagttcgaaatgtcatgtaacatcggaacaagaagatgtattagtactgtgctttctattgatgatcctcatcagtttggttggttcatatactgtagtttggttggttcatttttaattgccatttataaggtaatgaggagatttcgtcgatatgtgttgggattattgctttatttgccagagttttaaggtctcaattaacacaaactacacaaaattttaaactatagacggattagtcacaagattttatttggtgaaaatcacgtggacaaatacgattgtctttatatggtctaaatatcctgttttttgtttatttaatttaattagccttgaaatagttctgtctgggatgaaatttacgtgttgtcaaacaaaaaatccgtgccaaaaagatccaaactaaccagatttgagttctgttttaaataagatggaaataatcgctcattatatcataatctcaccacaaccagaactaatccaggtggatcaaaaatatattttgatacaagaccaaatcacaaaattcttccaagaaatgttatttgtatgtcggtacacaacatccgtccttgtcaactctcttcacgatcttattctttccaattatatatttcccaaaatatcttccagaaattttgaatttaactccgacgaccaaaagaaggaaactgaaaaagacaatgagcagcagcagcgatactcatgccggagaatctcgtcatcgccgtaacccgatccggtggctactcggtttcggtttcttcgtacaaggattcagaggattcccatggcttggagccaatttcttcctcacagaacagctccgtgttaatccttcagtgcttcagcttcttcaaaactcagccaatcttccaatggtcgctaaacccatctacggcgtcgtttcagactctgtctacttctttggccaacatcgaatcccatacatcgccgttggaggtataagacctaaccacaaataaaattgatagagaaataatttggaattgtgattgagagagatcatttgttgttactattgcagctttgttacaagcaatctcatggctagctatagcattcttgtcaagatccaatgtatcaatcttagctttatcgatatatcttctccttagtaatctcggtgcttccttagtagaagtagcgaatgatgctattgttgctgaatccggaaagcaaaaaacctcagagacgcaatccggtgagctaccgtcatttgtttggatggtttcttctcttggtggaatcttaggtaaccttttaggtggtattgctatcaaaacgttttcagctcagtcaacgtttcttgtgtttgggatcttggctcttcttcagttcttggtaactataaacatcagagaaaagtctcttaatcttccggaaaatccatcaccagctggtggtattaggaaacatctctctgatctttcgcatgtgttgaggaagcccgagatttcttattcgatagcttggatcgcggtatcaaccgctgtggttccggttttgacagggactatgtttttttaccaaacaaagtttctgaagattgatgcatcacttttagggatctccaaggtgtttggtcaaattgcaatgcttctttggggttttgcatataatcgttggctaaaagctatgcggccgaggaaactgctgacagccattcaggtgacgatagctttctttgtgatatccgatctcttgtttgtgaaaggcgtgtaccgggatttgggagtgtcggactctgtatatgtactcttcttttctggattcttggaaactctattttacttcaagattctgccgtttactgtcttgatggctcgtctctgtcctcctggatgtgaagggtctctcatggcatttgtcatgtcagccattgctcttgcattcatagttagcggatatcttggaatcgttcttgcatcgtttgtcggtgtaacagaggatgatttctcggggtttactcgcggactcgctatagaagcgtgctgcgttgggattccgttgatcttaacttcttggatatatgatgaagcggaaacaaaagagaagagtaaaaagatagagtgagttcatttgggttaatgtgtactttgtatatctttgtgacattcttgtgatttgaggtttttcgtagtctctctcattgtctacatgactacatggtccaactttcgattgtgtagctgggtctttgattttgcttcacaccgactaaaatatttcgatggtagaagcatactttgtatacatgtgactttgtttggtgctagtgctattagtgattacttgtttatgttcatatcataatcgttggacggttgtttaatttcttagaaatgtaggaagtttagaaaactctccttcttcatctttataaaatatcaatcttaaatcaatgtgacactaaaattaagttttccctttcttttactttctttgttctataaagtaattattatgagctaatttcaatttcagtttgtattttctaactgattatttgcactataaagtgatttcttgtgtactcataagactcttcatttcattacaatttcgtaactgattagatgataagatatacagtatctcctaagagaaaaaatacaaagcccaacacggtaagcataagcccatgatgatgacggttaatatcatgattatgatttaacaaacataaagagagtttttaaccacaataaagcgacaatccaccaaattctttcaatttggagaaaagttttaatccactagtataatgagaaaaaaggattacaatcaacttttcgacgttttaatagatttaagcaaattttcaaatttcaaggtttccacaaggatatttggtaaaaaatcagaaaatctgtgacttttgcgtcttttggcaaatacaatttcaattattgttttttcaaatatgatttgaccaaattagtcttcaattttttcaaatttaactaagtgctaagtttgaacgatgttggatctctaattcacccaaatcaaactaagccgaaattactgatttgtgggttttctttctttaatacacctattttagtgttcaaaaagtaatcaaattgcattaaaaataggttagttaaaaccttatagcaagaaaacaaatattgatacaaaattcattcaaagttttaattattctcctctataattttcttgtaaatataaatttttgggacagaaataatatttgcaattccatcattttttagtttttacatttgtgaacacaataagttttctcattttttaaaaatcccaaacaaaagtcaataaataactcatacaaacttatacttccttcgtttaaatttagtcgccgttttagcacttaaattttgttttataatagttgtcattttagaatttcaatgtagatttttggtaaaaaaattctaattttctcctcattattttaatgtcttgaccaataaaagatacttaaaaaattattttatcaatttaattgtacaaaagccctaaacgataagtaatttaagatggagggtgtgttgggtaataaatcataaatattcattagtataattgatacagtatatgttagttagtacaatatatattttgttaagttggacaaatgttgagaataactcagttaaatcagtgcaaagtaatagtcaacaagacaacaactaaattaaagattttttttttgtttaaaagactagtcgaagttttaaatattttactccaaaaagcattggttcaattttaggctaaagactttattgtttcccctaaaagagatcttcagcttatataaacacaacattcattaacgtacgcaatcgatgatgtcaaagaaacccgtgatggctgttgtttagtaatgtagagctaaaataagcaaaaacaaaaaacttatgactttactaacgacaaaaccgtctttatccttatgtctttacaatatctccgactcgtcaaatgccacaaacaccgcaaaaaatattctacctgattttttccaaagttttgaaattagattttttttccaaaataattatgcttgaatggcacgtttttgaaagaaaaaatatatatataaccggtacgtataagcctaaagaatttggctacaccacacgtctagaaatgtacgaatagagagtgaagtgaacgacacataataaaaccaaagaatggagatatggttactcatattggcctctctctccggatctctccttctccatctcctcctccgccgccgtaactcctcctcccctccgttacctcctgaccctaacttcttacctttcctcggaaccctccagtggctccgggaaggcttaggtggcctcgaatcctatctccgctctgtccaccaccgtctaggccccatcgtcaccctccgcatcacttcccgccccgccatattcgttgccgatcgttccctaactcacgaggctctcgtcctgaacggcgccgtctatgcggaccgtccaccacctgctgtaattagcaagatagttgacgaacacaacatcagctccgggtcatacggagccacgtggcggcttctccgtcgaaacatcacctctgagattcttcacccctcgcgcgtgagatcttactcccacgctcgtcactgggttcttgagatcctctttgaacggttccgtaaccatggaggcgaagaaccgatcgtcctcatccaccatctccactatgcaatgtttgcgcttcttgtccttatgtgttttggagataagcttgatgagaagcaaatcaaagaagtggagttcattcaaagactacagctccttagcttgaccaaatttaacatcttcaacatctggcctaagttcaccaaactgattctgcgtaagagatggcaagaatttctccagatacggagacagcagcgggatgttttgcttcccctgattcgtgcccggaggaagatcgttgaagagagaaagagatcggagcaagaagacaagaaagactatgtgcaatcatatgttgatactctactcgatctagagcttccagaggaaaataggaagttgaacgaggaagatattatgaacttgtgctcggagtttctcacggccgggactgacacgacggccacggcgctgcaatggatcatggccaacctagtgaaatatccagaaatccaggagagattacacgaggagatcaagagcgtggttggggaagaagcaaaggaggtggaggaagaagatgtggagaagatgccgtatctaaaggcagtggtgttagagggactccggagacaccctccaggacactttttactcccacacagtgtcacggaggacactgtgttaggaggatacaaagtaccgaagaacgggacgatcaacttcatggtggcggagatagggagggatccagtggagtgggaagaaccaatggcgtttaagccagagaggtttatgggagaagaagaagcggtggacctcaccggaagtagagggataaagatgatgccgttcggagcaggaagaaggatatgtccgggcataggtctagcaatgttgcatctggagtactacgtcgccaacatggtcagagagttccaatggaaagaggtccaaggtcatgaagtggacttgacggagaagctcgaattcactgtcgtcatgaagcatccgcttaaggctcttgctgttcctaggagatgtcactagtctgcttcttcctcttttcttgggtttaatattcaaaatgagtgaacttagtttggtggaattctcaataaactatgggataagtcataaaaaagagttattatgctgaccgtttgtactttatattcaagtgtatgttggacaccttaaaataaaacagatatttatatagttcagatttatttatatgtttttaattaagtaactgatatttaaattttaaattgcaacttgctaatgatgttacgtactatatagtaatagtaatcctatgatttgaaagaatgcataattttttcgttaatcatttttaacaatttttgtgttttaaactttttcttatcataacttttatttttgaaactgtgttttaaagacatgatgacttgaaaagaaaagaaaagaaaaattgaacaaagccgacaaatttataacaactacttcgtggttttgtaaattactaccacgtgacttctttgtttaaacagttgctacgtacgtacttctttattgtagtatttcattcacgctttgtctcgctgacaagattctccaaagtgtcaacaaatttatcggtgtaaccggttaataatccatcactaaccaaaacctccttcaatttggaatggttccttctcaccagattcccgatctcactagcttggtccatcacagatgtgatagcaacactcaagctctccttcgagaaccatcctgtttcttctctttgcacttcaaccgaaaccttgagttcttcggtcatcaatcttgtgttgagaacttgatcagccaaaaatggaagcaaaactatttggcaatcactcattatagattcccacattgacccgaatccgcaatgactcaagaagcagcctactgatggatgagccaataataacggttgttgcacccattctcccaaaaccactccacgatctttcaccctctcctcgaacccttctggtaacgcatcttgaatcgtctttgcgccttttggtggtgttacagctacaaaaaacggtaaacctgtaagctctattcctaaacaaagttcttggaactggtccttctctagagtgacttgacttcccaatgcacagaacactacagagccttgttcaaacccgttcagccaatgactccatcgatcttccagtggtttacctttgtttggctcaggaagcattggacccgtcaagaaaacctttttatggtattgacgctcaagatactcgcagaatttaccctcgatttctttgcatgtccttatcgaaatgaaatcacaattcataagacctgtgatgagccgatgagaaaacctcttgtagtagacggagaaggacaacaaggcgtgagcatcgtgtttgcggtacaacaactttgaggaaggataaccaggtggaggaactccaagttcaccacctgggacaaagtcatgagctatagaagtagctgatatgatgttgtacaacatactcttgactctatactctttagccacttctggaacccatgaagcaatatcgaacaagatcaggtccggactcaaggcactaaccgctgcttcaacttgatcgcgtgtgagatctatagctgggggcaagaacttccacaatggcatagggatatccgagaaagtctcggctccagcggggagaccatcaacatgaggaatagtaagagagtgaaagacgatgctgtctggaaacagattgagatgttcaagctgcttctgagctttcttggggatcaagaaagtgattctgtgacctctctcagctaacttgttggctaaatgcaagtatggagtcatatgaccaaaagcgaaccatgggaacataaaggcgtgaaacgtttggcccatttttcgttcccaatattcgaaagaagatcaaacaaaaaattaaagtgccaaaagaagaaatttatgttctatttctaaattcgaatcatgagcatttttgcttagaagtaattttactttgctcttcccctcccatatgggcatctctatatttagcttctgaaactgtctgaaacgtacttgagattaattactaatagtggattagtattttaagttaattattagctgttttgatatgtggtttacgttaattattcgtggagatttggaaagtactgtgttgcatgtgtcatgtttgtttgatttacacattaatgtaatgttatttcttgacttgacaaaatacattatattaagcatctttgtttttcttaagcatgaagaaaaaatttaagcatcttaagcaataagtgcacaacaataagaagaaatttttgttgtgtttaaaattctaagcatctatgattttcttcttttttgtactagaaatttttaagcatatgtttagcttgtgaaagtgtgtgcagttaggtaaattactagtgagttattagtattttaagtgacttataagtggttgattgattggtgatggttcaagtcaatatattttaagttagtaattgcatgtgccatgtgacttgagcaaagttgttttttgtacttataagaaaaattgtctgagttacaataatacaatatatatcattgactatatgacttattagaaacagctgcaacgtacttctttcgtagtaaaggatttcattcaagatatgtatccttgttcgttgactagattctccaaagtgtcaacaaatttatcggtgtaaccggttaataatccaggactagccaaagtctccttcaatttagaatggttcctcctcacttggttccctatctcgctgtcttggtccatcaaagacatgattgcaccactcaagttttcttttgagaaccatcctgtttcttctctctgtacctcaacggagacctcgagttcctccgtcattactctcgtggtgagaacttgatcattcaaaactggaataaagactatttgacaatcactcattaaagattcccacattgacccgaatccgcaatggctcacaaagcaacctactgatggatgagccaatatcaatggttgccaggatggttgctgcacccattctccccaaactattccacgacccttcaccctttcctcgaacccttctggtaacgcttcatgaattgtgtttgcgccttttggtggcttaaccgcgacaagaaatggtaaacccgtaagctctattcctaaacagagttcttggaattggtttttctctagaatggtttgacttcccaatgcacagaacactacagagccttgtccaaacccactcagccaatgactccattgatcttcaagtggtttactcttgtcaggctcgggaagcattggaccggttaaaagaaccttcttcttgtattgactctcaatatagtcacaaaatttaccttcgatttcttcacatgtccgaatcgaaatgaaatcgcaattcataagacctgtggtgaaccggtgataaaacctcttgtagaagccggagaaggttaacaaggcgtgagcatcgtgttcgcggtacaacgcctttgatgaaggataaccaggtggagcaactccaagttcaccacctgggacaaggtcgtgagctatagaggtagctgacatcacgttatacaacatactcttgactttaagcgctttagccatttccggaacccagtgagctaaatcgaacaagattaggtccggtctcaaggcaccaatcgcggcttcgatctgatcgcgtgtaagatccatggctatagacaagaacttcaccaacgagatggggatatccgaggctgtctcggcaccagcagggaggccatcaacatgaggaataacaagaggatgaaagacgataccgtgtggaaatagattctgatgttccaattgtttctgagctttcttaggtagcaagaaagtaaccctatgacctttctcggctaacttgttgcctagatgcaagtacggagtcatatgaccaaaagcaaaccaggggaacataaaagcgtgaatcttttggcccatttttttctttagtttccgaaaaaagcagaatacaaaaaagataaaagtagtcaaagagagccaaaagaagaaattgttgttgtgtttcagattataatcatcttttagatgcgtagagactgagatgctcttccaagcccaaagtctcaaggatatccatatatgtataaaactataaagagatataaattggaaaatgtgcttatgaaagtgtgtgatgtagttttaggttaattttattatagaggggttagtattttgagttaattagtaggggttgattggttagtgaacatgcaagtagtggatttgcatgtgccctctgccaagaattatcttttcttgtccttattagaaaagtttttaaaattatacattgctcgagtaattgttcggtacacttaactgaaaaaatatatatgcgaaatcgatacacaaaaatcaaatatattctaaggattttgtgaggctcgttgttagctaaagcggaaagggtgtttattttgttttcagagttgtaaacaaaaatgcaaataaattaaacgatttgactttcaagatttaaaaatattgggcatatgatatttcagagatcaatgaataatggaaacatgagacaaataattcaacaatgaagcctcgtttttgaatatgaacacaagtctagactaattaatactctctaaagatattaatcactaaatttgactgcacgacaactaaactctcgtttgtaatttcttagtcaaatttgcattagaaacaagttcactaagttcacaatgcattctaaaatcaattttcgttagctagaaatacattgctcaattcacattaattcagacattctatcgaacacttttgatgcatagaaaaacttagactagaaaatagggagatcaatcatattctagcattaaaacatgtgaatcaaagaacatgtaatcttttggcgggaaagatttgaagtaaattttttttacggaaaaatattgtcgaaaatttttagtgatgaatttatgtatttttaaaactttcttaattattaattttaataattaaaaataaataattgtttgatttttttaatgctatttttatacaaaaaaattgaaatggtgttgtttgtgaaaatttctttatttaataatacacggcgactttattaattttcagaggttaattgtaagtatataatattgcttctgtttataagtccacttgcataaatcatttgtaattcgaaggatctttttcttagcaaataattttttttcgtgtaagcacatctaatatttcttgtgtttataaattcttgcataaatcgttttacttttttaattagaaggatctctcatttgatgtcttcacgatacgccaaccagaccttgttaacaattatttttataaatccagatcgagtttccacgttatgttagaaaaatattgggttcatctttaggtgaaggcttatattcatccatttttcttttagccaatcaaaatctaccatcaaataaaaaaaatattaaacttatttaattataaaatatattttgtcaccaaaacaaaaaattaaaaattaaaaaaaattggtcatacccgattaatttttaaaacgttgttaagtacttattttttttaccaattttaagaatttgaatagtactgagttttaggtttttttacaacgagcaagatagtttttgtgtccttatttactttgtttgaattatgccagtttgatcacaatccctaatcgatttatcttggcaacactaatattgttgaatcgatagacctattttagatgggcattatatcattaccgaagaaagttttcggtaaagtgttttgtaaacatatcaaacacacataatagtataatacttgtataaaattctactaacaaaagacagtttagttgttaggaatttcattgcatatatacttatgacatacgaaagtaggatacatttacaattgtgtttagagattgacaaaaaaaaaatcctaaaataacttatgcttgaataacacgctccaataagaaattgttacacgaattgagcacacacgggtagtataaaaaggaggaagaagcaaagaaaaaacagtaaagagaaaatggagatatggttacttatcttgggctctctctccctctctctccttctcaatctcctcttctttcgcctccgtgactcctcctctcttccgttaccacctgcccctaacttcttccctttccttggaacccttcaatggctccggcaaggtttaggtggtttcaacaactatgtccgctccgtccatcaccgtctcggtcctatcatcaccctccgcatcacttcccgccctgccatctttgtcgccgatggttcccttgctcaccaggctctggtcttaaacggggccgttttcgccgatcgtccaccggcggctccgatcagtaagattctttcgaataaccaacataccatcacctcttgtttatatggagttacgtggcggcttcttcgccggaatatcactgagattcttcacccctcgcgtatgaaatcttattctcacgtgcggcattgggttcttgagatcctctttgatcgacttcgtaagagcggaggtgaagaaccgatcgtcgtttttgatcatcttcactatgcgatgtttgcagttcttgttctcatgtgttttggagataagcttgatgagaagcaaatcaaacaggtggaatatgttcagagacaaatgcttcttggctttgccagatatagcatccttaacctttgccctaagttcactaaattgattttgcgaaagagatgggaagagttcttccagatgaggagagagcagcaggatgtcttgcttcggctgatttatgctcggagaaagatcgttgaagagaggaagaagagatcatcagaggaagaagaagagaacaaagagtatgtgcaatcatatgttgatactctgctcgatgtggagcttccagatgagaagaggaagctgaacgaagatgagattgtgagtttgtgctctgagtttctaattgctgggagtgatacaacggccactgtgctgcaatggatcatggcgaacctcgtgaagaatcaagaaatccaggagagattatacgaggagatcacaaacgtagtcggggaagaagcaaaggtagtggaggaaaaagacacgcagaagatgccatatctaaaggcagtagtgatggaggctctccgacgacaccctccgggaaacactgtgctcccgcacagtgtcacggaggacactgtcttgggagggtacaaagtaccgaagaaggggacgattaacttcttagtggcagagatagggagggatccaaaggtgtgggaggaaccaatggcgtttaagccagagaggtttatgggagaagaagaagcggtggacataaccggaagcagagggataaagatgatgccgttcggagcgggtagaaggatatgtcccgggattgggctagcgatgctgcacctcgagtattatgtggcgaatatggtgagggaattccaatggaaagaggtcgaaggtcatgaagttgacttgactgagaaggtcgagtttaccgtaatcatgaaacatccgcttaaggctattgctgttcctaggagaagtcactagttacttcttttcttcggtttaatattcaaaatgcgtgcacttggtttggtggagacgtggtgtcaactacggaactagctaatttttagttatgtacattcttttttttttgtgcgaaagttatgtgcattctatacgttggaataaatgataaagaaattgttgaccgtatgtattcaagtgtatgttggccatagccacgttaagatacaaaagcgttttgggaatctagttcagatttgtttacttaatggtgatttttcctagagaatagtttcgagtggtctgctacaggctttcttccctagtttctcgcttgctagtattcttcaatttttttatttaaaaattgtttatttagcctagttttcaagaattattctctatgaagttgcatttgtaaacatatgaaagtgagtttttagttaatgctcgggtaaaaaaaatccagtaattttttagagaaaagtacttatcccctaagttattgacatcttagaagatttttgaaaacttctcaatcttaaagttttcacaaaaacaatacttcagttttgggtcaaaatcttcgtatgtctttcaaagaaatatcttgaactcatatagaaaatatagaaatgataataaagaaaagaatcataaatcttaataacatacgtaattgatgatgtcataaaaattccatgatagctgttgtttgtactctagtaatgtaagcttaaagagaaggtaaaagatctttaacacacgtagatgcaacaaacatcccacatattttttcaacttaattttccccaaatttcaaaaataaatttttactccaaaaaaactaaaaaatagatatttgtagatgtgcggattatattatatatatatatatcatataattatagtgatatccagattcaaatggagatttggaactgtaaaaagcaaaaaaataataatgtattagaaacaaaataaaatattatggtaaattaaatattattataatctcttaaaatgaaatctgatatactatgaaaataatatataccgtatagaaattccaaaattttattatccagatccaatgacaggttttcggatatccaaatttttggtaagaaatcagaatagattttggattgaatcctacttctagataataataataatactgcctaattataaaattaatttatggttgaataacagtctctgataataaattgttacacgtaggttgacttgcaaaataattaagccacacccgcgtattatataaacacgaataagaaggaagaagacgtaaagaacaaaccagtgaaggaaactaaaaaaaatggagatatggttacttatcttgggctcgctcttcctctctctccttgtcaatcacctcctctttcgccgccgtgactccttctcctctcttccattaccacctgaccctaactttttccctttcattggaaccctcaaatggctccggaaaggtttaggtggtctcgacaactacctccgctccgtccaccaccatctcggtcccatcatcaccctccgtatcacttcccgccccgccatcttcgtcaccgatcgttctcttgctcaccaggctctcgttttgaacggtgccgttttcgccgatcgtccaccggcggaatcgatcagtaagattatttcgagtaaccaacataacatcagctcttgtttatatggagctacgtggcgtcttcttcgccggaatctcacttctgagattcttcacccctcgcgcctgagatcttactctcatgcgcggcgttgggttcttgagattctttttggtcgatttggtaaaaacagaggtgaagaaccgattgttgttgttgatcatcttcactatgcgatgtttgcgcttcttgttctcatgtgttttggagataagcttgacgagaagcaaataaaacaagtggaatatgttcagagacgacagcttcttggattttccagatttaacatccttaccctttggcctaagttcactaaattgatttatcgaaagagatgggaagagttcttccagatgcagagcgaacagcaggatgttttgcttccgctgattcgtgctcggaggaagatcgttgatgagaggaagaagagatcatcagaggaagaaaaagacaacaaagagtatgtacaatcatatgttgatactctgctcgatgtggagcttccagatgagaagaggaagctaaacgaggatgagattgtgagtttgtgttcggagtttcttaatgccgggactgatacaactgccaccgcgttgcaatggatcatggcgaaccttgtgaaaaacccggagattcagaggaggttatatgaggagatcaaaagcatagttggggaagaagcaaaggaagtagaggaacaagacgcgcaaaagatgccgtatctaaaggcagtggtgatggagggtctccgaagacatcctccgggacattttgtgctcccccacagtgtcactgaggacactgtgttaggaggatacaaagtgccgaagaaggggacaattaatttcatggtggcagagatagggagggatccaaaagtgtgggaggaaccaatggcgtttaagccagagaggtttatggaagaagcggtggacataaccggaagcagagggataaagatgatgccgtttggagcgggaagaaggatatgtcccgggattgggctagcgatgctgcatcttgagtactatgtggcgaatatggtgagggagtttgagtggcaggaggtccaaggtcatgaagtggacttgacggagaagctcgagtttaccgtagtcatgaagcatccgcttaaggcccttgctgttcctaggagaagtcactagtcgtggtatacttcttttttttttttttttttccacagtcgtctacttcttttcttcggtttagtattcaccaaagattaggttaagcgcattttgtttggtgaagtcaaactatggaactatgagggtgtattcaatcttatatttgaagtgatttgatttattttgagttttatgtgattttgaagaattatggtgaatttaacgaagttgttatgatttattgtaaaatcttctgaaattctacctaaaaccataagatttattttttttatttttaactaagaaatcaactaaaattcacttaagtcttttaaagtcattaacaatctaattcttaaaatgttttcaataacaagagatttttaaatagattttaaaaccactagttcaataacattagacttttgagactttaaaaactatgattgaataacatatgatttgttaatttaacacaaatcacttgagatgtttatgtcaaaaatcacttgaaaggttttgtaccttggaataaaatcataaatgatagaaacaacaatccttttattttatattaaaaggaatctttttatgctgagtgttttaataaaggtatttctagtgttaagtgattggatggtcggtatgtgtatttttgtttttaaatttactcggtaaacacgtctttttaaattaaagttaggttgttaatagtaaccaaaaccgcacccaaaaccgcatcaaaacagtgctgtaacagtatcaaaatttttacatatacatacgtatctatgtattttcgttactgtttgaaccgcaccgcacttctcctgtaccgcaaaacgcagtcaccattccgagccttaatattgtttagctttgatatttaaattttgtatatctatacaagttgctaggaaaaactttttaaacacgtattgtttatatagagattctatctttacataagtcatgtattttgttcgattaaaacacatttatactttgtttgcaatgtctatagttcatctacaatctcgaaaactaaattctttagcactattgtaatgtgttttattcaaaaccaatggataaatgagtagcagaactcaccaaaaccataatttatagagtcgaattttgttcatgaaaaaaaaaagtttagaaacttgaagcacaatatatagaatgaaccaataagtttaaaacttaaagtacattaatttcaatttttagatttttcaaagatgtcgaccagagaaagtttggcacgttacgtgagtttaaattcatttaataaattatgcaaagctatgtaatttttttatgtgcacatagctagctatgtagttaattatatatcaactaattgatttttttttttttttgtataaattgatgttttcgtatatatgaatgcaaatttgataaatctcaaagaaacactaagaatgttaagtttggtacaatgcgtttatgtcacatggtctttcatttatgctatgtttttaaacaaaattttgtgatatttttcttatacactattagtaagtacaaaaattataaactattatttctttaaaaaaattattttaaaaggataaattttagagaatagtacattacttatcctaagtaattgacatcttttaaattttttgaaaacttctcaattctaaagtttccacatctacgatatttcagttttgggtcaaagtcttcatatgtctttaaaggaaagatcttgaattcattagaagaaaatagaaatgataataaagaaaaggtagtataaatctcaatagcacgtaattgatgatgtcatgaaaatccatgatagctgttgtttgtactttcacacgtagagctaaataaacctcgtgacttgtgagatgcaacaaacatggcacaaaattgttttacttgatttccccaaatttcaaaatagatttttatttcgttaaactaaaaaataaattattgtagatgtacagattatattttattatataaagtaagatttttaaaataaattaaaaagttagttttatatattctatattattattttttataatatttaaattttaaataaaaactcacatatttttaaaaatatttagtattctaattcttatctcaatttatttattttttaaatttttaaatatttctttttgttgtttaaactttaaaataattaagccatacacgtgtatcattattatataaacacgaaaagaaggaagaagacgcaaagaacaaaccagtgaaggaaaaatggagatatggttacttatcttgggctctctcttcctctctctccttctcaatctcctcttctttcgcctccgtgactcctcctctcttccgttaccacctgaccctaactatttccctttcattggaaccatccaatggctccggcaaggcttaggtggactcaacaactatctccgctccgtccaccaccgtctcggtcccatcatcacccttcgcatcacttcccgcccctctatattcgtcgccgatcgttctcttgctcaccaggctctcgttttgaacggtgccgttttcgccgatcgtccaccggcagctccgatcagtaagattatttcgagtaaccaacataacatcagctcttgtttatatggagccacgtggcgtcttcttcgccggaatctcacttctgagattcttcacccctcgcgcgtgagatcttactctcacgcgcggcgttgggttcttgagattctttttgatcgatttggtaaaaacagaggagaagaaccgattgttgttgttgatcatcttcactatgcgatgtttgcgcttcttgttctcatgtgttttggagataagcttgatgagaagcaaatcaaacaagtggaatatgttcagagacgacagcttcttggcttctcgagattcaatattctcaatctctggcctaagtttactaaattgattttgcgaaagagatgggaagagtttttccagatgcggagagagcagcatgacgttttgcttccgttgattcgtgctcggagaaagattgttgaagagagaaagaatagatcatcagaggaagaagaagacaacaaagagtatgtacaatcatacgttgatactctgcttgagctggagcttccagatgagaagaggaagctgaacgaggatgagattgtgagtttgtgttcggagtttctcaacggtgggactgatacaacggccaccgcgttgcaatggatcatggcgaacttggtgaaaaacccggatattcagaagaggttatacgaggagatcaaaagcgtagttggggaagaagcaaatgaagtggaggaagaagacgcgcaaaagatgccgtatctagaggcagtggtgatggagggtctccggagacatcctccgggacattttgtgctcccccacagtgtcactgaggacactgtgttaggaggatacaaagtgccgaagaatgggacaattaatttcatggtggcagagatagggagggatccaaaagtgtgggaggaaccaatggcgtttaagccagagaggtttatggaagaagcggtggacataaccggaagcagagggataaagatgatgccgttcggagcgggtagaaggatttgtccagggattgggctagcgatgctgcatctggagtactatgtggcgaatatggtgagggagtttgactggaaggaggtccaaggtcatgaagtggacttgacggagaagctcgagtttaccgtagtcatgaagcatccgcttaaggcccttgctgttcctaggagaagtcactagttgtctacttcttaaacttcagtttagtattcaccaaagactaggtgatgtatgaagaattgaagttatgggcattttgttagctgaagtcaactatggaactatcttttttattaaagtacattttgtaccttggaataaatgatagaaacaacaatccttttattttgtattaaaaggaatcttttatgacgagtgtttttacaagaaaggtacataggtctagaaaagtgtgggatttctagtgtttagtgactagatgatttagaaaagtgtgggattttgatggttgttgatacttttgttgggagaaatcgaaagagtaaaagcatttgtgatacaacataaaacaatcataaaaaaacaagattagagtttaagaagcacacatgtaaaatgacttgatatagagtgaaatcatgttcctctccttccatacctcatagatgactatgtgacatcatatcatatatcttgagtacctttgtaagttagaaatgagataaatttaacgaggacatcaacccaattgctgatgatcaactttggttcagtttcaattcgaaccaaagttaatttgctgatgaataattttactagttaatcttcttcaaatctaatgagatttattaaatgcgaaaatacgacatcttcacaagaaggaataataacttccccgtaggtcttactaaagaattcaaacaatttcattctccctctttaccgttccaaactaaattgaaatcaaatcctcaaaattgagactgacagtcagagatttccaaaacaaacaaaaaaatggagaaaaggctccggtcatctctcaagacatcctccgaagaattcctctcatccgccgtcaaattaacccttaaatcctcaaaaccctcactaaaaaccatcatcaacgccgtcaaaccttcctctgacctctcatcttctctcccactcgctcttcacaactccatcctccaccacacagaatccttccaaaaactcctcgacgaagttaataacaacaatacctatatcccttctccttccaattcgcctccaacgaaacgacaccgtggtaccaccggaacctcaccagattcggatttggatcaacgtaagcatcagatccttgcttctcttcagattctctcttatgttcttcatttatgtcttttaaatccgaagaatgcgtttcctacttccgatttacttcccgctgctcaagctttgcataataatcttagattgttcgaatcggattcggttttgtgtcttgagattgctggagtttgtgagtgttggtggaaggaaggtttagtgggaagagaatctttgatttctcagtcgttaccgtttttgctatcgaggtcattgacattgaagaagaaagttgatgttcatagagtttatatgcttagagaagcttttacattgtttgattttgaggatgagagtatagaagatcttaggatgttgcttatgcggtgtgttgtttcgccgttgtatgtgaagactgaagatggtcagagatttgtttcttttgctttcgggcttagtcgacagttgatgaaatctggtcttgctgttgttaaggctcagattcctttggggagcaaatctgtgcttgaaggttttggtgggattttgtttagagcttggaaagaagtggagttagatttaaaaggtgagattgaagatgggtttttgcaggggattattgatagtgctattcacgctagttcgtccgcctttgctgcctcgttaaggagggttttaggcgggtttattagtcagcggacctctcaaggtgttgagaagcttctctttactcttgctgagcctatgatatttcgctcgttacaggtttgagccattaccaagcagtctttagttttctatctgaaactgttttctcggctattttagttaacattgtttgattatttggtaggaagtgattttgctgctcttatcttatttcaggttgcaaattcaaatgttcgtttaaatgctttacatttgcttctggatcttttccccatggaggatccagatgcaacaaaagaagcaaaagatactctgcttgacaaacagttctacttgttggaaaaattattgagtgatgaatgcccagatgtgaggtctgttgctgtggaaggtctctctcgagttttctatcttttctgggaagtgatcccatcagcaacaattaccaaggtcctcacgaaaattttcgatgatatgtcacatgaatcgtgcagtgaggttagactttcaacggttaatggtataacttatctcctcgcgaacccacaatcccatggcattcttaaagtgattctgccaagactggggcatttgatgctagatagtgttacttcagtacgcgttgcaatggtagatctactgcttcttatacgagatgttcgcgctttccagtttaacacggtaggaggaggccttccatttctgtttcagatgtgcgatatttttttattcacttttgttgagttcctggttaaatagtttccttgttaatacgcaggtagtgagcttggatgtgttattatctgtgcttgcctctgatcagactcatgttgctaagggaatcgctcgactgctaataccatcatactttccatcacgaaagagagctgaggaggcatgccagcgatgtaggacactcataaacagaaacccaaaggctggtgcaagattttgcgaatttttagtatctctaggagcaaccgttaaatctgtactgcaccttgttggattcttcttgaattcagttttgtcaggtgataagctattggagaatcagactgaaggcttgcttcgtgctgcgtactatctctgtaaagatttggttgctgattctgggtgtatggcctccctgaaagagttgttacctggagaaaaattgaaaagcttgctagctttcgcacccactgcacaggctcagtcatctgtcattgatataatcactatggtctcccctgatattgtctctgaagtccttgaagattgcatgaatttagttgttaattgtggtggtttgcctagtgatgcaggacgacagacggagttgagatctgtacacaagttactcctgtcttctaatgccttttgtgacctcattggaacttttaccagtatcatgcagaagactgcgtaccgttgtcaaatcaattttggctatgaagtagaaagaaagaatttacagtccatgaagaggaagaaatcaaaatcctctggaaaatcttcggtaaggtggaaacatgttagcggaaaaaatgcaatcagtttcgaggaagattatttggttgctgtaggaatagcatggcaaataaaggatttactcactaccgaagatgcacgtaaatctatactggagtctgatattgaggagctgctcctttccttaaaagtcgtctcacacactagcattttgcaagccacttgttgtgaatacatggacgtgaatccagtactggcatatacttctctttctttgcacatggcccttcagaatcttaattcggctactcagaagaacgatatgagaatcgctgaggcaaggactttttgctttccctcttggcaccttcctcttcacataatcagattactaattatcaggttttccattttctagcaggatattatggaccaaacaatggatcacatcctagtctgtacagatgaactatttcaggcaggtgacattggaacgccaggcaccacatctccagaggctaaccttagcaagaaaccgactacaagtaacggcaaccaaccaaaacgaagaaatagaaatgctcgtgatgatggtgagtggagaggttgagttcattacaaatgtcaacccaacatattgaaatcttcatgtgtagctctgcttgtggtaacagtgcccaatgaagcattcaagttttctgacattgtttttatgcttcatgcagcttctgaaggatcaaaggaaggaggtgtactgaacaaggtcaaaatgctaactgcgattttcaagttttttgttgagtctacagagatgggtctagcttccaactttcaagcaagtatgtttaagttttcatctgcgtatctaaagtatgtcatctccattttcaacgaccattcaaccggtaagttagaatttgaggacgctgatatgaaggaaatgattctgtgtacaaaaagctccaccagttatgccggaaagttcataaacctagtgatgagacatgcaaccgaagcttcacgccctttgtttgaatcatttgaccttgcaaatgacctgcttgatctcttcaccatggttgagaaatcgttaggctcggcttatgcatcaagaattgtgtcagctttaaacccttggattccagatttggttcttgcactaggaccttgtttcatcaacaacgacagcgaagaaagttcatacaccagctcattcaaccacatcaaactctgctttccttcatggcttcttacatgtgcgaagatcgaactacatgaaattaacaaagaagatgtgactgagacctcgggtttcctggcattaaaaaaactgagaaacactatatttacattggtgaaaggtaacaccaaggtgttagatgcaattggttatgttcttttgttatgtttggcagtctgtatagagaagagggattacagtacggctctcgggttgctacacttggtatgtgtgaagttggtaggtagtgaagatagagagtggaaagagctggacacaatgttggtcttacttccgagaatttacccgataatagagcgagagattggtgaaggaagagatgaagatgaagtgaagacgctggaggctgcaagagaactgcttcaacctgtgtggatgtaccatgtctacgaaaccggaaggttccacatgatggatgaggaagaagaatagataagaatgtaacattattcgagagcagtactgtattatgagttactgctgaagcatgtaaatatgagttaatccatgacaatcacttccgagagtttaccagataacatgagctaattcatggtatttattgtttatagaaactaccttagacaagagtgaaatgatatttatctaaaacaaataacgaagcataggcttaacattgacgtttttaaggaatttcatgctttcacatgagacactactcttatagtcttattcaatctcctagtatagctttagacttagagtggcttctggcaagtgatgataccaaacttaatgacacctttcttgtaaccttcaatcatcaatggcattgtcaatgctcctttaatacttttcataccactacgaagcagagacacaaggcccttccatgttaatgcagtccgtataaccgcaggccagaaaggagctacgttctctgaccaatccgcacacttaatatcctaaaaacacatatttcagattctagtttagtaaaaaaactctagttaagtaatgttttcggcagcaaagggtagggaatataataacctggagagaatgggattgaagcaagttgacataatcatcggtggagcaccaagccgggagatagaacgtcttacagattttgtccaagatgttttgctcccacggctgcaaagcttcctcccccgcagatagatttctatggcaccatgtcactattattatcctacctcctggagccgccacacgtaccaactcttttacaaacttggccttgtcaggcatatgctcaccactctccatcgaccacactagatcgaattttccatcttcgaatggctgatccaacgcatccgcaacttggaaggaagcctagaagtccaatgtccatacgttagatgaaattttcacaaaatgaaaggttatgttttatccaaagctaccttatgagcgagtgattgagcagccgcgagatcattggctctcttggcctgaacagggctgagagtaatgccaatgcattcagctccaaatttagaggcaagatatcttgagcttcctccaatcccacacccaacatccactactttctttatctttttctcctcctcttcatcttttttcaatcacaatcatttacatggcatcaactcaacttcatatgtataataattaaaaaggtaacaataactgaataacaaaccaaagataaaaaaataaaatatatatttctaaactatatttactttttgagtttaaaattatgtattcattaagcttacaatcatctcttaattcaaatgcaagaaaaagtattgttcttaaaaataaaaggttagagatggcttgtggctaataaaccacctttcatggggtaacagagtacaacaaaaagacaattatccctagtcatttctgtagacaataagtttttttttctgtggtttaaaagattttaagagtcattttgttgtattattaactcttttatttgttcgttaaccatatatcaaacagcgtatttaactcaagtgataatatcagagcaaaagattgaggaagctaaccagtaacaccggcaaaacggagagactcttcaatcatacggatctgagcttccttgtgaccagaatcagaaagttgaacagaagaatcagggtcataaaagccatgatgcatatgatctccccaaatctcttcccacaaacccgaagtttcattgtagaactccgctattccttttcttagcgcctcagtggatgtagcagcagccgccacagccacgtttccacgcgttgtcgtcatagagactgaggaggaggaggatggagaccgaaagagaagcgatgactttgagccgaaagaagagttggttcgataagggaggcttgtgagagaagagggtgctgctagagttgctttcatttattggacgttggagatacaaagaaacgtgacgaagtcagggattatttgattattgttacagtgtgactgtgtgagatcaaactttggatatataacattggaccatttttcttaactttagagccacaaaactttctgttgccacaggtcttggggaaagggccaatcgtctacatccacttatcactttgatttttctcctttttttttgtttaacttttctttttcttccatcattttagttttgtaatttagtgaaaagtcagtggcaaacaaatattgatagaagaagtgaagtaagcaaagagagcttaatatggtaattgtgacaactatcacatgcttgtaggactatgagcctcgtggacaccgttctattacggatgagtaggttagagaaagattaaaatggtaaagtacaaaagttaatctgactacccaactgtttgtccggtcaaaaatggattattcagaaaaaagaaaaaatatgttggaaacaatatttttttttttttttggtagggtggaaacaattctttttttttgactgataaatagttgggtaatatatagatattgtttcctttgataattttcttttcttctaaccatgctcaccatttaaatccaaaaatgaagaaactattttctttcattattgacttttccttccccttcctcttcaacgttactcttaacaaaaccagtcaaaattttaaagtcacaattttagaaggaattttttttggatattgtggattagcatatcacacgcatcaatttcaaatggttgaatccatttagaaaaagaccaatctgcggcctaatactttataaaaactatataaattacaagttttaagaaaataaaaataaacatagatacctattattaatgttgtaagataaagtaataattgtatcacctactaatttataatatttgaaatcacatacaaacatagtaacgtgtttttatccacttgaagatttgtagttgtgcattacaaactcacagaagaggatttcgacaacatttattatgagttaatatgatgcatagtgatggtgggtgtgaatatataaagtccgtatcaatgtaatttttttttatcgggatgggtaacatttaggggtaagatattcgcaggatagagtaacaaatcaaaatgagaaaggctttctattgatcagtactagattagaagatgaagaaaagagataatcagaatgaaaaactgaataactcaacattgttagtttgataccaaaaaaggatcaaaatgaataagaatacgatgtgaaaggtaaatagtataaaaatgattagtgattcctcaatatgaggatttatgctcatattctagcactgagtctcgtttagttaggtaattatcagtaagtacatgtacaagtcccattacaacggtagttactcgtccacgaaggcgagtctaccttgttacagccgctgatcatctggaaggttgctagctaatgatcattactcatccatccatgttttaaatatgttgagctactgctcattatagatcaattaaaaagaaatgctacataaattcacatatcaattatacaaataaaataccatcaaaggtacaaaacacaacaaataaacaaacgaatagggttattataccatatgacctcaatataggtactaatagtgtttgcgaatgatttaacgaattcaatgaaattaaaaaaaactccatagccctccacaagactaatgatccctggctctacaaagccaacactatgtaaaggaagttcactactcgtgttggtaagtaacaacatacctcttacttctttctttctactttgcgttatcagcttccttcttgttctctttgttgtactcttccatctcattaagccaaagatccgcaaactcgcaatccttccaagcatcaaaccaaggccctccacgagtataatgcaccgctttaggctgcgtggtgggatctttctcaacaaccctattgtgcccttcaagaaagttccacacaaaaggaatagacccaatctcttcatcctcaagccactggaacctatggagaaacgcaccagtctgagtattaacaatctcagggctcaaagtcttgttcttagggtgtccacagttgtaaagcaccattgaagaccagttcttcctcgggtacacagtttgaaccgcaccatccatcttagtagtctccttaggagtataatcatgttgaacacacatgatcgcatatttatcatcgatcaaatcagtgagttccttgatatcagcaaggtagaggaaatcacagtcgacgaacatagcccaaccttggtaatctgacaagtgaggagtcaagaaacgagagaaagagaactcagtgctctctaactgacctctttctctccaatacagacctttctttcgaagatctgattgaataattggtgtgatctctacagggattgaagatctttttgtgattgaatgatgacaaacttggtaggcaagatcttctcgtggatcgtaaccaacgaagatcctgaatggtttcttctcagaagagccattgttgcaggtttcagatttgacatctccgttgctaattgtcattgttgttgcagaattcgaatctgccataaatttcattgcaaaagttaagatctgtagcatctcattagattaagcaaattcgtaagaaacagaatcgttatgaagcaaaaccttatcgaaatgtgaatcaagtgcaaatctagaagctagaatcggaaattgaagccatattcagatgaatgaagtaacacacaaagaaatctacaacgaatttcgaagaaatgagaaagatctatatcatctcataatgataagcaaaattgaagaatcgtgatgaatcaaaaccaaatcaaaatgcgaatcaagtgaaaatctagtagtcagaaacggaaattgaagaatcttcagatgaatgaagaagccatggattcaaactaaatcagagacatggacaactaaagatctatataatcatattacgctgataaagcgaaacaatgaaactgcgaatctagtaagatagaaacgggaattgaggcatggattggagtgacacagaggaatcgagaacgaatctgaaggaaatgaggaagaacagagcgtacctggaggagatgatgagaacttggatcttgagaaaaagcttggagcaccgacagaaatggagatttgtggactaaaatgtggaacaaaggagaaagagagatttggagcgagaaaggaggggaagagtgatgtctctttaattttagaaattaactattttttaattataaaaacagaggctcgagttgactcacgtgttgactcggcgtcggcgtgagctttatgcgttgcttctttctcttcccatgtgctcgggcctccactacacgctctgttttttttttaatcttttttcttcgttatttttatttttttactttttttctttgttccatgcattaataagtatatgactcttttttagtttagtctaaagtttgcatggttagaaatatattgaaaaatttacagactctttagtctaaatgattggtcgtttccacatcgacttgtaatatggattgattaactgaatcagaccaccagaccctactctagaggtttatgattcattcaacattttattacatttggtgggattgagatattcatattcttagctccctagtcttgcagtttcaatctaacaaaatcgttagactttctactactcaaaattgttttacgagcatccaatactgaatgtgttattacttatttactaaggttactcacgcaacgcattttataatacaatttgtatatgttaataaataacaaatggagaaacctggatcctgtggaataagtcgaacatacaaatatcgaaaatcttcttgacttcatcgtatcattacttcctcagtaggagcaatgtacaaataaacataattcaacgtttatggtataagaaattttgaactgatcagtttaatctttcacataagcgtcaaaaacaaacaaatagccaattgtaagctatacactaagtcacctttactagtagtaaattgattttcgttgtgtcaggccaaacaatcataagactctctcaggcaccattattgaataagaaacttactcgatggcgtgcttatcagattgacgagacgtgtaatgtgcagaaagcaaaacgagagaaagaaaagcactcgccacaaaaattgcatcaaaccatcgatgatagaaatcaaactgaatatctccacccaacacatctgttatgattcccctacgaaataaaaccactgatgcttcagattccagtctcagatctttcatacacagcaaaaatatagaccaagagcagattactagactcggaacatagaagcaatgacattaaaactctaacctagacaagccagtaagtcctttgattaagaatatataaggtatcattatcttcctcatgatcagaattatgtgttgcgtacctgtactcatttctcaagctttttctgataagaagaattgaagacaaaaagtacattcccatgatttcagataggaaaagtacaacattgcttgaagacccacttcccactcttgagacagcaaagaaaaactgcaccatccacaaactccaactcattaactaaaactacagcattcaaattaaccaaaaattcagcgtgcagtttgttatgttttcactacaaccacaatactcatctgtgactagcagtctagtatacgcagcttaaatagtgaaaggattcttctatttaaaacatgattgcctctaagaagtagcttgattaaatggtggggatacaagattgaaactaaatcaaggactgtatgagtaatcatgtgaatgtgtttatgcacaaattcaaaggatccagaagagtctttgttgaatagatgacagtttagaggcacaccaatgaaaaaatcgaaaaacgagaatcataattcaccttcatcaggttcgtcaggaatcccctcacagaaatcacaatcaacatcccaatgaacagcagggatatatactgcgaacaagaaagaaagaaacagaattagagataagtctcacaatctagcaaaccagacgcagaaaagttgagagaattcagcatatgttttactttataatgataaatagtttggaatataactaggccctaggacagctctgatctctttaaccatctaactttccatcccatcaaaggcttagagatagtgacttaatattgaagaaataaatgctttaggctttcaagtctagaaatactttcaagtctagaagaaaaaacgtccagattggatttctttagcttaattactctatcattagagatagcaacgtaaggtaacgcaaacctgtgagaggagtgcagcatctactcctatatcaaacaaccgcaagaatatgctgatcatcgtcgtgacaggatcttttgtaccggcctgtaaacaagctgattactaacaatttcaagtagtaagaggtgcacatataacccattaaagaacggtagtgatacataagttaacaaaaaaaaaatagcgcatgtgggtacctctttgaagacaacactttgaagagactgcaaaaatagagcacaaaaaaaaggagaacaagagttactcatgttcaaaacgacaatagtgagaagacttttaagctagatcatcattagaaggataaaaaaacttaccttcaacattttatacacacaataaatggaacatgcataaccaagtaagttctgcacatgacccttccaagttctagaataagcagcagcatcctgcaaatgggatgaagtcatagcaaatgcttttaaaatattacaaccaaagaagatagtcagaagcactaatctcaacaatagaaaattcaaccaaagtacgatgtcaccaccaagtcaatgagtagaattctttagtgaatcaaaaaccaaggcagctgaaagctaacctttgcttgacgcagctcatatacttccaaaaataactgttttgacagctcctctaaggcttccacctccgcttccaatatttttatgtcttctcaaggaaaaattatcaattaattggagggacatcaccagacgatctattcataaaatgactaatctctcaccatgtacacttgaaaacatttaacaaactgaattatccaatgctaaaagttcattttcgcaaaaagtgctaaggtactattcaataaaaaatactaattctaacaaacaaggaaaaaattgatctcaagttggtctacgtgaataaatatgtacaagattcatggtcaactaaacatatttatggacaaaaatagacgtaagccttcccctgtagtaagcatcaacattacttttttggtttagacagtaattttcccttttgttgttgtagttgttctagttactaacagcaccatcaagacacagaacacatgcacaaataaagcatattaacaaaatttcttgttcaactaccgctgacgaggctcattctcctcaagccaaagccacttatgaattatgattaatgataaacaattttcacattgtctcaaagtaaagcattcagagtatactcatttcagttttacaccaaaaaaaataaaaattgtggaatacaactacaaataaaatcaagaacacataaactgaccttgttccttttggtcatcttgaaccgaccgcacaacagtcccaacaattcttctgaagaaagagctacgtttctgattctgggagaaaaaaagcatcagattattagctcccaaaatcatcactgaaaatatggcatattgtttaactaaaaactattagacagaagtttgagataacagcaatgaaaataagaactcaggtacccactcagaaaaggacgtgcagctgagcaaggaaccaagaccatggattgtttgctcgagaccgacaataatctctccggtcttaaataaattatccatagttttggttccatttacagcatcattattttatcagtctaatgtaaatatataaataaataaataaataaataaattctttttttctggttgtttactaatgcgaagaaaagtgtcaggatacagtcagttcagagacttcagagtacaatgagcagtttgacacataagtatgaaatagtctttgttcaaaggcttttataagaactatgacacaagaacagaaacataaagaatatgagattagacaatacaatcatatgaggataaaacgaaaacaaacctcttctgatccttgatttcgttccacctccaattgacacaaaataattttcttcttctttgctatgcacgtctcagttgactgaatcagttgcctttccaaagatattatatctgcttcttcaatctccctatatgagagaggaacaaaagtgctgttagaaagaaatatcttttatataaacctgccaatccagtcaaaacccaatatgtaaatcacagaaatgacaagcttctggaaatagcttataaaaatatcccaactgaacatccagcaccatttgtttcattcaagttcaaaatgtggaatataagttcctattttgtggagtttcttagcatatttgtcgcattaaatctgcattttttctttcctaagctttcttctttcattctacatttttatgctttctctccgaaggacatgcaggtggcactatatatattcagtgctaattatgtatgcttatcatgtagcccattgaatggttcccctataaggaaacactcttattgttggttaaatataaactagaaaaaggaaataatgaatagaacactatctagtagcttacggaaatagagttgaatattagtacctaatgaagagggatatatagctgtagggtaaatttacagctccaaatcctgataagacagccattaaggtcacaccaatgaccccaattctactgaccagctgaggcatggtaaaaaacccttcaaagaaataggagctttaagtcaacaacttcaacagacaataaaatccaaaaaccaaaacccagaaatgagaatgcttggatgcagaagcttgtgctgatcagaagtagacaagaaaagtataaatagttagtcattttgagctttttctttgaagatatttttcagcaaggtaatgctatacactcttatcaagctctcattatcggtaatgctatacactcttatctagctctcattatctttcgttgcaaacaacatcataccctctaatctagatattcagtagtcagtattatcaatattggtgcatataacaatggataaatatgccatattcatctatacagaaattaaattaggtgtaacactggtaccaagcttagttcttaaagtttataattatcactactgcaagggataaatgaacttagaagaggaaaatgagtagcaactagcaagataacgatgcgatgctggaaggaaaggaatggttacagtagtttgaaataaatacctttatctgctgaaggcatagggaaatgaactcccatacgccagaatgcgtaaaggaatgctgacaagaataagaaagccccaacagaggcacgctcccttcttacacctgaaatgttattttaacttgaaaaaattacagacagttcacacaaaatgctgtaatatgcggcagcgaacaataaagtgatgctttctcaaattcatttatctccatctaattgaactcatgagtgtttataaaagaagcaacaaagccagagataaggatcaagatttttcaagatataagatcaaaatgatgggccaaagactgtttatacacagctgcacagaagtgttctcaaagaaatctcagttgagtagcaattatataacaaaaatagtttcaggagctcctaagaaacttgcaatgaattaaccaattatagtgattaccttctaaacaagaagtgataagagcaaagaaaattcacatatgaaataaggcttaccactattacgaagcatcaaatagcaatggtaatacggcaacatgaaaaccagaagaagtatcaaacaaaaaagatccaccttccagtttatcatccttgccctgcaaaatcatcaaaagatcggtccaaggcttaaaactctaaattaatattccaactaaacaattgctacataatgccatgaattccccctccaatataagtattacgtacaatgacaaacacctcaaaagctcaatgatataagcatctagtatcaagtatcaaatttccacatgacataaaggaataaacaagagaagctagctaccacacagtttatatactcgattacattacacatacaccaaaaaaattgtcaagtaaaaaaattcttaagacaataactccatcaatctacactcaatctcaaaatcattgccaattaggtaagaagtcaacaaaattaagcaattgcaaacaaaggaggaccaagtaagtaacacaatctagaagacaacaaataagtaaagtttccaaaaacctccaatgccagaaaacaccaaaactagctaaatatcaaaaactacagagtggattactcgagaaaagacttactctctagagagaacaggtatgatctcgaacaaaacgagctgcaatagattacaagagaaagcgaagacgacactgaaaatgatttgaaccaaagctcgtttctcttcatactctttgtataatctccgattaagaaaccataaacctgcccatcctaagagacttagtgaagctatcaccaccgtgccttcgtatatcgcccatccgtaactcatcgtcgccaaattccagatctctcttacttctcgagaaaaaacctcagatctgcaaaaacctcatggcgattcaacaccagagcttctgttgtacgattcgattcgaatttgatcatttatgaaacaattaaaaaaaaagtatttaagaataccttatttatttttggttagggtttatttggtttaaactctaatcaacaacaacctcatcaacttcatcatcaccaccaccaccatgcgactcaactcgaactcgcagagaggaaggcgttattaaacgctaaccaaccattgagctacggagtaatgtgaaagaaactgcacaacaatagtgtttctatcctttttttttgtttataggttttggcgtctagtctagtgttgatgataattttaactccattttccgacatgttttcttatctggtcgattgatttttttgtttttctttcacttttacatatatacacgaaaaatgatcgattcattaaaattgttgtttagaaggcttgtccaatcttacacgtgttaccatatataaatttgcgggaagtgggaagggaaagatcgggatatcgatagttcatgataaatcttataattacgggatcaagataaatattttttttatcattaataaaaaattaatatttgtgtacattttcttattgttagatagaaaatttaatattatcataaatgtaaagaacttgctaatcaagttatgatttttgtataaataatcctattagctaatgaataaatagagaaaacctgtattattgctaaagtttcctccaaacttatcagacaccaatcgatgatgtataatataccatttttcataacgtgattctattatttttaccattcacaatatttatcatacatttatatttgattttcatgtgtatgttatatttgatgcatgtggaaaaaataattcaaaattaaaaaaactacaaaacgtttttcttattatatcacaattatttaacaaaaaaaagttttgagctattttgtttataatgtttttatgcttttcaatcctacatttcactatcagaaaaatgaggccaagttataaaaataaaaataaaaactaaacccaataagcccattaaggcccataagtcaatacagcaaaaacagctcatctttgctaaaacgtagattactgatttaatctaccggaatcgaaaggcaataccaaacttccggtgaaccggaatcggatccatttgacttgccgtagaaattaggaaattgattacagtgttcttcgagaatggagaagaaggagatggagaagttgtgccaaaggtgcaaacaaagctacacagatctttcaaacgaaacttcctcttgccgttttcatccttccttcttcgtttgtcgtcgtcacgatgaccagaaaaggttatgtctcctacaaaccctaaatctattcactaatgaagaatctcacatcccaagcagcttgattcgctaatttataatggcaaagcacaaattgttgagatgggttttgaaagccatccactttattgtattaaggttctggatctatagctaatttagttagataccttagattctttgtagccaataattttgaagtgatagatgatcatgatctcagtttaatggctatttgtgggtcaaaggtcatgttttggttgatttgaaactagctcttagccttctttgcagataattagctactgttgtatttgccttgcccatttcaaactctttaggcataatcatgaagctgtttaatgattgtggtcactcttaaacgtcgaatactcttaaccactgaggataaaaaattatctcgacaagttttcaagctgtctagtggcctacactttgttctgctagttgaaaaaatggtttagtcgacggttaatagcataaataaagagtggtgaaaaatacagtttagagatttatcatctgattctatgttgcgtgttttatcttggtaataaactttggactaggaaggaacgtaggtgtctctgttccgttattggctcctttggttatttacttacttcctctgtttgtgattctctctgttccatgcattgtagttacccacatagcatagacttaactatcttttgttgagcttttatcgttatgtgcaacgaatgagtttattttggtgtttatggttgttggttttggcattcatattcttgctggtacctgatatttgttatttcattttaattttaaggtgtttcgaaactgaatatatatttattccaaaccatgtttaatcgacttgagtatgatgcatctgtttgatttctactttttactaagaagtggaattaactagaacttgttttttttaatcaataaatgaaggtactatgaattgaaaccagatgatccaccgtatgctgccaagttctatgattgttgcggggcagaggatcctaatgcaccaggttgtgtcacaaaccctcacatttcatatgatgactgatgtatgagtgagagctctcataagcctttttttttccataaaaacatcatgtaaataatcttaaattattgtagccttcttaggagtaaaagacttagcttgtgatctctctgctgggtactgtcttgaaccacttcttgcattgcacacagctacagagtgagctgttgtgttacagcttttgtcggttttgtgaataggagtgtcagaatcatttgacgtgagaaaattccggaacgactaacgattttatgtttatttgtaaggaatgttcttgtttctatggttgctttaaaaagagtcaaaactttatattctttttatgaacaccaacaacaaaaatctaaatcagacatataggttaattaactaatgcaagtaaatgtggaaaaatttacaaaacaaatttcagaagatctagaagtaatcttgagacagtacttatgagaaataatcttgcactatcatccctcttttctatgaacaccaagatttctgatgcacttataatttcttattttgtgtcaacaatagatatccaaacaaaggtagagaaaacatttgaatgtggacaaattataattatattaataaattgactgtctttaaagtttaaactaagtttagcagatctcattaagagaaaaaaaaaatcaacatgattgagtagagcacatgaagtccacatgacacaactccaagatctcaaactctctggtcttaaatcagatcgttagagagatttattctcacctccattattaaataaagccaacttgttttggtccacttcactcacagcttttattattcttcttttttcttttgtcatcataatatattactccccaaaaaaaaaaaaagcaaaagcggtgagaaagaaaggagagagagagggtgaccactatggagacagcgcaacccattactcattattagtctctcctaccattcttttgcctaaagttcaagactttgtgttcttctaacaagacccttaatcgtaagttcaagactttgtgctgttgtagtcctgtaagaagaagaagaagaagaccatgaaatcgatctgacttctcgcagcaatgctgaggatttagctgcatttattactctttttttgtcaattcaatttctcttttctttgaagctcttctcttgcaacaacaatggcatctagaaccaagtgagtacttttagtctttcttctactttcattacaagtggatctgatatgattcttgattttgacagttggatctgtttcttgtgatgaattgttgagttgatcattttaatcctaatttgattggaatgtagttgatttagtctagtaaatgtaactgaattgatttgagtctagtaaatgttttgacttttgggaacttagttgatttagtcaggtgaaaagttatgatttttagcaacttaattactcttgttttggtaaaataatgttagatccacaaatttaaaacttttttttattgatgtttagtgtaacattgtcttgattcatgtttactgtagaactggtttgatggagactcctcgtagtaaaccatcaccaccacctcctagactgagtaaactctctgcttctaaatccgatagcaattcggcttccccggtgccaaatactcgtctttcgcttgaccgttctcctccaaccgttaactcaaagcctactcctgaccgtcgaccttctaggattcctacacccgaggcaagatactgaactctctccaactgatatatgaatctttttttggttttcattagctttaaaagacattgatgatgaccatattctttgacattttcagaaagtgcattcgcggttggtaaaaggaacggagctgcagacacaactgaatcaaattcaggaggatttaaagaaagctgatgagcaaatagaattgctcaagaaagataaagctaaagctatagatgatcttaaagaatccgaaaaacttgttgaagaagccaatgagaaacttaaagaagcattggcagcacagaaacgagctgaggagagtttcgaggttgagaaattccgagctgttgaactggaacaggctggacttgaagctgttcagaaaaaggacgtaacttcaaagaacgagctagagtctattagaagtcagcatgcgttggatatctcagctctcctctccaccacagaagaactccagagggtaaaacatgaattgtctatgaccgctgatgctaaaaacaaggcgcttagccatgctgaggaagcgacgaagattgctgaaattcatgctgagaaagctgagattcttgcttctgaattagggcggttaaaggcattgctcggttcaaaggaagaaaaggaagctattgaaggtaatgagatagtgtctaaactgaagtctgagattgaattgttgagaggggagcttgaaaaagttagtatccttgagagtagtctgaaagagcaagaaggattagttgaacagcttaaagttgatcttgaagctgctaaaatggctgaatcttgcactaatagctcagtagaagaatggaagaacaaggttcatgaacttgaaaaagaagttgaagaatcaaatagatcgaagtcatctgcttcggagtctatggaatcagttatgaaacagcttgctgaattaaatcatgtgctgcatgagacaaagtcagataatgctgcacaaaaggaaaagattgagttgctagagaaaacaatcgaagcacagagaacggatcttgaggaatatggacgccaggtttgcattgcaaaagaagaagcttctaagctggaaaatcttgttgaatcaataaaatctgagcttgaaatctcccaagaggaaaaaactagggccttggacaatgaaaaggctgcaacatcaaatattcagaatctattggatcaaaggacagaactttcgatagagttggaacgatgtaaggtggaagaagagaagagcaagaaagatatggagagcttgacgttggctttgcaggaagcttctactgaatcaagtgaagcgaaggcgacgttgttggtatgtcaagaggagctcaagaactgtgaatcccaggttgacagtttgaagttggcttcaaaggagacaaacgaaaagtatgagaaaatgcttgaggatgctagaaatgaaatagatagtctaaaaagtactgtagatagtatccagaacgagtttgagaactctaaggctgggtgggaacagaaagaacttcatctgatgggttgtgtgaagaaatcagaagaagaaaattcgtcttcgcaggaagaagtaagcaggcttgtgaatttactcaaagaaagcgaagaagatgcatgtgcgagaaaggaagaagaagccagtcttaaaaataatctcaaagtagctgagggggaggtaaagtatctgcaggaaacacttggagaagcaaaagctgaaagcatgaaactgaaagagagcttgttggacaaagaagaagacctaaagaatgtcacggcagaaatcagcagcctcagagaatgggaaggttctgtacttgagaaaatcgaggagttgtcaaaggtaaaggaaagcttggttgataaagaaaccaagctgcagagcattactcaagaagctgaggagctgaaaggaagggaggctgctcatatgaagcagattgaggagttgtcaacggcgaatgcaagcttggttgatgaagcaaccaaattacagagcattgttcaagaaagtgaagatctcaaagaaaaggaagctggttatcttaagaagattgaggagttatcagtagcaaatgagagtctggctgataacgtaacggatctgcaaagcattgttcaagaaagtaaggatctcaaagaaagggaggttgcgtatcttaagaagatcgaggagttgtcagtggcaaatgagagcttggttgataaagagaccaaactgcagcacattgatcaagaggctgaggagctcagaggaagggaggcttctcatttgaagaagattgaagagttgtcaaaggaaaatgagaacttggttgataatgtagccaatatgcaaaacattgctgaagaaagtaaggatctcagagaaagggaggttgcttatcttaagaagattgacgaattgtcaacggcaaatgggaccttggctgataacgtaaccaatctgcagaacatatctgaagaaaataaggagctcagagaaagagagactacattacttaagaaggcagaggagttgtcagaattgaatgaaagcttagtcgataaagcgagcaaattgcaaacagttgttcaggaaaatgaggaattgagagaaagagagactgcttatcttaaaaagattgaggagttgtcaaagttgcatgaaatcttatctgatcaagaaaccaaactccagatttctaatcatgaaaaagaggagctcaaagaaagggagactgcttatcttaagaagattgaggagttgtcaaaggtgcaagaggatcttcttaacaaagaaaatgagctgcatggtatggtcgtggagattgaggaccttagatccaaggactctctagcccaaaagaagatagaagagttatcaaattttaatgcaagtttgctcattaaagagaatgagttacaggctgttgtctgcgaaaatgaggaactgaagtccaagcaggtttcaacactaaagacgatagacgagctgtcagatctgaaacaaagtttgattcacaaagaaaaggagctgcaggctgccattgttgaaaatgagaagctcaaggctgaagcagccttgtccctccagaggattgaagagttgacaaatcttaaacagactttgattgataagcagaacgaactccagggtgtctttcatgaaaacgaggagcttaaggccaaggaggcttcgtctttgaaaaagattgatgagttgttacatcttgagcaaagttggcttgaaaaggagagtgagtttcaaagagttactcaagaaaacctagagctaaaaacgcaggatgctttagcagcaaagaaaatagaggagttgtcgaagctgaaagagagtttacttgaaaaagaaaccgagctaaaatgcagggaagctgctgcccttgagaaaatggaagaaccatcaaagcatgggaacagtgagctaaacagcatcggaaaagattatgacttggttcagttttctgaagtaaacggtgctagtaatggtgacgaaaagacaaagactgatcattatcaacagagaagcagagaacatatgatacaagaaagtccaatggaagcaattgataaacatttgatgggtgaaagagcagcaattcataaggtagcgcacagagttgaaggagaaagaaatgtagagaaagagtctgaattcaagatgtgggatagctacaagatagaaaaaagcgaagtatctccagagagagagaccgagctcgactctgtggaagaggaagttgattcgaaagcagaaagtagtgagaacatggatcagtacagcaatggcttttctttaacagaccacactgaagattccggaaatctgctcttaaaggaacaacatatgaagaagaagaaacctttgctccggaaattcggaaacctgcttaaaaagaagagtacaagcagcagcagtcaaaagtagaggaagattatctctttgcacctgggcttttcttggttttcttgaaatttcttacgagtatagctctatatatttgatctatgctttctggttaccaagatttagattgtctatgacattagacactgccctttgatcttgttcccttattgtttatttctctgtttcatgaagttgtttttagcaaagattgaacatttcattcattatctgcatatgattctgtatagaagctgagttgcttattaagaagaatcgttgttttcttgttattctaacatttcttttgaagtgtatatgtcctaaacaccacgaagcttcgaatctgaaacgttttcatgcaaggctttgtagcatgtactatacgaagaaaacatttccataaagaggtcaatactcttgagaataacataagcttacttcagtcatggacaatgtaattgttacaataaacattgacaacttcctctgctgcatgctaataagctcacttcatagttaggcacttagtgaaatggagacaagcgacgatagcttgaatttcttcatctttgtggagtctcgtggctgaaacagaacctcagtgctcgacctgacagtcacttctttcgactctgcccctgaactgccttcacttctgtagtccctatacgaatacagaacctgcaacctcgaaggagctgcaacccaaatcattttttttattaattacatagctcatttgtaaatgtaaacacaatcgcgaacgcaaacaaataatcaaggtctaaagagaatttacctaatccaaacatgcttgttttctgaatagagacacggtcgacttttgaccttttgatatttcttaaagccagggtatcttcctgctttcctttaaactcgaggaattc

SEQ ID NO: 115 - DNA, 26534 bp, Arabidopsis thaliana
aatcattttttttattaattacatagctcatttgtaaatgtaaacacaatcgcgaacgcaaacaaataatcaaggtctaaagagaatttacctaatccaaacatgcttgttttctgaatagagacacggtcgacttttgaccttttgatatttcttaaagccagggtatcttcctgctttcctttaaactcgaggaattcccctaacacaattttgctacttttaagctccactctgcagcataatcaacttttaatgaaaactctttgaacagaactacttcatcaagggttcaagagatgagatgtatgaccaactcagacaatttttaaattgaacgtcaataaagatgagatgtatgacctatcccacgttggtgctgtgccaaggatgaaattaagtttttgatgcgaagattcctgcatctcttttccggtgctgaatgcgcctttaacccaaccagaaattttactttttgatactggttttagctgttgccaatcttcataggtaattacctcactcgggaatgcatgaattgtactgaaaaaaaacaaaaagaaaacatatatttatgcaccagtaggaaaataaagaatgtctttacagaccaagatagccacgcccatgcacgcactacaagatgtcctgtacttcaaattgattgcttttttgtctacctcttgcaagcaggaagatactgacggtagcaaggataacgataacataccgaaaacttggattgggaatgacaactttgcaagacacatttccttctagtaaagtaactcccctctgttcaagatatgattcaagaactgaagcttgtttcttgacctccgccagctgagaaaacacacatccattagtcataaacaagattgcatagatgcaagatgcaggtcaactttcctaagtcgataaaaatacaggagatttgatcaagagacttgaaatgaaacgtgtaagaacgatccaggagaaaagaaaggataaccaagcacattcgtataaataacaagaatattctgtttcataatctactcaagcgacaatcatactctctactttgccaaaacatatacacatttacaattcgatggagaccttacataaaatgaacatatccaattcactgtggtcgtgcaaagagaaaaaccctataagcctctagaagtaaatcatcagtgctattttctcacaatgacataattatgcaacaaggagatagcagcagagttccaatatatgtatcctttacaatctagaacagaaaattatagagaatcactcacaagcactaaaacgacactctaataacttggatgttcaaactataagcattgtgtgtaatcacaaagaatcaaacaaaacttacaggatcagggaaagtctcagtagtatgatgcttgccaccttcacaaacccagctaccatcactagttaccgtaacaatccccgatagattcttcacagaaatcactacaacatctcctttagtaacaagaacaacatcaatgtcttgtctagaagcagtgtcggcatctggaattcgaagtcctacataagcttttccaccataaagtttctcaagtctgcaataacaaatggaaatcagaatcaatttcagtggaaatcgagaatcgaaaaatggagtatggggaaaatcgggaacctgtgagcaacggagaagagagcagtggaatcggaagtttcgacgtcggagaattcgtcgtcgtagaagaaacggcggacgagtttgtagatgacgagaccgcagatgatttcaatccacatcgtttgcttcgtcttgttgttgaaatttgggaattggaggattgagagaaaagagacgattcttggaaattaagaaaaaagaaaaaaccccagctgaagtaaacgaacaacaaagatgctaaaaactaacacaaaaaagtcggttcaatcgagccataaaccacaaaactaaccggttttggtatccggtttaatttacaaaacagtcttcctcttcaataaaaacctaaaaccctaattattttcaatcagacttccactttcgaaacctctcaccgaagctacaatgagtatcatcgcaggctcctacgagagattcatttggggtttcaagcttaaacccacgaagcacgacgccgaatctcaaaccctaactctctcccctctcttctcctacccttcccacatctccccaatcaccaccgtcgcttgttccggtcccgccgcagcttccggcggctccgacgatacaatccacctctacgaccttccctccgcttcttccctcggctctctccttgaccacaatcacgcagcttcaatcaccgctctctccttctacacaccttcttcactctccttccctcgtaatctaatctccgccgccgcagatggctccgttgctatattcgatactgatccttttgttttgcttaagtcgtttcgtcctcataagaaagcggttaatgatttagcgattcatccttcagggaagcttgctttagctgtttatcgtgatgagttctttgcgatgttgaatttagttagaggaaagaggagtttttgttgtaggttaggtcatgaagctagtcttgtgaaatttgatcctagtggtgaaaggttttacatggttgtgagtaataaagttggagttcatcagtctgaagatgctaagcttcttcttgagctcgagaatccgagccgcaagcgtattctctgtgctactcctggagaggttgtgtttcttactctttggaacccacaattgtaactttagtctcttaattggaacatttggcatgttcaaactattgtctgtgagtaactttgagattgttggcttgttgttgagtattggtttactaagctttctctgtgagtaactttgagattcttagcttgttgtgtattggttttgctttgattgctgattaaattgttctagagctgcgtgatttggtttgtctcttttaatgcttagtcctatgttacccatgtgtgcatattgcagaagattccaccttggaaccttaaaagaggttaatttaatactatcaaagtatgcaaccctagactctgattactcttttgggaaaagtgttataatcagataaactaaaggttgcttcttttgctcaactgtgtgttcggtttaagtttataaagcctctgagagttatctcgcttaatagagtttctcttccttattgatgcggtgcttgtgttttatttgtggaaatggtgataaatttgatttagaggatttgttctttggcttacaaatgtttgcttaatttgcaacagagtggaactctgttcacaggtggtgaggatcgggctataacagcttgggatacaaatagtgggaagcttgcatattccatagaagatgctcacccagctcgaatcaaaggtattgttgtgcttaccaggaatgatagtgacggctccttggaagatccatacttgattggttctgcatcgtctgatgggatcatacgtgtttgggacgtgcgaatggcggctaaagaaaatacaaaaccattagccgagacaaatactaaatcaaggcttacttgtcttgccgggtcagctcttaaatgtaagtttatttttcagaatgtgtttttctaaaccatacaaagccaataaacaaactcccacaagttgtgacattatggttgttcatctttctctatgtttattcagctatgagacggccacagattggaaagcaggaacctcagaaggtagacgaagagcatgaggactcagaataagagctgatttttagtgtttattgaaaaattgtgagctgacattaattttgatgcaagttttggtagaatccagtagattcttgtcgaattataattataaacattgtcttaaaccatagattttgtgaaagaaacaaacaaaaaaaaaagcattctactaatatcattttacatgagttttcatcaatttggacaatctcacttatgcattgtgttgttcttctcaaacttatcattaatgattattgggatacactgagcaatatgcaaaaacatacgacatgtttgctaaaccatcatcttgtaataccaaaaacatgacaaagatagaaaagagcagcaagtgaagccatatatatccatggatgtgtgacaatgatgactcaatactgagtagagttgttggggattttgccttgtttcaattgagaaagagcatattcaccagtacggatgagatcagcgacattgtgtttcgaaatctcctcagagccaaacaagaagatggtcctaacctcagctttcttcgcaagtcttgaagcataactaagctgcaattttggcgagttaatgctcctaagtaattgtcgatacaaagaaagaacttttcctctgttctttgcagcctcttctgctgttaaccatatcagactcttcatggcttcgtctttaacaaaattggaaacgagaatgtcctgcacatgttcattgagcaattttgtcaaacacttggtgcgcaaagaaccaaaacaccaatgaaaaatcaaatcattaacgttacataacctaagcaatttgatagctaaatgaatcataactaaggaaatgtatatatctaaatctcatatcacaatttgttcagggtttaagtccatttttgagatacaccaacaaaagcaattcaaaccggagaattcagtagtaggaaattcacatacgataggtatccaaaagcataaagaagaaagaagagactcgatgacttgccttcagctgtgagagattttcaccggacggcgatgatccagtgagcgagagtggcggaagcgggaggcgaaggactaaagagtaaatttgctaagttattaattggaaaaggaaaaatttgcattaaaaccctttttggtctgaacaaattgcaaaacaaactttcaactaacctcaaacttaaactttgaccacaagaaataaaaattgtaaaataccctagactaaaatttccatttgattttcagtctcaacactaaatatttacttcttttcaaactttatggttttgcatctttttgcttttttcagctttagttgataagagaagggaacaaacttaaagaaaaactattatagatagagagacaagtgtggtaaggtaaacagaagaccagtttgctacttttaagttccaagcttctatgagacacccaacatttacattttcaaatcctctctatagcaaaaccattcacacaatctgaagtttactcttacttctctctttactccgaaatcctaactcttctttaccacattttgttttttgtttacgcaaatgacctctgatgagaccaccacatttgcgttaatggttcaccactatgcagtatccgcaacggactttcctttcgtatctacagttgtcggtttctccaaaagccgaagttggttcgttaacacctatccagaaaacaatttgataagaaactctgagctgcttctcggaaaaaggtagtttttgtacaaaattctatcgacatacctcgatttgggactcaagaaatcttctttgagcttctacctccgtctgaggaagtaatgaattaccttgagaccttcatatgaacaaatcttagtgttacttctaccatcatagataatggatgataacagaagttagatggaagaaaaattattcaagccaagtctcgggctaacatgacatatgcaggacatccatcacatggatatgttcaggtggaaagaaagacatgtgagagaaactggcaccataatagcttacttaagctacagtgatcatgtctgaatatatttgttatgcaagctatgtgttatttatttgggtatagctttcaaacataccatactagtgtgtttgcagaagatggataaacaatggatctcccatatatagaggctgcagaagcagcggcttgaaacctagcctcgtgcctgctcatattctcactggcagcagcagaaacagaagaaccctgaccatcagaacttgaagtaccggttcctgtatgaagcgtagagcatcgtcattagtcaccatgttaacaaaaaatcaaacgcattcatcttctggacaatctgaagcacataagtcatcatccatactaagaacatcaagagacaaatataattgggagcacagagttcaatatcagcaaaaatatgtctgaatagcaagaccgataccttgctgcagggattcttggtgtggcccacggtttccagaagctgttgatgtagcattctcagctgggacaaccagtgctctgcaagtgggacatgtgttctgtcgttccaaccatgaccgaagacaatgtacatgaaatagatggccacatactaatttcttcgctgaggtcatttcttcacgacatatgatacaagtggcatcatttctgcaaaccccaaataaagaaatgtgattgatctagatatacaagcataattagttttaagaaactgctcaaaagatatttagaatatttggaaacataaatcttgtgggaatatctggaacttacgaactaagttcttcaggagttgcatcaggaaaccgatcattcatattggaagtgattttccgatatcgaaggtaatcagtcacacgaatcttgaagtttctgaacgtttcgtagagctcccgtattagatgcaagggaaggccatagttcctacgcaataaaaaagtgatactcaaattaggatacaaattccaatactatattgccataaattgcataaagactgacgtagtagatctattgttttggctgattattgtttctcatttatgactttcatcgtctacaagtaagaatatatgaaagtactaatgtaaccaagagaagactcatagatggacataagtgtaatgatagaattatgcaagtaactcttgctacaagtatccagcaacaaacactgtataccgataaggcgatagtgagttgtgacatactaatttcagcatgttaataattcaggatttaggtttcttttggtggtataacatctaagtttggaataatgaaaacgtgaataaactaaaaacttacatgaatatcatcaggaagaagcaaagatacatggacaagtgaagcaagtcacgaacaagctccagatagaaagtgtatactggttttccttcccattgaccttccttgagcatatcagtgacatagaaggcatacttcacaataatagaaacagttgttgttgccagaatcatatacctgcaacataaaattcgtaattaagtctaaagctaggctgtatgatgcaaaattcagtaagactaaattgtcagaacaaacagctaaacagggggacatatcacatggtctattgatggcatatccaaagaaggatacataactaaacaatatgcaccgtaaacaaagctaataacatgaataaatatcctgatctcttaatcacctgagcccttcccccatatattcagctattttcgacagatgtttcatgtatcttttgtgtttgatagctggcataagctttaaactaggaggataattaaacaggatcctagaaactaaaacagtatctaagaggcctttaagtaaggttcatagaaaaacacattcacaatagtttcccatatagttagttcttcctgacaccaaaagagctcaaacaaacatcagagttattattcacaatagtaatagttcccatatttttacttgtatatagagatttaaaacatactagctatccaaatatagggctacaatgatatctaaaccgaaaggtcagttatcgtagaccaaataaaatcctgaaagatgatttattagagatccttctcctatgtaactcagctacgtcaaattcacaagttttggcaggtgcaaaaactttcaaacatttcaaaattcagcccaaattcttggcagccaaaacaacctaacgctctgaaaacatgtaaatgcgcgtatatccttcataaattttcaactctataagaatcctagcccgtcttagtaacatcaacccaacaaaaaaagtttgattccatgaaaataagtaagaggtaaaagacacttactcaaacgtgaagaagactgacattgaagctttacgtgactgaatcaattgctgtatagaactatacgtaaggagacaatctaagataaggaggaaaaccataaaagaaactatacggacatgagagagcaaagtcacagaaggagtagtctcaatatactccactctcttttgagccatccaatgcaaacccttaatcaacaaaagagtcacaaccaaagagataaacccaacagagaaatcttgtctaaaaatagtaatagcaaagagaatctccatcagttctctccaagcttgctcattcaaacgctcaacttcagcttctctaagagaacccaaaaacacaattttgacaagattccataaactcaacattaataccaaacccatgttcaaaagaactaccaaattgatcttagacgttgatagatacacagtcgctgggtaaaattgacctctgctactaaaagcatgatatatcacaaccaatgtcgcgagagtactcagacccgcgtaaacctttagctgaatcattgtccttcaagctccttcaacaataggatcataaaagaggaaagaacattataaaaatccaaaactttaatctcattgatcaatgatcaatgtaaactacaaaatccataacccagaaattgtttcaatcaaataacttacaggagagaagaaatcaggagctagcaggagaagatgataattcagagtcgtgtataggtagaagaagagatataatgattaaagccttaagctttccgttaaggaaatgagaaatcacgaacgaagagggaggaggaagaagaaaagctctcttagaaattcgtctgcgtaagcgcaaccaatgatataacgacacgtgtataagagttttgttttttggacaaagacacgtgtagaagagttagacatatcaatcacgagttaatttggcccaattagatttgaaatctttaaagcccaactatttctttgtctagggggttcttcactatcgacgaaaatgctttaggccttggaaaaacacgacccgaagatcatatccgaaaaatactcgatagaaacccattcgagtcttttgtatagaaatttttattttgacccttctaatatgtcctgtagcatttgatttttaagtgaatctctaattcactctaatatgtcctatagcattggtgttaccttaatagatgaaaaatgcaaaagttcaatcataacaagatttcatgaactttaatcaaccaaaaacaatgatataccaaaagcaaaaattaaataactaaagatcattaataaacgcatgaaaagtcatacagacatacaatagtcagacatgcatggtagataaatacatagatagagcgttaacttcacattcaattttacgcataaaacagagtagtcctagactttagagtagtagacatggcatggtagatatcctaaaagaagggatggtttttatgggagttttcaatttcacattcgatctctacctccaaagtcccttcacggtccaagtaagccccctcaattttatcgaaagacatggattgaggaagacccatctctttgttcgagttcatgatccaacctttaactacaaaaacaagaaatgtatgttaaaggagtaagacatttgacatcacaagttaagaacgtctattgaaaatgtcatcagctcctaatttatcccatgcgaaatcgtaacatcaatagtttttgacttacgccatcctttaaggtgattggatccacgcggcctgcaggttcactcgcacgaaaatcagctcacccttggataaagtttccccgtcagctaaatgcaaatgctgggataacttgtcatctgcctcagagtccccctttggatacaactttagagtcctttgaaacataagtacataaccatccacttgttagcaagttaccactattgcacacatacaacaatatctatcagaacaaaaaaaactcaccaatctttttctcccatgtgaaaggttttggatacgcaatcattctgttctaggagagcgaaatcacgaatactccaagagaatttgtgaaaagggagaacttcaccaaaagaggcgggttgtgaaacaatcttgacaagataaatccctttgcacggtctttgagtgtttcaaccggaagaacttgtgacaatccccaaaccgtttttgaggaattgaacctcttaacttcaacatctacatgtcaacatgtatcaacacatattagagcttcattcttatatatatacagagaaagagatagataataagggtaagaggaaacgaaccttgaatagagaggtacctcttctcttcttcgctaaagacaaagaaagtgagatagacaaacacatcaatgggtggtgttgtcgatgagaggcattccacatacattgaaacaaagccccttccattgtcagcttcgtttcctttcgggtaaacaaccaatctcctgatttttacaaaaaaggcaatatttcttagtaatatatgttgcagtgaagaaagatgtgaactttagctaagaaagatgtaaacttcatgatgtaaactttagtgaagaaatatgtaaacttcatgatgtaaactttagtgaagaaagatgtaaactttagcgaagaaatatgtgaactttggcgaagaaagatgtgaactttagctaagaaaaagatcacataccagttgtgtccaccggacgagaaaggaggggattcgtatttgtcgttagcaagctgagagagtctgacaagagaagaagaaggagggttccttctccaagttttcaacattgcagaatctgatgcctttgaacccattttctctacacaatatgttgcaacgctagagagcaaaacaaaacatacccataatcagaaaagatccgacaaaaatcgagttacatgaactaaatgtgatacacaagggaccgtttttatagaattctcagatattgaaaatgacacagagagttatagaaagttttgtgctttattctcttgaaagactaaacaagtggaaatctagagaaggaatcgaccaacctgagacaacgagagagacttaagagatttcttgggcacttaatattagatctagggtttagataggatttatatagagaagttttaagagttgcacaaaacataaaataaattaaattaatgtgttcgaatgggcctaaagctacaaagctggcctggtttgtttttaaattgttggtttgatggacattttcgatatctccaaaaaggattttgattactatatctgctttactttattttttctgaactgagattggatgactatagtctaatatcaatatatcattctggtttggttactaactggatctgaaattgaagtttagcaacattcttttggttcgggtatagataagaaaactgtgtgaatgatatcatgatttgtattaaacctgaaatttaagcatgatagctgactcttaaatatatattatatatataatttaaacgatggaacttttgttcagagagattatcatttaatttgtattttattaaattgttttcgtatattctagagcaattctcatttaataccatcaactgagttttagcaagcatttcttttgtgcaacgagttttagcaaaccatattgaatttagccgtttgtatacaacttttatttttcttctaaggcccggttgttgttgttttttttaaacggtggtcggtaattccttcaacggttgtcaagcttctgatgctctgaaacaatcttgaagcttgttttgcaccatttgtggttttcagtgcccaaaaaactataaaaactcagaaactacaaatatacttggaaaataatattagaatcattaaaaccacacaaatacttattaaaatcctataaaaccccatggctgaaatagataagcaatattattaaagtggtcacattatcggacaaacattggtcatattatacataaccttctttcaagatttcaatggtgtaagtttaatgtgtcgatatgatgcctcgagaaaactctccagctcaagtgagaagccatgcgcaaaattggggatctataaataaaatgtttatggtaagttacactttttctcatagagttcaaattgtcattatgtcaatttaattactgaaaaagattgagatggtatagtgttctgaaacaagactttatatctctccacaaattttgaaaaaactagaatatcatatcaccatcgataatcgctatagtcgtagagaaacaattcatatgtctctttatttattacgtttcatatatgtctgtttttatagatgattttttttaatcattctctaactttcataaagaaaacaaaaatcattgaaataaactgatccaaaataattcagtatcttaagcatactcttagtgtccaacatctattgcgtcaaaggatcttaaaaaataaaagagacacaaagcattgtggatacaaatgaacgtttaaatcatcaatggaatatattaaaaagaactacattcaacaaagcttagctttgaggtcctttcttagtatttttcccgaaggagatttaggaatggaagcaacaaagaagaccttgtgcaatctcttatagaacaccacctaacaatgcaagtaaacaagcacatactcaatattaaaacaaatggtatttaattaaccaaataaaacgaaagaaagatttgtacctgtttggcaacatattctttaacatcttcttcagtgatatcatttccatttgatcgcaccacgaaagccaccggaacttccccagcgacttcatcattttgcctgaacatgtcaaagaagggttaaagaaaacggtaccgtttatacactagcttaccactcaatatgcatatgttagtgtgaaagtacttacggaacaacagctgcatcggcaattgaatggtgattgattagcaaactctctagctcagctggagggacctgttctttcacatctcatcatcatcataccgcgatttcgaaatgatcttatcttttgaactaagtaatagtattatatcattaattttctatatcattatgtaaatcttttttaggtgtaaacacttgttaaaaataaaaagaacaatgaatatgaatggacttgcctgaaagcctttgaacttgatgacttctttaagtcgatcaacaatgaaaatctcatcatcttcatcaacatatccaatgtctcctgtgtgaagccaaccttcttcgtctattgttgctgaagtggcttctggatcgttcaagtactctgcgagccatatgttattagttgaaaagtttattcatagtcaacacttaattaattagtcgaaattgcgctactatgtacttaatctttattttgttttgttttctaaaattgactccccaagatttatttactaggaattatgaagaagacatgtcacgtgtgtgaacacgtaaatgacgtaaataatatgcatgtcgtataaatgtacatgtgatgcaaacctaataaaatgctatataattgaaaataaaaatgatatcaccacaaaaatatttttgaaaatatttttgttcacgttgtaagagttgataatttgcattcaatatatttttctctgatgcttgcaaattgcaaattaaaatattattaatatataaatatatatattttctcaaaccaccacaaaaaattaattttttattgttccttaaacttattgtagtctttcagattatattagatactctataatgtcatttttcattgaaagagtattaaagctttcattgtcacaacttttaaatgtcctcaaaagtgtttaaagagataaaacaaaaacgaacctttcatgatctgttgaccgcggatacaaatctcaccaggttggttgtatccaagagagagacgtgtctcaaggtgaaccactttaagctctgcgtttcggaccacagtcccacatgaacctgattttgtcggtatcggttctttagcgaacccaaggctcattgacaacactggtcctgcctccgtcataccatatccctgttttttatataatccactcgttactacctctctaattacacttttggcaagtactaattcgcaaagattaaattattagactatacgaggttgctgcaacaaaatataatacggattccctatatatatagaaaaaaagaagaataaatactttaggttacatatcttttctgaatatttttttttaaaatttaattctaggttacatagactttgacagtgtagaaatgtttttatatattaactcttgatgatcctttgatgtgtgtgtgtgtgtgtgtgtttttaagcaaacgagatgttgtggctagatgcacccaataatgattccatctcacgatgtctaagtttccaacctagtaatcttcttgtaataggagttaattgggcttatcctaagttatcaaaataaaatagaaacagagaacaaaaaaacaacgaaaacgaaaacgatgtgtgttaagtgtgtgtgaacgcaaacgtgaccacgtcacatacagtgtttttttctttctactctagttttttggtttggcaacacaaagagttttgataactcgagacccgcatctacttttttctccattgaataaagtagttagcaaataaactaattaatgtataacaatattcttcgtttaagattttcaatgtttattataatatcttataaatgtcgtaaaatgtaaacaatactttatttaacctggaagaaaatactttaacttctcttatcaataatctttgagaaaaaagctttcaaaattcaagttttaaatgaaaaataaacgtagaaaagactctaaaagagaagttaagaagaggttggaaatgtatactaatgcaacaaaagaactccaatatgaaacatttaagttacttaaagtggaattgaatattattagaaaaagagtgaaattgatgtgaaataaagtcaaatgaattagatgcagtatcctttgtagttgcgacctaaatcatatccgtttctaatttttggtccaagtcaaaacctaaactacaacaaaattttcattaattaaaatatataaacaaataataagattagaaaagaaaaagataatgcaatgcgaaattagcttgagaacaaatagttggaccgtacgtaaccagaactatgccgaatagatagacgtaactcactcttcactctcttcccgtgcattctcctctcatttttattttattttttagcaaaaattattcaaatctttaatttattcatttttcatcaaaattattaaagaatgataattcagtaataaataataaaattgagttaagatttttaaatcgttcccgctaaattagtaatgtaaattcaaatagtaagggtctcaaaacagagtaaaaaataagcagagatagagataagacctggccaaggatggcttgagggagacggcgacgaagactatcttgaagttctttacctaaaggagctgcaccggaaagaacgaatctaacggaggagagatcataagaattaaccgtcgggtttttagctagagcgatcactagcggcggtacaagcgccgctattgtcactctatgtctttgaataagatccaataacgcaccgatctcaaacttatgcattaaaagaaccgtggcgcctattaaaggagtgttttaaaagttaggtaacacattaaagattatgtaatgaggaatgcgacgtcgtttaattaccggatcggagtgaattgaggaggacgctattgagagagtagatatggaaaagtggtaaaacgcagagtatgacgtcgtttgatttgaggtaaagatttgggttatctccatctacttgttgtgcaacgcttgtgattaagctcttgtgtgtcaaaacaactccttttggtaaccctgttgttcccgatgagaatggtaacgccgccgcatcgtcaccgccgatatcgacggtttcttgaaatgggtttgtttcgtcgtcggtgatgagtgtcgagaatggtagacaattctccggtgttggttcatcggtagtgatcagcgtgaggttttctccgaggtttttaagtttatcgacgtattgagagtgagtgattatgagtttggctccggaagatttaagctgtttataaagctcttgagaagtgtagaaagggtttgcggtggttgagacggctccgatcatggaagcacccatgaaggagaaaacgaactcggctgagttttggagaaggatcatgatgacgtcaccttttctgatacctaacttgtataacccggaagcgactctccgacagattaggtgtgtttcgccgtaggtgtagcttttcccggtggagccaacgatgagacaaggcttgtcggaaacagatgagagtttttcgaagcagtaagtgtggagagggaggtggttagggatgtcaatgtccggaagctttgaccggaaaatgcgaggcgtaggaggagaatgaggaagcacatcatcggagacgacggatgtatcggttggtttgtgaatctgaggttcgtgtagagctgcagtgatcattttgatgtaaatgaacaagtgttttttttttttttttttgagaagaaagaagaatgtgaatgtgtttgtttgattatactctctttgagtttttagaaatgaatatatgtaaataatatatagaaatgtgcgtgtttaggtggtgatgaaagaagagttttgtataatataaaataaaaatacgacaaaagtgaagaaataaatgtgtggggagagggagatcaaggagaagaaattggggtaggtagagggaatggctgttagaagaggaacggagggtcgttttggtttggtaggtttcatattttcctttatactctcttgcatgtctattttttatttgtatttatttaatttcttaaaactgaaattctgttaaatatattgcgtatataaatatcaagctaccaaatttcttttacgaaataaattaatattatacaaaatcgacacatcactaagtcgcatgttatgattttaatattttgttttatacgaacaaaaatataaaaataactactatatcaaatagttttataggtaatattaaggaatagctaaatgaaacacaaagattaagcaaatatagagagaaagatttttcttaaaatagtcatagactcacgttgttagaagaaatgaaataacataaccatcattcgtttttgcgaaatcaatagtatgcgagatagtttcataaaaattttcaaaatagtatgtaacatttaaattcacatgttgtacttaattaaaagacatgatatttgaaaaacttaaagaatttgtaaagaaaaacattggtagtgtttttatttttttaaacatagttatgaaaattttaacccgaatagaatttttcaaaaattgaaacggtccaaactcgtttcggttcggctctaataccacttgtaacgtttcatccgccaccaaacttgaagatatccgaataattatgatcgtttaatttcttttgttatgaaaaatggattcctttgttccttgaaataattcattgttgttaactttgaaagattttgtcaagttgtgaaagtgcaagttccttgagataatctattggtgtaactttgaaaaagtttgttaagttttgaaagtggaagcttcctctctgtatatacctacgtttgcttcattgtaaaaatataggacaaaggaaaaagtaaaaacacaagtcttgagtgctcctttactcttctctctcgttcctatacatctatacatatgtatccaaactcccttttttttgaaaatctaaacaccaagcctctgtttttgtgttcaattagtttcgcaagtaccaacgaagtgttgtagccacagctgtgcaagaaagggaagaacacaatcgtattcgcacaactcctacgagggttctccagggactcgtgccgtgtgttatcctcgaaagccatgaagtttgtggaaaagtagaattactatatttttctgtacaatatcaataactatactttagacaacttcttgtacatttgaacgttgattcacgatcgaaactagttagtggaccacactttgaagaagatttacaaagaatgtgtttgagagatatatcatttaatgtaagcaactgtacatccatggttcataggatttgcctgttcataccttgagacacgagtgttctttcttaacctctcaagcactagctcctttataatgcctgcccccattccatgaataataaataggatcgagcccgagtctcttcccgagatggccatgtctagctggtgaaccgcttcttccgcccgcattcctcttagatccaatgtgttctttgacgtttgaatccgcactggttcgctttgcatttgcaacacactgcctagctctttcatgtttatctgtgcaattatcaggcaccacaaagaactgatgttataactcaaatcaacatattactatcaaaatcacaaattttcaaatagcctataaactataaactataaactttcaactttattactatttattatgacataccaatatggttaggtttcataatgagatactgcaagaatgggacctgaaaagtcttaagtcagagaatgatgtatacctgtctcttcgaacgtagagaacgattggatgtttggctacttgtgctacgaggaaggggctttatgtcctttttctttatgcgtactcttatcttaccatgctggactagaactgtatcatcatcatctccaggttcttcaaccacagtacctaacttatctcccagtccagttacaagaactttttcaccagcttgtggtgagtagtcactgtattcttcttctaaggaatcaggatccataggacagcaagcttcaataatctctgcaactgcctcttcggttttcaggattaaggaattgtattgatcagcttgagtgatttctagttgactttcaaattcagccaccagtctctccatctttgacttagcagagtttagatcttcttgcaccttttgcgtttcttttttcagaagagccctctcacgtttatcaagatcatgcgactcatgctcaagcttcaggaaaaatcaagaacagaaacatacattacaagagattaataatatcaataaaacaacattcttaaatacctcgtggtaaaggttcattaagtctctatgaaaagctgcagtcttagttgcctgaagctttagtttatttctttcttccataagggactgaaagagtgagcctttccgctctacatcctgctcgggattcaatttctccgtccacttatgcgcattctctaatattcttttattgaaaccaatggacttagctactctcaatgcatttgatagaccagtacttccccagagtactcgaaatgtaggctgcaaagtttccatggagaactccattgcagcattttggaatcgaggttcattatccttcaagcgacttaagtcaccgtaatgtgttgatacaactgccacattaacacggtttttaatatactgtaggatgctagtagcaagtgcaaccccttctgaaggatcagttccactacatatttcgtctagtaagacaagtgaattttctgaagcaatgtcaagtatctgtcgtatccgtgagatgtggccactaaaggttgaaagactttgctccaaagactgcaataagaagtttataaaagaaaattctcgcaaatgtaaacctcgataagaagataatcaagacgttagtagctctattatcttgcaaggaattcataaggtaatacctgaggatctccaatgtcagccagaataagatcaaaccaaggcaaccttgggcagttcttagcaggcaaatacatcccggacttggacataagagacaataatcccaatgtctttaacaaagcggtctttcctcctgtgtttggacccgagatgacgactactttggcactgctttcaactttaatgtctactggcacagggaaaatgtctccaccatttgggctgcctaatactgaaccaagaagtagcgggtgctgcgcagaatcaatgtctacagctaagcccggtgtttttgtgtgttctgaagttacgttgggatagacaccattaatccaatttgcatgtgatgctcttgcaaaagcaatgtcaagttctaatattctatccaacaaatgcaatatctctctctgcgccatcaccacctcagatgtcaaaatgctcaaaatcgccatttcctcagctttctcggagttcgcatgtctcacttccatattattaagctccactgcctctttcggttctataaagcatgttgccctagagctactaacacttaaaacaacaccacctggaagtaaacttttgtgtgtagctctaatagctacacacatccttgatctcctctgcgttatcaaaggcttgttaatccccccagctagaaaaatcttagttgatattttcttcaaaagagaatccaaattctccatgtttctcctccgttcagatcttataatctctaaatcttcactagctctatcaagaatcatagtcatgttgcagtctatacaaaaactaatcttctgctgtaatgtatccttgaaatcacaaccctgtagtatatctacaagtggagtaaccctacaaaataacagaagcaaaagctagaaccataagcatctcaatagcaataagaacatctaataactataactgattcggtagcgtaccacggttcaatcatcttataaacaattcaagaagactaaaaaatttcaaaatgtctacattagaagcagaacacaaacctgttatcactaatggctgcttttcggagtttctgaaacgttgatgtagcagccgttaacgtgcttcgaacggtacagagttctctaacggtaagcaattgaccggacacagcacgctcaacgatatcagacaagtcttggatttcagaaagacctaatcctcgcgatttcatcatctccatagcagctaatgcagctgaggtctcgttaaggagattcctgctttcttccggcgagtttcccaccggaatttcggcgtttttggtggcggaaaggcccatggttgtggaagcgaacggagagagctgattgcagagggcacgccattcgaggacttctagagtttggttttcgactgactgtgagtcgtctgaggaggcggcgcgtataattaacggagaagcgacgcgtaatgatgacggtgaggcggcgcgtgaggatttgagatgaataggcgtcggtatgagttggagtggggaataagtgttcatgcctgtggtgaatgaattatctattatccttttttaatatgtggacaatcggaagtttcacagttcagttaggttctgtccggaacttcagtttgttcgggttaaaggaaattgttccggattgaaccgttttaacaattttgttcggtcaatattctttgataatttcggtttactgggttaaatatcgattttttgtttgtaattttggtttatttttataataatttctgtacatttaacaaacttcggtttggtttagaccaaaaccgattggttcagccttacagaatcaaagcaaactagttcttcagaagtcaaaaacctcttgttgaagtctctgtctgggttttaggcaaaagaaaaaaactggaatggcagtgtggaggagttgtttacgcgcctcctcctctcgtcaccgtttatcttctctcttcttctcccaccacctcaaaccctcctccttcatctcccattctcctcctctcttctctccctcgccgtcaccatctccgacgtgtttctctcctctccaccgattactctcttctggaccagaattcccaattgggtctcaagaaatcatccctaccgatgattcttctttacctgttctcgccgtcgttgatttcctcgaaggctttcatgaattcacaggattgccttggtggatgattattgcatcttctactgttgctgttagattagctttattgcctttactcatacttcaactcaagaaattgaagaccatttcagagctgctaccgaagtgttagtattatttctctactttataagtagtttttataatttgcagtttctttattgataccaaagtcatgacctttctactaggtttagttgtttcaatgttagtcatggaactcgtttacatgtgaaacaataattgacagacatcgctctatggttgtgcaaactatgtgattggttctgtatattcttgtatggtgttgatgaagttaaaagccaatcataatgttcttcatttcttacacagtgcctatgccgatcccagagactccaacgttgaaaggatctattgaccagttttctcattttcttaaagagagtcgagcaattgggtgcccctcctttttgtggttcttcccatacttatctgtccaggtaaaaaacatcttctattgagtgatttgtgattctggtttgtctgtaagattttgtgaaaatctggacaagagcagtcctgctttgttttacgattagagttgacctttttgcagaaagatccatatcgtacatgcttgtatatctgtttactaccttatatgaaactctttcatgtcacttgatccttggctttcttcataaatgatatagtctttttttctatgttgatacatttaataaataggtcacttgtttgcattcattctcactttccctttggctattgttatctgcagctcccatgctttttcttgttgatggctagcatccggaagatgtcactagatggtcaccctggctttgattctgtaagttgagactgcataagaatgacttgtattttttgaccttcttgattgtgatgaggaaagaatccttctttgggatcaagtcaaactcttctcttcccctttcctcgtgggggtttcgttggtcgagttagcatatctgggcatctaagttagctagttgcaattgatgaataataccagtctacatggctgcaatctatgttgacaagggtaggctagttcgacgttttaaggactattatattgaagctagaccttagttgtagaattaaatttaacacctgtatactatgaaaactggtgagcctcgagcatatttgacctgagtctgtcctgtcatatttccttgctgttgcctctgagactgagctgcttcctatctttgcagggtggtgtcttatggttccagaacttgagtgatcttcctggtggctcttttggaccagtcttcccaattttaattgctaccttccattacattaatatacaggttcttgcgaatacttggagcttaaaatatatgttgatgggatcgatattatacttgttactcttacaatttatttgtttttgcagtattgtttccgttgagtattcaaattgcaggtgacagtattatatatgtatgcttctaacttttaaccctttttccagatttcttttgatacatccacaattcgtcaaactaccggcttgactgggctgctcatgagagtgagttgaacaagtcttatctgctgccttggttacttaagtcttacagaattttgttgtatgcttggagtactaattcttttctagcatgaagatatattggtattgttagtgatgttactcatgtccatgtttctgttttgttattaatattagatttcatgcgtccataatctgaagattgtacttgtttttttgtttgtagtattacaagttatatctggagatcttaagcgttcctctgttttttgttggctatgctattccacaggtaagtacaatctctttctgtttttgtgacaccttcttttttcataaaaacagctcagtaaataaaaatatttcttttctttttcagggaagtcttgtctactgggtaaccaacagctcagtaaatatctttcaggtacgctctcttgtctcatttcagaattcgcagtggaagatgtgtttcctttttttatttccctgtattgaggcatgggggatgatggtagttagcttttaattaatcaaatcgttctcttgcttttgtgttgtttctgcaactgaagattaaacaccaaactaaaaatggacagataggttgttcaccgtggcagaatcaacacacctattcgatgagatatgattagtgaatgcacttgttaaatataataggttgaccagtgatttacttctttgattttaaagattcatggtgaaaagaaaaatgtgttagagagttgactttgggtagaggatcctaaaatgtgtaaattcctcactctagaaatctcaactctgcagcaattatctctcaagcaccctactgtaggagcaaaacttggtttactgagtcagggggccactccaggcatgggacattccatggagatcagcgaatctgtgatcaagtatgtggactctgactcaaaagaacagaccctttctctacagactctaacaccagaagaacttctttctgtaagtagtggaaaatgaataactcttttatcatgtctacttgtatgtttcatttcttcttaaatggatttggtgtcagctttcagttcaggtcttgtccaaaggtgataaagaaacatccattcagttgcttcggtgcgtatattccgaagagtttcctcctggtcccttctattctttaattacatgtactagccatgttcactgcatgtgtaattattctttgcagattagctcttgaaaaggatcctggatatgtaagaggtttggttctcatggggcaggcgttgttacagaagacgcagttgtcagaagctactgaatatttagagcttgctatctccaaggttagaatttccggtccattactctttcctgtctttctacgtattagtcctttctgcagtcttgaggtcaaacggatgtggtggttcaatatctatcactcacttttttgtatgtttcacttatcaacttatttatttctctttgtttttgccaacgtatctagttggttctttctgcttattgactcgtgtagtaagattaagagcgtgtgactcttttactaagcagcacagttcgtttgtttctttcttagctccttgatgaggatccatctgatgctgaggatgttgaacttttaatgcttgcatctcagtgggctggtgctgcatacgtacaacaggtttgaccaaccatcattttttgaaaacgatagttatgattatgaaagtagctcaggtcctgaatgtcagtcagtaataactcctttgcttagttccaattttcctaacactaagatactattgttattttgggtctgcaatttgtgaatgtatgtattggcttttacttgtgaattggttggatcttgacattcggtgtttctggcagggaaaactgaaaagcggaatcatacacttggaaagagtagcgaaactgagagaacctggtgatcctaaaagcaaagagcattactttgaggcattgctgcttctttcaaggtactaattttacagcgaacagaagtgtcatcacaatacagagtttaggaaataggtacagaagcatgtatgctactgaactgcgagcaatgtgaaatcataaaaacttttgctgttgcagcgctttgtacaaagaagggcagagtgatgaagctgcaaagattttacgagtagtagtggatcacaatccggcgtacaagcctctgctggaacagtgtgaagatgagaatgagctagttagcgatcttgtcagtcgcagaaaggatcatttctgattttctccacgtgtgcaaaccgcattgtaagtatttgaatactacgagagcgttcaactttcaatagttcataaccttgtaggttagtaatactgtaaatgtgtaatcccattgatgtaatactataaaacattcaaaatagtaaaactaggaccaaaagtggcaacaaaagtacatacaaagttgagattcagtactacacaacacatctcgtgaatctagcacacaaaacacaccatcaaactagtttattccgataacagacatgaggaagcgaagtctaatagtaagatgtgcaatatcataagtgtcctggtttaagcttgagcgaggtggctccactacaccggtgaagacatagagagcctttaactcctctgcacatgtggcactccttgcaacactgtatcctactactttcctcaaagtctccatcgtctcccatagttgctcctcactatacacctgcaaattcaaaaccatacatattcggctcattttgacactagcttctgaaat

SEQ ID NO: 116 - DNA, 53090 bp, Arabidopsis thaliana
aagcttgagcgaggtggctccactacaccggtgaagacatagagagcctttaactcctctgcacatgtggcactccttgcaacactgtatcctactactttcctcaaagtctccatcgtctcccatagttgctcctcactatacacctgcaaattcaaaaccatacatattcggctcattttgacactagcttctgaaatcaaactcaatgcagaacaggtaatctacatcaatgccatgttataataaaagtcatttggatcccccaccacaattttagagatgtgagttaaaaaaatgttactacacgcctaactacgcaatcaactctatcaaaacagcattccaagaggtcacatctcccacacagcttactagatgaccatgtctataactaatggcataaagaaatattagcaatgaacaaacggataagctgccctccacactaagtaacccataacgtgacattttagaaaccggttacctgcacgcccggttttcttctttttcttagttgtgttttttcgtttctcttccccggttccttgtgccccactagcttggtctattggctgaaccattagtcaagatatcagagaatgattttagttatctagaacaattggcactagttaatgagggactgtaacagagttgaacacaaattaccaaaaccatgtggacacttttcttctcttaaacttacagtgaaaattattttttttgaccaatggatcactcaagaagataactcatgttaaccatagaaaagatagcattaacacaaacacaaatgtgtggcaagtatctaatcaatcaccatggattaatctagaggcaggggatattctgttatgttatcattcagctactaactcacaagagataggattaagtataaacctcattagaagatatttcctcatcgtccttgcccgtagaagtttcaatttttgtagccccagtttcccctgcaaaaacaatgaatataagtaaaccatttcacacaaaagaaatgttatatactgatcataaacaaccttcacgtctagtctcaggcgcttcccgcttttcaggctgttcttgaacctcctctgacttagcatttccggactttttatcatcttgtaaagttctctcagaggtttctttgtcagttctaccctcatccctaattttctctagcaagctcgttgactctttcgccatctcctcatcttccttaacctgaatgggaatgggttcttctttacccctgaaaagtgcagcctcaccaactccagccgcgccttcaccgtgaccaatcttgctatactcatcaaatccagattcgtcatcatcctccttgccaactccaccagtttcttcagtatcaggaagcagagtactcatgaccttttgtgtacaagcataattagccaagaagagacaaaacggaaccgaggagaggaaggcaagtgtcgaggcgacaaaaagtgaaggaacaagaagtggagctgaagacactacaacaccagctgtcagaactttcttcccaacacttaccgccttactccaaatccaacttcttttatcttcactctcattagactgatattcctccattgtttgactcatggtactacgtactgttttcaattctgccaagaacaccgggtaaaatgggtttaatctgagctcaaaattaaagaagccaaaaccaacggtccctatgatttttctccatagaaaaaaactgttacatattgagaaaacaactttctgaatcccaagtgaatcacttgttggactcaaaacatatttcgaggaaaaaataacatgcagaccaaaaaaacttcatgcaaccacattcaagaacactatcaaactctacagttccatatctttgaaaaatcaaagatatcctgcaaaatgctttgagggcattttatcttccactataacgaacttaatcagtgtaactgatgaaaacctagtaattttacataggcaaaggacaaggtcgtagttaataagaagaaagaagaaggaaaaacctgtttaggttgcggcaacttcgaaagcaaagaactcattgcagattccagtagcaagaaagagagaataaggaccaagagacggagagagagaaagagaggcaaaacttctgtgtaaacaaattggagaaaaacacaaagaaagacagtgacacgcgtcgaggaaacagaaactgaatattgcatggttttgtgtcgcaacgtgtctcttccgttctttatccactcgctcttagttgtctgttttatgttgagtgaagaagacttgggttttgatcataagctgtgatttgactaaatgatgcgcaaaacaactatgttaccatgagaataagcaggctcaaaactattataaaccttgaaagcaaaacaattgtttgagcctttatgggtttactctttttctttttggtttaacttgtgggttttgctaaataaattatatttaagtcgttttgggtaaatttttttggtagattatattatgaaacgaacatacataaaattttgtatatgggctattttcagttttttcttttcttttcaccattttaataatatatttaagaaactagaaatatttgattgttttagttattgagattaggatttgagggctgtgggaacaatgtgtggcagccacaaggcgacttcttctcaaaagatggcaacaacaacaataatatcaaggaaaactctaaaaagccacctaaatcccaaatcattgatgtcgattttgagcagaaatttattagagggagagagagagactgataaagaagagacgagaatgaagcagaaggctctctattgttgtactaatactcgagtgaagataaaaaaaagtgtttgtatagatgtcactgtgtttttacatgaatgcaaggttttcatattgatattttcttgatattaacttttgccacttgttaggccattgaaatgcttcgtaaaacaaaatctctggccgaacctttctttctccacagaatctgaccacattgttccagttaccaacaacctaagggatcaccaaacatatcaatcatggctcacctatcaaaactcaaattcaactcataaaagagaaagacaactgtttcgtcgtacctcttctgctaaagcttcatgtctgagactgacccaccggttcttcttataagccatgcaaatgtattctccttcaacaacgcaaccaatctgcatttccatattatgagtcggtaacagagaaatacagaaaatgaatagcacaacatttgtgataatgtgtcagattttaccattgacacaagccggtacttaatgtttgattcttctaagccttcgtataccctgctgatatctatctcccagtccaatgcctttgttgtttcagatatatctttttcagtttcattcttcacccattccaacactaatgttgaaaacccacaaaaacagcaacactgttttatcattccacaataatgaagtgagcagataagaacaaaatcatcgtcaaaagttaccaattgtgaagataggcgggcatctacttatagtatggtgaacaaagtttatatctccacagccacctgttttaacatcacatatcattccatctttcatgcggcccattttgaggatgtcctcaaactttatattcccaaaagcacactgcatatataaataaccacagcgcagcattttaagtaccagttgctgtagaaatgaaaaatatagaaaatgaaacataccttcaggtttctgattgaatttgcagccataacaattccataagaactttgctctggataatttggcttccttttgcattttttacaactcattctttcatattccgccaacgtaaaaaggcgagttaccaagctttctctttctggacttttccagcaatgaaaaaactcgagaatcgcgacaactacgtcagcggcatcacttgactgaaaagagtaaaaaattgaatgacatgtaaaactttggaatgacagtcaagctcagcagcttatatttatctgcacaaaccatggaatgaactccttctagggaagcaagtaagttgctcaggaggtaactgtagagtccctcttctgctatctgttccgagacaatagcagaaaatagattttgcagtgcatagggaacttgttcttccaagtttccatgaaatggttgccgattgtgcaccaaatcctcttgaagaaccttaatgtttaagagggcctgcagtagcaaaatttgtcaaggcaaataagtaagcaaagagataccgtctgaaaataacgaatgagctgaattagtagaggagagtcaaggtctttaaatcttatttttgttggtgactgatttaccttaagcgtcatgtcaagagctgaacggtatctggttgcatcttctgacagtgaatcttttgtaggcatgtttttcaaatcttgaagatggcgaatgaaagaaataagaaataagcatctcaaaacataaacaaacaaaaatcgaaaattataaagctctcctttgacctttaatagcttcctcatgattgttagtgttggatgaagtttcctgtcgacccctttcttctggttctatagaatcttcatccaccatttttagtaatgaaactcccggttcaaggttaatagaagattctctggacatattaagaacacgttttgctcagagaaaacctaaaaacaatttataaacttgcaaaaagagtgttgagaaaccaaatttctcatctacagtacttactgtgggtcatcctgatcaagatgactcgacttgcttgctgatgttctctgctacaccatgggacattcattcttacgactgagtaatcaaaatttcatggaagcaaatagagaattttagacattcagcgaccttgttgcttctgtgcttcttcttctttggccctgacttcttctccttccttttcttttcctcggttaaaagttcttcttctaatgcagctaacttggctttggcatccatatctacaattccttccaactcctcctaaaagaagattcatcaattataaggtacatgcgtcaataaaaatatcagatggaagataaaatctctatgaaccaatttgattaaaaaccaacccgcaagaaacgtttcagcaagggaaggatataagagcggtagtcaaaaacagaaagcctgatgaggtcgtttagcaaatgtattcttgaattttcaaccagcaaaatctttgaatcggctagcagaacctgcaagtcaatatagattttaagaaaacaataacggttatttcgttgtaaattaaaacttagatcaggattgaaccttgctagtgaccactgatttcagaaggtcaatggactttaacactatatcatcactgatatttttaagcccatgtataagttccaggcaatcttctgcattagtgaaatcaaatgtcggatgtgatattccttcgagaacatctcgtactgcacacaagtataattctgtaaaaagaggatcttcagtgtctatcgttaactgctcttcacaactgtcgcatagaagagatgcatatatgttcctttgatcttccggaacattcattctactttcatcttcttgtatacataagttcctggcgtcattaagacattcgtcataacataggatctgccacttctttgcatatctggttgccaaagtcctacgcgtgaagtgaatggctctcagaacagccatccttatatcaagattgtgtgccccaatagatctggggaacccaaagctcttatctattaaagaatagtcgtcaagtaaccaagttatgatatcatcgccctgaggatttgtcttggcgtagtgaacattgtgatcacaaacatctattgacccttcatcatcaaatgaagcaatcttgcctctcagcaatctcttatccagaagcataagtgaacacacatggtcaatatcaatcttttctttaacttgagtacgacgccataaactgtccgttgccatggaaatcagttctgtaccatcatccctttcacacttgatgcgtttgagaaggtctagaatttgattaagttcatcacattccaaaaagcagatactctgaggtgtttccactaaacggcactcggtagtaatagtgttctcggaaacttcaaattgtgcgataagatgctgaacaggaaaccgcatcatccagtctcgaatactacaagagagaattttacgctccaacaacaacacaaggagcaatcggatttccttgagtaacttcctgcgctcttcatctgcagctaaaggccagtctttggaccacccattcacatatacaaactctttcacaaactcgagccggttcttgatcatttcagcggcagctagtgcatctacaggttcccaatctgctactgatatcataccagcccagacatcatctatactctgtgccaaatcttctctcacaggtttatattttgcgtcatgaacttgttcaagatgattcttaaactttttaggataaaagaacgtctgtgaacaagtacgacacatccagaatttccattttctgtttatccttgcagagtcaagaacttgctccaaagcatctagtccctctcttccatatactctctcaacataacttctaagctctacagtgctaactttcatgaagttccttttacgctcagcactcatacccgcccaataaagcctcaatcttttagccgcaatggtatgcgagtcactccttatcttgattcttatttcctgtgactccttcagttcggttcagagcttttcacactaaggccatggatgatccttgaccctgtcgtttcgactatatcctcaagtgtacgtttagttttttgctggtccgattttgatgggtcaaaagacataacagatagactcctttttgcaatcttcacggctttcttgtaatacaatgttgagccaagacgttcacccaaatggaagagagaaactgcagcgaatgcttgtaacatgtaatcttccaaatagcattccacagaagccaaaaagaatgcgaatttcaagtcactgttctctgtttttctcgctagtgccatgaagatatgaccttgaaggaaacaaagatctgatggaagcttgagtttcccaccgatcttcaaaatcgaatcttcaattacctccaaggccttgatatgatctccttgttcgtagtaccgttgggcaagtttgcgaggagaagacttcatgattctgttagctttcttgtgttttcttggtctctagggtttgcgaggcgggaaaataaacggaaatgataacgagaagaagaagattttataacgtgtgatccacgtgatagtagatgatgaagcttttatcacgtgagatccacgtgactagagagacgagcagtgagtgggaacccaattcgtggtgtcttcttctcgaacagctctttttacgaagtcccattgaggaattgtgtcgaacaccttgtgggcatcaatgttttgagcaaattacacaatttcttcgattttattgcactttcctggattaaacagatacaaacccagaatttgtgtaaatttatcgaattcgaggatgtagtcttcatgttcggatgatttaaaatggttgatatgtgttgagttttgttatgatccgtcccattggttggtttacgtggcttatgaacaaaaacgatgaaaaattaatattctatgattttaaaattgatattaaaataactgaaaagtgaacttactataggaatttaagagttattatgtattttacaattttacatattattattcgatatgttagttttagcatacttaccataaattcttaataatatactgtaaaataatattaaattttggctagtataaaattaaataaaactcaatagcgataatatttttttagaatctctatataaatatatggtcttattaataaatgtataatattaatacatagttttgtgtttgttttaatgaatcttctttagaactcatcactaatttttcttatatataaaatattatgtcaatatattgcgtattagaataaattgtgagatatttatgaatttctataatatgaagttttcagttttttttgggatgtgaatggattagaaaattataattttgcataggcgaacttcgtaaacaataaacgaccgatcccatcgatttcgtagacttggctccatcgttctttttttctttgttccccaattaatagaacatctaattttatcttgtgttgagttatatttattatgagtgttgttgtcaaaataaataaaaataaactataagtatttgctactaaaggagacgatcaattaatcattttctaagttatgaaatgtggtgttttgtttatgatttcttgtcttctgatcacattccttgttctcagccatgttagaggtaactttcgtttttctttattcgcattatcaattgttttatcttaatggttttgtaatttgacacatctttttgtggttgacataactcaatagaggtggaatccaaaacaaaatggggatgcgacatgaacagaccatttccaggaaagtgtggaactaatggaaaggatacatgcataagcgacatcaaaaaaatgcctggtgcgccaaaagatcttgtcgtacgttgcgaatgttctcaacgttttgtttggaagggttaccctcccgagcgtttatgtaaatgtcaatatgattgttaagctttactatatatatcaccataaccaaaatctttttactataaacaagagagaagctataaagaggttttggtgtcagatttcaataggctcgctattaattatacttctttttaacgtcatgaatgatgatgaatgttacgaattcatgttaaaactcttgcaacaaattaacgatcccattttactacttttggtgtgctttttgcatcataccaagatgtcttatacattttcatgatcgtcgcgattctctcaatcgttggagcaatgtttgaatgctccatataactcttttaagagatatcatttaacatagtaagagatatatatcatttaacatagtgaaaagtagagaaataaacaatgtttacctatatcattctatttgtgaataatgtctcttatggccttatatgagtttcacgttgagtcttattcttcacggttggttttggtgtatatcctaatgaagcttatctcatgctgcattcataggcagtaggaccacttcatagaattgatgcattacgtaaaatgtctcatctaagaaaaacaaaattgcagctacgtttccattggatatggtgagaagatcggaagcagctagctagaacgaataggcgggtgagcggtagtgtacaagacaggtttgttacgcacattagagagtataggaaatgtagaattatactgtttgtaaatgttggttatatatccagtgaattagcttatacgaaatcaacattgtacagtccttacttaaaatgagactttgttttgttcaagaaaaaaaaaatgagactttgttggtgaagtcttttgtaaatggataaacaagtataaaaagaatggtaatgggctttagtatcccacaaaaccatttaacaaggagtttcatgtatcccacatcggaaagctgaaagagtttgtagttgaaacttttatataaatagacttcactcttccttaaagaaattcacgcagccatgtggtgagcacaaagcgaactattctttcgccttttactaaagaataccgtgtgctctccacgctaagtggcatacgcctatttttggagggctctcacgtaacagtgagtcccaacacttaccaaagtctgaatgattattttatgtcgctctattggtctatcaagggctgaagcctgaaggtatatgatttcagcggttcaaaagcttcaaactttgttcagttcttgaaaatcaaagtttgcccagttacagttaatgcatccaggggacattctctccaatatagacaatcttaacccagcaataatcatcttctcatgtttagattgttgaagagaggtagtgacaagaacaacatttgcagtgcttcttccattatacttacaaaacccaaaagaatcaattcggaaacacagacaaagttagagtaagggaatgagtagcaaggaagagatgaatattacagaaactttgtctctgctcacactaccatagctatgctaatccaattggtttcaaagtcactaatacaatgttactctttcttaaacatcatattaacatgtcactgtttatacatgaatggtaggtctcccgtctccatattgatataactatgtcacactatttataagcagcttcatagaaaagaatctctggccgaaccctcctttctccacagattctgactacattcttccagttaccaacaccctatggcatcaccacacatatcatgatatcaatatgtctcacctagctacgttcaaaactcaatttttaaaagacaaaaggtaactgtttcgtcttacttcttctaataaagcttcatgtctgagactgacccaccggttcgttttataagccatgcagatgtgttctccttcttcaccacaaccaatctgcatttttcatattccgagactgtaacagagaagagatacagaaaaacaaatagcaaaaatgtttgtgaccctgtttcagatataccattgacacaagccggtagttagtgtttggttcttctaacccttcgtatagcctgctgatatctatctcccatgccaaagcctttgctgtttcagatatttctgtttcagtttcattcttctcccattccaacactaatgttgcaaaaccacaaaaacagctacagtttttaatcataccataataaatgaaacgagtagataagatcacactcgtggtgaaaaatataccaattgtgaagataggcgggcatctacttaaaacgtggtgaacaaagtttgtcttcccacagcctcctgttttaacatcacatatcatctcatcttccatacggatcaccgtaaggatttcctcaaacttcatattcccaaaagcacactgcaaatatatataaccacagaacaacttttaaggagtagtaccagtttctgtaggaaagacaaagagggaaataaatgaaacatacctttaggtttctaattgaatttgcagccataacaattccataagaactttgctcaggataatttggattccttctgcattttgtacatctcattctttcatattcctccagcgtaaaaaggcgagttaccaagctctctttttctggacttttccaccaatgcaaaaactcaaggatggtgacgactacctcatcagcatcacttgactgaaaaaaaagtaaaagaagaacagaatgacatctatgccaactatgaaaacgttttagaagcttatatttatctgcacaaaccagggaatggacttcttctagggaagcaagtaagttgctcagtaggtaactgtagagttcatcttcttttatctgctccgagacaacagcagaaaagaaatcttttagtgcacaaggaacttgttcttccaagttgccgtgaaataattgccgattgtgcaccaaatcctcttgaagaaccttaatgttcaagagggcctgcagtatcataatttgtcaacggaaatgagtaaggaaggagatttaatatgaaaataacgaatgagctgaatcagtagaagagagctcagatttttgaatcttattttggctggtgtctgctttacctttagggtcatgtcaagagctgaattgtatctagtaacttttttatgtgctgactccaaattttcagatagtaaatcttctccaggcatgttttccatatcttgaaggcggtaaatggaaaaaagaagtatcagaaacgttttgcatacatagttcaaaatatttgtcaactgaggataacctttagcagtttcgtcttgacttttagtgttggatgaaatttccaatcgacccctttcacttgaaagagtatcttctggttccatagaatcttcttccgttgattttggtgatggaggagtaactttcggttcaaggttgacagaagattcgctggacatatgcaagaacacgttttgctcatagaaaacctacaaagaatttatcaacttgcgaaaagtgttggaaaaccaaatttctcgtctagagtacttactgtacatcatctttcgacatgctcgctgaagttctctgtcacaccatgaagaacattaattcttacaactgagtaatcaaaaagtcatggaagcaaataaagaatttagacattcagcgaccttgttgcttctatttttcttcttatttgaccctgacttcttccccttctcttgtttttcctcggataaatgttcggcttgtgctgcagctaacttggttttggcatccatatcaacaatttcatccaactcatcctagaagaatagatatagttttaatatatgaaaagagaggaatatgacagcttcttgtataaaaccaaagttacaaaccaacccgttgatatcgtttcagcaggtgcaggatataagagcggtagtcaaaaacagaaagcttgacgaggtcgtttagcaaattagtccttgaattctcaatcagcaaaatttttgaatcagctaccggaacctgcaagtcaattagataatttagataatttatgttatactgttgtaaattaaaacttagataaggaaagaaccttgttggtgaccactgatttcagaaggtctatggacttcaacactgtgtcatcattcagatttttatgcccatgtataagagtcatgcaatcttctaggtcggagaattcaaatgtcggatgtgatgctttttcaagaacatctcgtactgcacataagcatagttttgtagtgtgagaatctccggcgtctatcaccaaacgttcttcacatttatcgcacagaagagatgcatatgtgttccattgatcttctggaacattttttctcctttcatcttcgagtatacataagtttttggcgtcaataagtgctgcatcataattcaggatctgcaatttctttgcatatttggttcccaaagtcgcacaagtgaagtgaatggctcgcagaacagccacacatatttcaagattgtgtgctctgatagatcggggaaattcaaagctctcatctatcaaagggtagtcaagtaaccaggttatggtatcgtcaccctgaggatgtgtcttggtgtagtgaacattgtgatcacaaacatctattatcccttcatcatcaaatgaagcaatcttgcctctcagcagtcttttatccagaagcataaatgaaaactcatgatcaaattcaatcttttctttaactcgcaaacgaccacataaactgtctgttgcgttggaaaccaattctgtaccatcaacccgttcacagttaatgcgtttgagaaggtctaggatttgattgagttcatgacattccaaaaagcaaatactctgaggtgtttccactaagcggcacttggagctaagagtatgctcagaaatttctaattgtgcaagatgcttaaccgtcaactgcatcatccaatctcgaatgctacaagagagaattttacgttcctgaaacaacaaaagaagcgactgaagttctttaagtaacttactgcgttcttcatccacagctaaaggccagtttttggaccatccattctcatatacaaactctttcaccgattcgagctgagtcttgatcatttcgacggcagctactacatcaacaggttcccaacctgcaaccgatatcataccagcccagacttcatctaccctctgcgccatatgctttgtcgtagaaggtttaaattttgcggcatgttcttgctcaagatgactcctaaactttttaggataatagaacttctgtgaacaagatcgacacatccagaatttccattttctgtttatcctcgcagagtcaagaacttgctccaaagcatctagtcccactctgccatataatctttcgacataagctgtaagttttgcaatgcttactttcatgaagttccttttactctcaacatccatactcgcccaatacgacctcaatcttttacccgcagcggtctccaggtcactccttatactgtctcgaatgttctttgactccctaagttttggttcagacattttttgcagtaacaccattgaatctgccgcttcgatcattgcctctgtcgcagccgtatccgagtcactccttacacttccttgaagttttgggatcattgactctgccactaggactacattctcaagagaacttttagtattttcctcactcaagttcaaaccaccaaaagaagcaataaaagataaaccttcttttgcaatgttcagagctttcttgtaaaatgatgctgagccaatcagtttacccaattctaaaagtgcaattgcagagtaagcgtgtacaccacaatcttccgtgaagcattctacagaagccaacaagaatgggaatttcatgtcactgttttctgttttagtcccttgttcataaaagaaacaaccttgtaggtaatgaaccattgctggaaccttttccttcccacgagtcgaaatcgaatcttcgattacttccaatgccttgatgtaatctccttcagcgaagtaaccgtggacaagtttctggatttttgcttcctcaggatcttcgactaaaagaggaagaagaggcgccatgttaaggaaagagtaacgaacgattcttcaagcttcttgagattcagatagaaacttgtttgcgagggagatgataataacaacagagatgaagcatttatcacgtgtgatccacgtaacagagttgttgaagcttttatcacgtgaaatccacgtgacaagagaaacccaagtcgtcgtgtcttctttttcgaacagttcttcttcgatatctccattggggaattctgtcgaacatcttgtgtgcattcattgttttgagtaaattacacaacagcttctatttaatttcgccatccagaataaacagaaaaaaacaccccagaaatgtgtgaattaacagataagacaaaaaaattgtgtgaagttttcgaattcgggatcaaagatggtcatgggatgatcgaaattggtttatgttgtgtaagaggaattaacaaaaaccttaagtcgttaacaattgtttatatattttgttgcaattatcttattagtactttattactaaaatcaagtaatgaaccaaaagattacaaacttgagttccatactaatacatttctatcattgaacagcttcataaaaaagaacctctgaacgaatcttcctttctccacaaattttgaccacactcttccagttgccaacaacctatggcatcaccacacatcaatatatgtcttatcccaacaaagttcacaattcagggcaataaagacaaaggcaactgtttcatctcacctcctctgctgaagcttcatgtctgcggctcacccaccggttcttttcataagccatgcaaatgtattctccttcttcaacacaaccaatctgcattcccaaattctcagactgtagtagagaaatacagaagaacaatagcacaaacatttgtcacgatgtttcagattttaccattgacacaagccggtagttagtgtttggttctaagccttcgtataacctgctgatatctatctcccagtgcaaagcatttgttgtttcatatatttctatttcagtttcattcttctcccattccaacactaatgttaaaaccccaaaaaaaaaagtagcaacaatgttttatcataccgaaataaatgaaatatgagtataagatcacaatcatggtcaaaagttaccaattgtgaagataggcgggcatctacttatagtgtggtgaacaaggtttctctctccacagcctcctgttccaacatcacatatcatttcattgttcatgcggattactttaagggtgtcctcaaacattatattccccaaagcacactgcatatataaacaagcattttaagtaccagtttctgtagaaaagtaaaatatgggaataaatgaaacatacctctaggtctctgattgaatctgcagccataacaattccataagaactttgctctggataatttggcttccttctgcattttctacaactcattctttcatattcctccaatgtaaaaaggcgagttaccaagctttcactttctggacttttccagcaatgacaaaactcgaggattgcaacaagtacctcagcagcattacttgactgaaatgagtttaacaaaaaaatcaaatgacattaaagacaacattctaaccgattcgggataataataatagtactcagaagcttatctatatctacacaaaccagggaatgaagttcttctagggaatcaagtaagttgctcagtaggtgaccatagagttcctcttcttttatcttctccgagacaaaagcagaaaagaaatctcgtagtgcacaaggaacttggttttcagaaaatggtttccgattgttcactaaatcctctttaagaaccttaatgttacagagggactgcagtagcaaaaaaatattcaaagaagtaaggaagtaaagagatacatgaaaactgagaatatgttgaatcagaaaaagagagtttaggttttgaatcttatttttgttgttgactgctttaccttcaacatcatgtcaagagctgaattgtatctagttgcagctttgccatttactgtctccaaatcttctcgaggcatgctttgcatatctttaagatgacatgctaaagaaataagctcaagacaatagagttttagaatatttgtcaatcaataagatcttttacaactagaatcacctttagtagcttcctcttgattattagtgttggatgaaatttcaaatagactcttttcacctttagtgtcgtcctctagttccatagaatcttcttttgccctgtttagtgtgaaaggtttaaggttgaggtaagatcacgttttgtgtgatgaagcagaagtttaatgtggttcgagataggcttctcatcaaacaaacaaaactatttgtaagataaccaaaaacccctagaaaatcctgaatgaataatcctaattaaaataaaataattactagactagataataacaaatattgaagaattatccgaattctacgctcagagaaaacctacaaacagtttaacaatttgcaaaagaatcttgagaaactatatttctcatcttgacaaactatatttcactggacatatttaagaacacgttttgctcagagaaaacctaaaaacaatttataaaccaaatttctcatctagagtacttactgttcgacatcctggtcaagatgactagacatgctcgctgaagttctctgatatggcatgaagaccattcattcgtacaactgagtaatcaaaaaagtcagagaagcaaacatagagtttagaccatcaaagaccttcgtgcttttatggtttctcttctttgaccctgacttcttcgccttctcttgttttttctctgataaaagttctggtggtgctgcatcttctaactcttcctagaagaagatacatacattataatgaaaggaacatgttaaaacagaaaatcaaagggaagatgaaagatctttgtataaagccaaagttaccaactaacctctaagtaaagtttcaccggttgaaggatataagagcggtagtcaaaaacagaaaggctgacaaggtcctttagcaaactaatcctcgaattctcaaccaacaaaatctttgaatcgactagcggaacctgcaagtcaatagataactaactaatttaagacaatttctgttattatgttgttaactaaaactcagaacaggattaaaccttgtaggtgaccacagatttgagaagattaatggacttcaatactatatcatcactgatatgtttatgcccatttataagatttctgcaatctactagatcggtgaaatcaaatgtcggctgcgatgctcctccgagaacatcttgtactgcacacaaagatagttttgtagttagagaatctccagcgtgtctccttatattctcttcacatttatcgcatagaagagatgcatataaggtccactgatcttccggaatattccttctcctttcatcttcacgtatacataagttattggcgtcaataagagctgcatcataacatatcatccgcaatttcttttcatatttggttctcaaagtcctacacgtgaactgaacagctctcagaacagccacccaaatatcaatattgtgtgtcctaataggtttgggaaatcgaaaaatctcatctcctaaagagtagtccgccaaccaagataagatatcatctccatgaacctgtgcattggcatagtaatcattaggatcaaaaacattgactgtcccttcattatcgaatcgagtcagcttgcatttcagcagtctcttatccagaagcagaaatgaaaactgagagtcaaagtcaatcttttctttaactcgagtaccatcccagaaactgtccactgctttgcaaaccaaatttttgccatcatccctttcacctttgatggctcttagaaagtgcaggatttgattgagttcacgaaattccagaaaacatatactctgaggtgtttccactaggcgacactcggtagtaagagtatgctcagaaacttcaaattgtgcaagatgcttaaccggaaactgcatcatccagtctcgaatactacaagaaagaattttaagctcccaaaatgacacaaggagcaacttgatttccttgagtaacttactgcgctcttcatctatagctaaaggccagtctttggaccatccattctcatatgcaaacgctttcacatcttggagccgattcttaatcatctcaacggcagctgcagcgtccactggatcccaacctccaacggatatcttatgaccccagactttagttaccgtctggggcatatcctttgtcgaagacggtttaaattctgcagcatgttcttgtccaagatgattcttacactcctcaggactagagaacttctttgaacaagttcgacacatccagaatctccattttctgttttccctggcaaaagtgagaacttgatccaaagcatctcgtccctctttcccatacattgcctcgacgaaacttataagctttgtaatctccattttcaggaagttccttttgaactcatcatccaaacctctccaaaacgacctcaatttcgagtctggatttttcttcgactccttagcttttggttcgcttcttacaataggagaagcaactagactcttacctccagcgattcttgactctgcatcttcgattattctttcgacatccttttgactcttcacctctttcggaccatattcatctaactcagccaaaacagataagtactcttttgctttctcaacagatttcttgtaatacatagacgatccaagatgttgacccatttcaaacagtgaaagagcagtaaacgatgagaacccttcactttccgcaaaacattctacagaacctaacaaaaacgtgaacttgacgtcactgttctctgttcttctcgcttgtgccctaaagatggaaccttgctggaaatgaagtaaacccaggaggtcattgcccttcccttgtttaaaaatcgaatcttcaataatcaccatggcctttatgtgatctcctccagcaaagtaactttcgtccaatcgacaatcttccagagaaggaggcttcatgtttgggaagagtgacgattctcaagcttcttgcgctttcttgttttacttgtgcgagagaaaactgaatggtagacgcgggaaaatcgacggtcatgtatcagtgacgcacactttatcacgtgagagccatgtgacaagagtttttaagaaaaataacaaccaagactcattggggaattgtgtcgaacaccttgtgagcattcttcaggttaaaaattcaggattgtctttggtgtttttatttcttacactaaagacatttatgtatatatttttttgtatgagaaggcatgaagtgatatcacgaatcgatataatcaggaaaaaatggattgtgcccaccaaatgttcgacaaaagttcacaatactataatacacgatttaggatttctctgtggaataattttcgcgctcaattcttaacagatgacgtgaccctcacgtgaacaaaccaactaactcctaaccctataaatccttctcttccacgcttcctcattttctctctctctgtttcttttattttctcgagaaaattcagatagaaaatcgccattgttgttcttactatcagtcccagcgagatcatggagatggatctatcagaggttaaagaaatggagaaagacgaagaaattgattcgtaagtagtcaaatctcatttttcgagtatctttatgcttttttcgttcgattttctctgagaattttctctccttggtgtttattcagagatctctcagactcagatacagaggagcctgaagagaagatactcgacgccacttcactttcagctcttgatatgatactcaaggtttcgcagaactcaacaatccaaaacgaatctgttgttatcgatcttgtttttttgattaatgttttcaagaatttgattttgtgcagtctctgtggaacattagcgttttcgtaagcaatctttcgatggattatgttcaagaagcgaatcagagcctcacagataatgaatctgttcctctacaagacattcttcgtattttcatgctcaacaatctcagtctcactcatcctctggtctcagctctgatctttaaacccttatgtatgttgattacttctttctcacgcttcatatttttgtcaggaagcaaacggtgtttctaaactgtttctaaacatcttggagcttatccctcgctggaactatcactttgaagtgaatgaagtagcgaaaacgatttgcattaggtgcaagacggatatggcatattcaggtgaaacgtcttatggtatcatcatcaatgctaattcactcagagtatacaaggcaagtcatttctcttttctcttatctttgatgtgaaagagagagtctttaagtctttgaacgtttttgggtaatcacagtctgcattcaaggagtttacatttgagaatatcattaaggccagcatgatcaatgtaaagatgctttgtgacaaggaaggatgtgggaaacgaaactatgttgatactatgataagtaaccttccatctgcttttatagttggtaagctttggattgttaattggttagtagctttaacaacataatgcagtagttttgagcttgttttctcttattttttatagcacttcagtgggagaacaatgagaccgaaaaagagatattcgatacagcttctgttctggcgactgaaatagatattagtgctatatatagatatgtaggtgacagtgcatttaccaaataccgtcttgtctcaatggtaagggtccaagtatttgatttttaatttgtttcagttccgtttaagtttactatgtttaccaatgttgaatattcaggtttggtcgcatggaaatctatacaactgtgtagcttatgaaaacaatagatgggtcagacatttttgttctgagatagaggtaaagctttatagacatttttgtaaaagacaagctagtatgttgttgatctgtgactgagtgatgtatattgctggttgtccaggttattggagactgggatggtgttctccgcatttttcgagaactgcatattcgacctgagattctattctttgaaaacgtaagctcctttgactgagtatgcatgtttattttgcttatgtgtgtgtgttctcaattccacctacttgaattgcaggctattctaaaggaccagatgttttccgagcagggatctgaagactgaatagaagaagcttttcaaatggtgcaggaaaggaatttgatgtagaagtcaaaaactttataggagtaagtatagaacaatgcttttgattgttatgatcattgaatagtagatacttggataccattttatcaagttcaacacttgtataaagatactatccttttaacgttggaagaacatgagagaagcagaagggagccctataaaccaaagcaaagttcttaaacatgaagctttagtagaagatgtacacaacctaaaatttaataacttaaaagatcattaacaaacgcataaaactcaaaattgccatcattgggctgcatgctttgacgaggacgagaggcattatagttgggggggtttcaacaatgatatggcattcttgtttagtacaggactagtgtaactagctgagacattctggattgatctaggatctttgcttctttgcttaggtaggtttgatccaaaaagtgaataaagagagaaagatgttgatttttgactggagagcaataaatgtattcaaaatggtttttgatttctgagtgacatctctaaaaactttgatgttaccttaacagaagaaaagaatgcaaatgttgaatcataaaaatatttcaagaactttaataaactacgatcattcacaaccgcatcaaaagtcatacaaacatacaatagtcaagacatgcatggtagatatttagatatcctaaaaacagagtaggtaagtcatagagtagtagacatggcatggtagatatttagatatcctaaaaacagagtaggtaagtcatagagtagtagacatggcatggtagatacatagatatcctaaacatagatagagcgttaacttcacattcagtttttacgcttaaaacagagtagtcccagactctagagtagtagacctgacatggttgatatcctaaaagaagggatggtttttatgggagtttttaatttcacattcaatctctacctccaaagtcccttcacgatccaagtaagccccctcatttttatcgaaagacatggattgaggaagaccccacgctttgttcgagttcatgagccaacagttaactacagaaacaagcaatacattagttataaacttaataccactagtttatagtcaaaggagtaggacatttgacattttaaattaagaacgcctattgaaaatgtcatcagctttgacaataaccattgacaaatagtaacatcaaatagtttttgacttacggcttcctgttaggtgattggatccacgcgggtctagaaccttcaggtttactcgcacgaaaatcagctcacccttggctaaagtttcaccgtcagctaaatgcaaatgctgaattaacttgtcatctgcctcagagtccccctttggatacaactttagagtcctttgaaacataaccatccacttgttagcaagttaccactaatgcacacatacaacaatatctatcagaaagaaaaaactcaccaatccttttctcccatgtgaaaggttttggatacgtaatcattctgttccagaagagcgaaatcacgaatagtccaagagaatttgtgaaaagggagatcttcaccaaaagaggcgggtcgtgaaacaatcttcacatgagcaccgaactcatgttcttcaccgtacaagataaatccctttgcacggtctttgagtgtttcaaccggaagagcttttgacaatccccaaaccgtttttgaagaattgaaacgcttcacttcaacatctacatgtataaacacatattagagcttcattcttatatatacacagagaaagagagagataagagcatacgaaccttgaaaagagaggtacttcttctcttcctcgctgaagacaaagaaagtgagataggcaaacacatcaatgggtggtgttgtcgatgagaggcattccacatacatagacacaaacccacttccattgtccgcttcgtttccttttgggtgaacaaccaatctcctgatttttacaaaaaggacaacatttcttacttatatatgtatacagtgaagaaagatgggaactttagtgaagaaaaatgtgaactttagcaaagaaagatgagaactttagtgaagaaaaatgtgaactttttagcgaagaaagatgagaacttgaagtatagaacaagatcacataccagttgtgtgcaccagaagagaaaggaggggactcgtatttctcgttagcaagctgagaaagtctgacaagagtagaggaaggaggattccttctccaagtcttcaacactgcaggatctgacgcatttgaacccattttctctacacaacttacacaagagaagatttttttagaattccccaaacaacagagagatctatagaaatttgtgtgctttattctcttaagagactaaagaagttgaaagcttaaagaaagaaatcgacgaaccttgacggagatggaaagagccttgacggaattctgcgtcaccttgaagcaaagagagagattgaaaaaggagagagcttttaagggattcttcgtcactaacaagtaagaagagattttctagggtttagatattattttcatataacgggcctaaagctacaagactggcccggctcgttttttattttagcttcttctgcttcaaaacgttgacgtttcaatctccaaaaaagtgttttaagattttgataatatgtactcgaagagctatgtaatgttgattaaagcttcataacaatttttggcgcacaattcttaatatatatcacgtgaggatcacgtaaacaaactaacagactctaaccctattaagtcctcgcctaatcgcctttggtcttctcttcaacttttcccattttctttctctgccgtttattttctcgagaaaactcagaaagaaaatctccattgttgtttttcttgggaaaatctgccaaagaaagaaggttttgccttcgatcattgagatggatccatcaaacgttcaagaagtggagaagctcgaagaaatagatccgtaagtagtttaaatctcatcctccgagtatatatttatgcttttctcatacattttcgacttggtgcttatcttttgtttagagatctctcactaacgcaagacgatgcagaggaacctatagggaagctaaacgccacctgtgtttcagctcttgctatgatactcaaggtttcgcaaacttcacaaacctaaagaatttgtttttctcgattttgtttatttaagttttcaagaatgtggatttgtgcagtctatatggaacattaacgttttcgcaagctccagagaagatgaatctgtttttcatgagttccttctcaacgatctaagtctcaagcatcctctggtctaacctctgatctttaaaaaatctatgttaccaattacttctttctcaagacttgatgttttcttgttctctacgctttaggaagcaaatggtgtttttgacctgtttctaaacatcttggaggctctgcctaactggggtttgtactttgaagtatacgaagtggctaaaaagatttgcaatagatgcaaactggatttggaatatcctgctgaacgttcttttcgtcttatcatcagtgctagttcacttagagaagtcaaggcaagtctctttttttcccttatacattgaaagtagaattcagtctcgtgaaagtgttttggttatttgcagtctgcattcaaggattttacatttgagaatatcattaaggtcatcaagatgaacttaaagatgccttgtgataaggaaggatgtgggaaacaaagctatgttcaccgtatgataaccaaacttccatctgttttcacaattggtaagcctatggtataagctattaagttaatttgttagtagagatcacaacaaaatgcagtagttttgagcatattttttttctctcgtattgtttagcacttgagtggacaaagaatgagactgcaggagaaatattcgatacagtttctgttctggcgactgagattgatgttaatgtgatataccaatgcgaaggtgacattcgatataccaagtaccgtcttgtctcaatggtaagggccaagtacctacaatttgtttcagttccatttaactttactatgttaccagaaacaactccaatgttaacattcaggtttgcttgcatggaaatcgatacaactgtgtagcttatgaaaacaatagatgggtcagatatcttcgttctgagatagaggtataaagcttttagtcttttagacatttttgtatgtggaattgtgacttctttacctgagtgaggctatgtcgcttctccaggttattggagactgggagaatgttgtcagcatttgtttaaagaatatccgtccacagattctgtttttcgaaaacgtaaggccctttcgactgcgtacttgctcatgttttgcttttattatgtgtgttttctctcaattccacctactttgaattgcaggttatgcaaagggagcaataaatagaaaagctttttcaatggcataggaatcagattgatgtatagacataaaagtgcttgagtctgaagtcaaaaactttataggaatcagattgatgccttgttggtgttacactattgtggacagattttgtatatgttttagcccaaattcactatccggattgttatgctcagtgaacacttgtgtgtagataaaacacagctctgtctcttaagtttcagaagtaatagaccattttgtgatgctcattgaacacttgtgtgtagataaaacatagctctgtctcttaagttccagaagtaatagaccattttgtaatgctccttaacacaaacaatacatgcaagtttggccttgtttatatcatcatttagtctaattattgagagtacgcaacaatagattcttgcttaagcagattcttttacatgtttctgttaggtttcttcttggatttgcattctcatttgcgttgtacgtttttgtatttgacaaactatgaccgtagagatccacgggaaagatctggtcttaccgcctctgctatagctgtgagttatcggtatccattgcattctactcaaatttccttgtgtttagtagtaaaagaaaacaaaatgacaaaacacaaaacagctgcaacagagtatttaccaacttatctattttgttaaaatttgtgctttgagattctcttttgcacttgtccttgtttactctggtccttagagtcttgttacactttgcatctaagtttcaaaagaagacaacttcaagtctgtttccacaacaagttaaaaatttcagtttattgaagagaatatctgcttcgaagagaatgtactgcttgtactttcagaatcaaaatttggtttgccttgtacataatcaaaatgagttatttaatccttgtagatctatgtagtttcaggcttttatgtttgtcaagaaccctagccaaggttatgtctagtttttatcttccttgttcaaagtcttttctttctttcatactgaacctcaagaaacagagaagctttgacgattaggatttatattgcctctatgtctagcgttgttcgaatcatcatctcattatttcataaaagctgcaccaaagattgcagaaagtataagtcttttaaccgacgaagataatagtgcaaaccaaaccatttggtgaatcagattaataatcttgggaaagaagaaacacatgagagattcctgaaacaatttgacatgagagttcaaacttgcctcaaaatgaacgaacaaaataatgaatgtcaatccagaaatggttagaagaatctcaatgagtgtctttcaagttgaaaagctgattttctcttgaaaaccaagaacgacaacaacgaagacctgcaacattgcaacaaagactagtctacaaagactaagcttgttcacttactcggtgtcctactgccaaatggatttatgcccaccaagggtttgacaaaagttcacaataccataattcatgatttcttgtggcataagcaatccttaatatattatcacgtgaccctcacgtaaccaaaataactctgatcttataaatcatttcccttcgtcttcttctctctgttccttttcttgttttctcgagaaactcaagaaagaaaatcgccattgttgtcttctcctgtttttgctttcattcccagccaaatgatggagaaagacgaagatatcgacaagaaattagatatgtaagtagcaaagtctcctctttagagtatatctatgcttttttccccatataagaattcttctacttcgtgcagaggctacgacgcagaggaatcatcacttaatatgatactcaaggtttttcaaaactttaacaaacccaaagataaacaaaacaaagcgtgaatctattttgatcgatcttgttttagttttcaagaatgtgatttttttttgcagtctctgtggcaaattagcgttttcgcaagacagaacatagtacgtcaaagcttcacaggctcatttcttaaggaagacatacttcgtatttcctttatcaacaatctcagtctcagtcaacctccggtctctgctctgctctcatctttaaaacctttgtcttatgtgtgttttagttacttctttctcaagcttcatgtatttttgtattcttcaggaagcaaataacatctttgacctatttgtatacatcttggagaacttacctccgtggaatccatactttgaagtgtacgaattggcgaacaagatttgcaatagatgcaagatggatttggagtatccagttaaacgttcttatggtatgatcatcactgctgattcactccgagaaaccaaggcaagtcatttttttttgtctctaaatcttttaagcgaacaagtctttcatgaaagtgagactagaaacgtatttggttatcgcagggattattcgagaatcttacattcgagaagttcgttcaaatcatcaggataagcttaaagatgccttgtgataaggaaggatgtgggaaacgaaactatgttcaacgtatgataaataaacttccaactgttttcacaattggtaagcctgtgataatctctcaagttaaaactggtcattagacatcatcaacataatgctattgatttcgtcttcttttttttttcttgtatttcctagcgcttgagtgggaacacaatgagactgaaggagagatatttgatacaacttctgttctggcgactgagattgatgttagtgtgatataccaatacgaaggtgatagtgcatttaccaaataccgtcttgtctcaatggtaagggccaagtaactagttcgtttcagttccattttcctattgaagattctgttacaagaaaaaactcataagttaatatgtattcaggtttgctcggatggagatcgatacaactgcgtagcttatgaagacaatagatgggtcagacatgttggttctcagaaaaaggtaacacttgaattgcgtagcttctagccttctagacattttggtaagagataagcaagttatttgatctgtgactgagtgatgtatttttttgttgtccaggttattggagactgggatggtgttctcagcatttttcgagaactgcatattcgatctgagattctgttttttgaaaatgtaagctcctataactgcatacatggttatgttttttcttttcttatgtgtgtgtgtgtgttctcaattccaccttcttggattgcattactatgcagagggaacagatgttttccgcgcagggatctcaagcctcgtgtgttatttcttagcccaaattcagcatcctgactgattgttatgttcattgatcaatgtatatagttagataccagtttccaaacacatcgctattagcatttcgtttgatgtagtggtcagtaacatttgaaaacatttctgttctagtactctgttgaaccgtgtgggtaaccaagttatgatcaacgtagagtatgataattaaacttccagtgacaaattttcacaattgagccacagacccgaatttctctatatctttttgactaaatcaatatttatatccttttaagttaaagagatttgtgtcattttatagtttcattttcactcatgattagtttttctttctcattttcgtttgaaatgattttttttagttattatttctttgaattccaaatgcatcgaataaaacaagcaaagcctaagaaacaagagagggtgccaaagtcttgtaagtgaaagaacataaatatgccaacggatggtgtattggagaaaatggaggccggagatgtggtaatggcaaaaaaagataaatgtaaccgtgtaagattgtggataacaacattgcttttgtccatattgatttccgtgatatctctgcttatattattctggaaaaatcaacaatatggataatacaaacacacttacaaatctaaatcacactaattcataaaataaattttctcccgcgatgtagtgcggatccgatccaagtatacgtaacaaaattacaaacgtggaaacaaaaacaacaccaagatcaattttagttgtagaagggaagggttttaatgtcacagcaactgatagagcaaaagtatttatcttcgtcggtgactttcaagatgatagggaaaatgcaatggtacttacatttataacaaactggtcgagacatactattgttgcgaacggtctcgtaaagtgtcatctgcatccggtcatcatccaatactatatttgtttccggttccaggcctcggaaatctccgagcacacaattggtatgcaaagttaccccacaatctttacaagtgtaaaaccattttgttggatcagtttctttctcgcaaatatcacaccaatatttaccacttgcatctctttcaccatagcataaagagagaaaatgatcgtcgactctatgcttgacctcatgtggtaatagagcgcatttgaaatccaaggcgtatccacacttatcttcaacgcatctgagcacgtgagatgtttccttgttgcaagcactacatactccttttggtgatgtgtaaaacaagggatgttggtgacttggatggacaagtgacccagaaaaggaggcacatcgcacatctaatccaaacggaaaagtaccgtatatgaaacaattaaaaaatactccacaagccttacacttagagtagttacgttgagatgcatgtagaatatacggtttattgcttagcacatgacgttttcgtgtaggatgtttagcacagttctcgtgtagaagaaaatcacaactcatacaactgtagaagggatcatgatagataggataagcacatgccttgcaacttctctcctcaacaaaggtaccagacttgtccagtcttaagttatgctctatatggctgaaatgtcgtattataccttcactaatcacctcgaatggttccataggttcatcttcttcaggctcatctttcatctctattccatcccaaacatcttctctagtagcgcatttggtatgaaatgtagactcagaacacctcttacaagaatatcccccacaactccaatccattttcttacgacaaacaccacatactgaatcaataataccaagaagagaagtgcgagaaacgcgatgatcatggcggttgatattgatgacccatggaaatccagagcaattgttatgggaagtgaaattgcattgaagacagacatatgggcttcgatctccatggaggccgcaagtggtgcaagtaaaagagatcaattttggcataagggttagttcatggttgtgggtgttttggtcgtgaagatttagtggtggtggaagagaaacacatcgcaaatccaaagtaaagttacaagcggaacagtgataaaacatttcgtcaaaaatctttttcccacataaactacaattcccatcagtataagccggtggtttaccagtgatgagttttagtgtgtgtaaggagtgggaagggtggtttacctctgctccatacttttcgcaatccacatggaatgccaaatcgcattcatggcatttgtaaggatatccactgcctcccttcccacaagtaaagcaggtgaaggagcttctcaccatctctagcttgagtttgtggtcatggttctggggaaaatcaatgactttcggtggtgggtacttgaaacaatccaaatggatgttgaattcacagcgctgacattcatagttctggatatagggctggattgtctctttacatgtacggcatctcacactccagctggcaaaatttgtaataagagaaagattcttatcacacttgtgagaagggtggttgatctctttagggcagttgctgcaactcttatggaagaaataacgacattttctgcagttgtagccatcactgatagttttgaattggagtccacaacatttaccccaccgattatctcttgcaggtgtcagccagtgctcatgaatgggtagtcgcaccatctcaggttccatggttactaagagatctagtgagaatttctcgttgaacttttggtctctgatttctcttagctcatgtgacggagataagtgaaaaaaacaatactagttattttatttagtactcatttaatggttaattatatgtttttttattatattagtaaaagaaagtttagatctgacatggtaatcactaaactattcatcatttgattttgataacgtgccaacatcaacgaagcacgatttacattgcaaaagactttctatttaatagtagagttttaatgggtcaataaatagttgttacattattgcaacaaaacaatagtaaatattaaatctgacagataactgctacctactcaacattatttatatctaacacgataaatcgataaatcaataaaaacacaatcgatgcaaacaagttttttcttaatagctttctaaatacaagatgatttataatttgttaaaataaagacagatattactaaaacctaccctcataactaaatcatgttaccctttcataaaataatgaacgttgggtcatcttagaaaatctctcagtgcacaataatgcaagttacatggatcccatgaccattgaaagtagagaggacaaggatacatgaatacttgatacttatatgaatcaataaaaaagaaactttaaatattaggataacaatctccaaattatgcaacggatgaacagtagttataatatatgtgtgaagactgaaaaagttatttcgtcaaatgtaaaacaataattcttggcacttccttaatcgttgttacagccatatcgaatgtccattgcaatcttattctcaagtgtatgaggttattttaaccttattacttaagaaaaaaggtttgttttcgaagttttgatgtcttatgttatgttgttttattccatgtttaaacacatgagttaacaagaaaaatacgaaagaaaaaagctaacatctttcgcaaaacattaacaatcccaataacatttagaaccaaatgatataggacaaaaataaactcaaaactttatttcttcaagtcaacaacattacatataaatattgtgaaaattactcagactgcactctactctttgcaagaataactcatttaacatctcatggaaaatgtttactagagtaacccaaatctttagattttacaataactgtaaaatgattttaaatgattttttagattttataaaaaagtgattagggtttgattttataattaaatgcgtttaattttttatttttttaattaggcgatagattctgattgatagggaaaaaaaagtgaatgaatattctatatataattagatactaactaactcatgcatgggattgaaaatttgaggaggttttcaacaattgaattcatgctcgtgaacaatgtttaactttagttggaggtctccctctaagcgctagtcatgatttgagcttgatgtgttttatgaacatcattctttattttggacattctgatgattttttttttttttgccttagtaatatttcgcaaaatatgggttttggatcggagaatttttaactttcgtaaagtttaaattgcatgttatggaactaatcttgttgaggtgttgtgcgtcacctagaaacttctggaagctcgagacttggttagatatgatttatataagtatgtttaaactattgtgtatccatatataagaaacccaacagtagtggagttgacagttcaatattgatagtcagatgtagttgctggaaattgcaaacttacgtcaatgaaccatgtttcccaactcacaatgtaaactttagaattgttattgacttgggagactttcccttataatacacgagtagacaatcatcaatacaagattcacatatatcataacatctcttgataaaattattacattaacaaaaacagacggatcgatcaaaacccaaacacacatacacaaactcttaagggacaatataatgaatcaaaagtaacgtagcactatttataaatacaacaacaaaaatgaaacttgataatgttttaatacgaacatgaattcaacttattttcagcacattgttcgatttttcctgaaaaaacgaaaccagctcaacataacccattgaaacatttcacgaaatacctggcaggcaatacttggtagcaatgcctttgtgtttaagtttggtttgagaggaccactgtggaagaaatgtcttgggcagagtcgaattgggtttgacctgaagaaagagaagaagagtcgttaaattcatcttcactttcttcttcttcttcttctcctcgataagaatctttattaagagatttttggatcttctttagttctttggccacctccaccatcgttggaacttcttcactaggacccatgcatctcagtgagagcatccggaaagctttcatttgaaagagctcttgttctaagatttgacccatattttttatcatctttcgatctgcaatctcttccattggtcggtctttctttaattttgacagccaatatcgagcatgtcttttcttgttaaaataatctaattcatcagtatcttcagggtcttcttcttcactttctttttcttctcctcgataatgctcgaaatagcttttgtatcctaatagaagcgttagacccataaagattccaaaggcaaagacatctgttttctctgagactacaacactgttaacgtaattatcagcaaagtaactatagaatccatcttctgcctcaacccggacaaatgtttctccttctgggattgagacgcagtgagagaaatcagtcagcttcgcgacaccatcttcatccaataagatattccgatgagacaaaatcatatatacgaggggcctagggaaggcagtgtgaaggtaagctaaagcagtggcgatatcttctgctatcttcattcttcttttccacggcttctcatctatttctaatccataatgtttcttaacaccatgatagaccgtgactggatatttcaactcaagacaacatccaaccaatttcataaagttcttgtgaccactcaccatcgatgaaactgctatgttgcggcacacaagatctcctcccctcacattagaatctttcctgatgagtatcatgggatggttctcgttcttacctgaataccattggcagtaaaattcttcctgatgaacaagattagagtggctgaaaatgttggtggctttgcggatctcatcagcagagaagaatttgatgggattggatttgccatcgcaacattcgatgagctcttctaacaacttggctcctctctccaattctagcttcttattctttttcttcttcctccacaaccaacccatctctaaacctaaactgtttttttttctgttttttttttttataaaagaaagactttagttttaaatcaaatgagcagagagtattttcaagaactccataacgagtttgcaaacgaaatggataataagattagatttttaaggtactcaaattcttgttgaattttcaacattgacgtcctcccgcgaaaattcagaaataaacattttaattgtttttgtggaatttagagttggaaggatttatcacatatcttggtgatctctacgattttggggtctactcatgtcatcagttttttatttttttttaatatctttttacttgttagtgacgaacggtcctcaagaattcaaacactcggctggaattagatcatctaaatgtataaattaattgttaagattctttcaatgctagcttttccaagttatgcaaaattgttcagtaaatcaattttttttacaccctaaattcatcaccccaatttgttctttattataccacttccttgtaaagattttcactaaaaactaaagaatttttgtcacaagttgtctatagctttcaaattctttgagagcttctacaagcttttgagagcttcccaaaattcgcttagaacattcgaaatgaagaagatagttgcgaccaaactatcttccaagttttaccttatcaaattcattaggattgaacccgcaagagaaaaaaactacttattttagttaaaatcatttttaacattaaagaaatcagtattaggattgcatatattgttccctcctaaacatacaagtctatctttgattggaagtctccctctaagcccgagtcatgacatgcatggtagataaaatagacaaacctaagaaacggggtgctttttgatgacgttaagaatttcacattcaatatctacattcaaagcatcttcaagatcaaagtaagccttccgaattttatctaaagacgcagattgaaaaagactcctctatttgtttgaattcaagtaagcgacttttgtagtttattctcttataagacgaagaagttgaaagctattcacttagaaacttttggaagctcgagacttctagggcttgataacaatctggtctatttaacaacttgactgcttactaatttcaaatgatctattcatataatgtacgcaacttctagcttgccatgttttttatacatcaatgctgggttcctatatcgatacaattctgtcacttcttaggctattgatcgagtccagcagcttcataaaatagaatctctggccgaaccctccgttctccacagaatctgaccacactcttccaaataccgacaacctataacatcatcacacatatcaataatgtttgacccatagaagttcaaatttcagctcaagaaagacgaaggcaactgtttcgttttacctcttctattaaagcttcatgtctgagactgatccaccggttctttttataagccatgcaaatgtattctccttcttcgccacatccgatctgcattttccatatattaagactgtaacagagatacagaaaatcaatagcataaaacatttgtgaccctgtttcaaattttaccattgacacaagccggtagttagtgtttggttctaagccttcgtatagtttgctgatatctatctcccagtccatagccttcagcgttccagatatttctttctcagtttcattcttctcccatttcaacactaatgttgcaaacccacaaaaacagcaacattgtcttatcatattcaccacaacaaatgaaatgagtagataggatcacaatcgttgtaagaagttaccaattgtgaagataggcgggcagctacttatagtgtgacgaacaaagtttgcttttccacagcctcttgttttaatgtcacataacattttatcttccatgcggatcactttaatgatgtctccaaactttatattcccaaaagcacactgcatatatatatatatatatacgtaaccacaagacagcttcttaagagattgtaccagctactgtagaaaagacaaggagagaaataaatgaaacataccttcaggtctctgattgaatctgcagctataacaacgccataagacctttgctctggataatttggcatctttctgcatttgctacatttcattctttcatattcttccagtgtaaaaagacgagttaccaagctttctctttgtggacttttccagcattgccagaactcaaggatggctatgactacctctgcagcatcatttgactaaaaaaaacggacaaaaaaaatatgagaatggcatttatacagcaaccaagctttctggaaaataaaatatgcatagtttagaatttatcttccgcacaaaccatggaatgaacttcttctaaggaagcaagtaaaccgcttaggaggttactgtagaaaccctcgtcttctatctgctccgagacaaaagcagaaaagaaatctcgtagtacacaaggaacttgattgtcagaaaatggttgccgattgtggaccaaatcctctttaagaaccttaaggttacagagggcctgcagtagagcacatattatcaaagcaaaataaggaggtaaagagattttacatgaaaataaagaatgatctgaatcagtagaagatagtttaggttttgaatttgttggtgattgctttaccttaagcaccatgtcaagaattgaattgtatctggttgtagcttcttcatgtgctgagaccggatgtttcgacagtgaatcttctccatgcaaagctaaagaaataagaaatgacaatctcaagacaatagagattttagaatattcgtcaactgagtcactagggtcacctttagtagtttcctcttgattgttaatgttggatttcatttccaatagaccactttcacttgttaaagtatcttcttccaccggttttagcgatggagatgtactatccagttcaaggttggcagaatgttcgctagagatgtaagaacacaatttgttcagaaacaacctgaaaacaatgtatcgtcataacaaaaatagacttgtgaggtacttactgttgaacagtcttatcaagatgactagacatgctcgttgaatttttctgttgcatcatgaagacataccttcttacaactgaataaccaaaaagtcagcgaagcaaataaaaaatttagaacttcaaagaccttgttgtttttatttttcttcttctttgatggtaatgtcattccctcctcttgtttttcctcggatataagatctgcttctactacagctaactttgctttgttttccatatatacaatgccatcctacacgatgaagcataaaaataaaataaggaacaagtgaaagacccaatcagaaccataatgaaagctctttgtagaaaatcaaaccaaccaggatgagttctttcattggtcgaagaatgtaggagcgatagtcaaaaacagaaagtctggtgaggctgttcagcaaattaatccttgaacgttcaaccagtaaaaatcttgaatctattagaacaacctgcaatcaaatgacactttatgacagacgattttatgatatcctgttgttaattaaaattcagataagaaataaacctttttggtgaccactaatttcagaaggtctatggacttgatcacaatatcatcactaagatctttatgctcacgtataacattgatgcaattgagaaaattaaatgtcggaaatgatgctcctttgaaaacatcttgtactacacacaagaataatttcgcattcagggattttccagcgtctctccttaaatgctcttcacatgtatcgcatagaagagatgcataactggtccattgatctttctgtagattcctcctctttacatcttcgcaaatacacaaatttttggcggcagtaagagctgcatcataatctaggagcttccacttctttgcatatttagttgccaaagtcatacatgtcaaccaaacggctttcagaacagcgacccaaatatcaagattatgcatcctgataggcgtgggaaatcgaaaaatcttatcttctgaagagttgtcgactaaccaggataagatataacctccctgggcatgcgcattggcatagtgaacattgggatcaaagacactgattgtcccttcatcatcgaatcgagaaattttgcattgcagcagcctcttatcaaggagaagaactgaaaactgagggtcaaagtcgagcttttctttaacttgtgtagcacagtagaaactctccactactctgcaaacgagatctgtaccatcatccctttcacacttgatcttttttagaaattccaggatttgattgagttcatcacattcacaaaaacagataatctgaggtgtttccactaggtgacaatcagtaagagtatgcttggaaacttcaaatttttcaaaatgcttaaccgtcaaacccatcacccagtctcgaatgctacaagtgaaaatcttacagtcccaaaacaacacaaggagcaactggatttccttgagtaacttactgcgcttttcatcagcagctaaaggccagtctttggaccatccattctcatatgcaaactctttcacatcttccaatcgattcttaatcagttcaatggcagctgctgcatccactggttcccaacctccaatggatatcttacgagaccagactttacttatcctttgaggcatatgctttgtctcattaggtataaactttgcacaatgttcttgatcaagatgattcttacactcttcagcgctagtgaacttgttcgaacaagaccgacacatccagaatctccatttcccctcttcccttgcaaaagtgagaacttgctccaacgcatctcgtccttcactaccatataacccctcaacataactcgtaagttccgcagtgcttactttcataaagttccgtttgatctcaacattcaaaccagcccaatacaacatcaatcctttaatgaaatcaggctcactcttccttgtatccacatcttctttttgttcacagttttttacaacaagtcgtgtcttggattcagcaattctcgactctgcaatcttgatcacagacaccattgctttctgttctttcttggtgaattctggatcctgcacattcactgaaagatgatacaaagtttcttttgctttgcgcacagatttcttgtaatacaccactgactgaatctgttgtgccaaagtgaagagtgaaatagccgccatcgatgacaaagcaggagctatggaaacgcattgtacagaacccaacaagtaagcaactttcacatcagtgttctctgtttttttcgctagctccttaaagatttgaccttgtagtgcattaacacacaccctgtcgttcccttggacgaaacgcaaatcttcaattatctccaacgccttgatgtaatctttcgcaaagtaggaatcgtaggcacgtttgaagagattttcgctgttagcatcttctagagtaggacgctccatgttggggaagagagtagaagctagtaacgcttctcagtgatctgatctttgcgttttcttggtatcgagagaggttttgttcgtgacgggagaaaacagaggagaagcgggaaaaaatcaacgagtaaggtattgaagaagatgtcacgtacgagccacgtgacagggtctttgtggaattgtgtcgaacacctgtgggcatcctccgtgtggagtaaatgacatagctttctcgatttaattggaccttcccagagtaaatttgggagtgtagaaaaatagaaaagcattcaaatttgggtgtgtagtgacttataagtggaattgtgttcatgtttgggatcaaattggtcatcccaataggctttggttttgaaagagcaacagaaggtgaaagcttcaaaggtatgtcaaaagaaaagattattggaacggtattgtgggtcgggttcggttaaaatccgatcgggtacggttgctttaagtagagaagtttaagagctaagaaggtaaaactaaaatattggttaggtttcggtttggatctcatcgggttcggatcaatctgggtataaaaattcaaaactgctaaatacttttaaaaatcaggtatcctttaaattcaggtatactcgaattcccgtaatttactcaaacactcaaaaaatttatgcaaatagtcgaaaattcatcaaaatacccaaaacttttacccaaatatccgaattttatctgaataaccggaattttgtctaaatatccaaaaacaaattataagtatctttgattaatatattgttaaaatttcatttgtgatgtcgatgtttaattaaatttattcggttaactataaaatagttaaattaaaatatgtaactccaaaactaccaagctttcatcaaaaaagattatttgccatgatacttgatgaaaaattcagaaaaaatcaatccaaaatagttacataacgcaccaaaaatcaaaactaagggtccattagatgttagattcacatattcaaaagaagtagtcataaaatagtaataaaatcgatattgttgtaggctctgtcttgtcgtttcaagatcgttgctctgttttcaatattattgctctgtttttcttgttttgtttttgagatatatggagataaactggatagcaagaaatataatgcatatcaagtattgtgaatcgtcaacgtcctttaatgaagtaaagtctgcccgaaaaatattcgcagtgtgtagatttaagggtaaagaaactttatcccagttgtgatagacttgtaaagagtttttcccttactaacttttcacataactccattgtattcagttggttaattaatttgaatttttcggaaaagaaatcgttattttgttatagtaaaattatttttgacaaaaatcaaactgaatctaaatcgaataccaaattgatccaatacaaaaatcaaattaaaccaaaaccaaattataaaagaaaattatcaacaaaaaaaatatcgttttagtttttataatactactgataaagcaaagaccaaaaaaaaataaaaaaaaaataaaaatacatcaaatttccatcttttaagtatatcaatatttgtttaaatatgttatccattcgcaagctagtttccaatagtttatttttatttttggtcggtctttcacctatggaaccaaatgaacaatggtctgcacatccaatagcctctctacgctcgcagtcttcaagttcatcaatagtgaagtaaaaacaccactgctagaatagataggaaaatctttttgaaattttatgaccttgttgctgcgatgaaaactggaatccttgttttttctttttgccaaggatccaaaatgttgggctcgttactaattgtaagacctaattatcatgttaatgatatataccctttcgcaacaacttggtcggtctttcatggcatatttcaatattatcttagacaacaattaaaatagaaaaacaattatcagacaaattaaatgaatgtcaaagtaagtcctagttaagttttggtgcacctattcccattgagtcttagactttgattaacaaataaccacatacgcattacgcatataaatatgcatgtcatgactccacatccaaaggaggaacttgaagcaacaatcttttcttaaattattttcgatctaaagatcttgaaagcaaagttgatttcgaagaagaagataacttcgctaattatctgttcttttctgttgtttcttcttccaatcgcgttttctaggccgataagaaacttagatggaccaagtggaagagctccaactgttcaacaaataagaaacaaacatgggactagagaggtgatagtggacaacgggattattagtgtcagtttctcgagtccccaaggacttataactggcatcaaatacaaaggagtcaataatgttctccatccacatcaacgagctcgagaatactttgtaccggagccatacaagaacacaatgaaccctttatatctaaaccacacggacaagtttaggcagtacggattatggcaacgatacacagagttatatccaaaccatgacctcatctacacaattggagttagtaactatagcaaagactggttctactctcaagtcacaagaaaaatcggtgattcaacgtacacaccaactacatggcagactgtgtttcatcttccatatgtaaacatgcgaggtagctacacattgcagctagctttagcctcggctgcatgggctaatctacaagtacgtttcaataacgaatacacgaggccatttttctcaacgggatatattggaagagataatgctatagcaagacatggaatccatggactctatcggctttatagcatcaatgtacctggaaggttgctacgcacgggaaccaacacgatttatcttcgacaagctaaagcatcaggaccacttgaaggagttatgtatgattacattcgtctcgaagagccttctagagaatagattcatatagtagatacttttttttttttttttttttttcacgattggttttatgtgccattgatttaagtttgagatataattactttatttaattatttctatataaccatcaaccatgcatcttttttcaaagtttattctttatatgctcttttgaattttgacattaacgtaacagaactaattaaccgaccctcaaccgtacttgatcttaatcgaaccggtttgggagattagggttaatttcgtcattttcgtttagtaccttctcctttttagcgtcttatgtagcatcgtcctctttctcttgaattcgtatttttgagttctcagatttcaaacacaaaagtttcgtctccgatttaatctttctacgtcttggtttatgaggtaagcttgtttcacaatctttcgttaggatttctgatgatgacgaatctaccaattttgtttctcgtggaaatttgattcagatctcatctcttccttcgattttgcattcttctgaatttgtttataatccttatagctattcattgttcttaattgaattagatttgtctcgaatctatgaattacggttgaaacgagacttgtttcgactgctagggtttcgtatgtatattcaggatgatttcgttatcactgctaatctgttttattgctcttttttcttgcagctcaaaggagaagcccactctcgggtatgtgaattttaaagcttttcgacatttatttgttttgtagtttgagcctttttgtctatgttaatttctctgtaattcgtccatggaagttgaaaacttaggttctgatgtttatggttagatttagttctgaatctctgaagttgatgcataataatgtattttgaagtactttgaaatgaattgtgagaagactctcttcccttgatctggctattgactcttctttaagttgtttcatcttttgttagaaattgttaacatgagcattaagtttagaatgattgtaattataagtttgtgtttatttttatgtgtagaggtacgcggattaagacccgcaaaaggaatattgctgctcctctcgaccctgctgctttttctgatgcactagttcagatttatctggataatgctggtgatctggtactttttttttcgtgttttaagtatttatttatctgtttttatttgcttgtaaaatgtcgtgcaccttaacttatgactttgtttttgttttgtcttaggaacttgttgccagaagtttagagtcatctgatcttaatttctcaagatacggtgatattttctttgaggtaaattctccatatatcaatactgtctcagctatcttctattgcctgtgtattttttgttttcttgtagcaaggggctttttgttttgcttgtctttccgagatttaataattgatggatctcttttattatataaggttgttttcattggaggacgtactcaaactggttcagtgaaatctgatgaaggggaacgccacccttactctataatcgactgtgaaccaaagcgtgaagctattttaccatcagttgtatacatacagaaaattttgcggaggaaagccttccttattaagaaccttgagaatgttacacggagattcttacagtcactggagctttttgaggagaatgagaggaagaagcttgcaatattcacagcacttgcattttcacagaagctctcaggattacctgcagagactgtcttccagccattgcttaaggatactcttgttgccaaagggatagttctcaattttgtaacagacttcttcaatgaatatttggttgagaacagtcttgatgacttgatttctattctgaggcgtggcaagatggatgacaaactcttggagttcctgccacccacaaagcggactacagaaagttttgccgagcatttcacgtgagttttaatttcttgaagtttgctgcattcaatagtataatgttggttctttttttacttgttgtagtttccttgctcttctgtttacctgcgtttctctaaattttagtcgcttaatactgatatgattgccatttctcattgataagattaaattagtgaaaatgcttctatataggttaacttttgtcactagtttgttgtgttcaacaattctcagttacttctgattctgtattcgattatcacttgtcttttatctctgctttcttattgtatatgtaaaattgatatatctgctatacttttccttctgattttaagtaaggcaggattgacagctctggtagagtacaatgaaaggaaaatatttgaggtgaagctgaaggaaatcaaagcggtccttacgagccaagtgacagaggaaataaacgtagatgaagtgactgaaatggtgaagcaacaggtgaaagatgcaaagctgccagagactgaggttgtgcatgtgatctgggatgggataatgaatgctgttcaatggtctgggaaaaaccagcagcagaattcgaatgctgtattacgccaagtgagttgattttctattttattttgaagcaagattatgttgttttgttcaaagctaagctaagctagccgctgttttgtggtaggtgaaaacatgggcaccccttctgaacacgctgtgtagcaccgggaacatggagatggaactgatgtataaagtacagatgcaatgctatgaggatgcaaagctgatgaaagtgtttcctgaggtagtgagatctctgtatgaactggatgtgcttgcggaagacaccattctgcactggtatcgcaaagggaccaaccctaagggcaggtactattttcgagtttttcacaaaaacaaggttaataatagtattctcttagtaacatatatgtaataatggtttgtgttggttttgcattgcaggcaaacgtttgtgaagggattggaaccgtttgtgaattggctcgaagaggccgaagaagaggagtgagtgagacgctctgcttcttgttttctctttttactctcttctaataaaagaaagacaatattttacttctcttaacgcaaaattcagatgctctacattgttggtgacttggtgtgatctcttttttgaatgaataagtacttctttagttgattatttgttggttttggttaacctctttgtgaggtaatacaggaatgtcatcttgaaaaatactaaccaaaaaataaaaaatagagaatataaaaccttatccaaaagtagggagattgtgttatttaaaagggaaccacagaaaaaaataggcgaggaaagaccattaagccgttggccacacaatcagatatcataatggaaatacactccgatgactacttcttccttcctcctccctgcttctcctccctcagccgcctttctccggcggcgcttcttccgccactcctggctttcctctaagatccaccaccgtcttccccaaggtacattactactcttctctatttcacctgtcaccacttctctgatctttggattattctggaatcttcgttttatgtgatcttgttacaaaaagtttccattacgattccatgttttaacccttaagttcaaaattgtggtacaattctatctcataggtgttttgagttgaatgataccttctgattttctggagccctattgattgtatatctcccactctactcttatcttactatgcaactatcctgtctttctttacttgcttcagttatgaatgattccacgaggactgaagtatccattgataaatcagaagtagacaagcttgttgacaagattgattttggggaattatgcaacgattttgagtgcacaagtagtccgcaggtggaatccacagctagacaacttgttcgcgacattcttgaaatcagagaaggaaatcgtgcctttgcatgctatgcagtttccgttaaatataaggtacatttctctgtcacattgtattttacaatgtacattgcttttcagatagatatggttcgtcgaaaatttgtcacttgttaatccactttgctcaaaatgggcacttgaatatatgtggctatgtgctaaagggagtagtatttatcttgcgtttagacatggtccagtaaaattgatttgctcgaacattacaacacttgtattccattatttctcttgtgatgttctgatattccttggcagtaagtaagtacatcgtgattgatagtgattgcaggatccggttagaagttttacaggtcgtgagaagtacaaaagaccaatgtggataactagtggattagagaatcctaccgtggtaagaactgatcacaaccttttaacatttgttttgcattttctaacccttttggttcacaagtaatgtgattcccttccccttatttgtagacggtacaagagatggtaatgttatcgaccagcgtcttgcgaattaaatggacagtgaaaggaaaaccaaaatctattcttgctgctgtaagtggagatttgatagtaaaagtcaaatctgaatttactcttaaccagattagtgggcaagtgtttgagcatgaagagtcttgggacttatcttcatcatcccctattgctcaagcctatttctggacatcccgccgcctctttgctgcttctgaatccgcaaaagatgtcgccgatgtcacaaaagacttgaccgccaatttgacaactcgaaaagaggacacagatatatatcgcgatccaaccgatccaaataaggtcagcttcatctaaacactattttatattgtgtctatgtaaattgcagtattgaatatataaactaagagaatgttagttgtggtgatgcagtttttccaaagagacaacagctttgagagagatgtgtatcaaattgcactgtttctagccattgtctattttgttgtacagttcttgaagaacacaatctagttaccttctctcccatcctctataacagatatgtaaatgcctatatattgttgtatatgatctgtaaaaaaaaactgaacaagaaaagagatgtgtttgtttgtgttggaagaaagactatcaaaatgattaaatcttctttaagcatccatcaccaagacaatgcatattataaccagctgaatggtttctttgttactatgctaaggaagtaaaagccattacgatcaatggtgacaaaattgtaagaagctttgtgatcatcaacaaacgaggagccgatgagagattgtctgcgccgaccgagtaaacacctcctgatccgtcttttattttgatgcttgatgaaccttaaaacatgaaaagcatttgtttgtatgagaaagaaaggatgcagagtttgctacttttttgggttctagagatacttacagttatgatctgcccatccgatcacctcgttatccagatcgtatactactaacttgttcgagagcaccaaatctacaaaaagataagcgaaatgactatcttctagagtgagtgatatggaaagaaagattttattagaattttgaactttacctcctaagagaatgacttctgatctttcatctgttgtcagtccaccagcttgccaaccaaagcagtacaactcttcctgttagcaaaaataaagaggcaattccgatcatcgaaactcgaaacatcctacttagaacatttcgaaacgttttgttgaaatctcgaaagcaaagtttctgttctattgacttacctcaagtgtgaaaagataatcatgcggataaacggttagtttgacagagtcctcaaactcaaaacttactggtgggaacgcctcatccacgctgcgagtttaaggaggaagagcttagcatatataggtaatgaatgatgcataatacttaagaaaggcttgctttataggtatctaaaagaagaatggtttggaaataaacacggtagggaaagtcttactttgtactaaagctaaaacattggaaggtctcctctactatgtgaagttttacaggttgacgagcaagaatctacacaagaaaaactcatgtcaggattgtgattttcacacaaactagaaataaacatgcactaatatgaatatgagcagagaaagttaccgtttctattaaggagtcataaagaacctttggaaagtaagccaaagttgtaccactatcaacaatggttcctccgttcctcacaatacttcgtggaaggtcaagagaagttccatccacatccattcccatcaacattacattgtaatgcatcctaaaatcgttgagcaacacatgttagcggccataaaacagaagctactcctactctaacttcttgattgaaaagaataaatgacttgagaagagatattacgtactgattaggtaccataggagttgttttaacttttggagaatccactacaccaacagcaaaaatcccacctcctttaacattatccaagcaatgcgaaaaaactcttttcgcatcgcccgtggcagctagttgtgaaaggacagaggtatttgattgcccaaatcccataacaccatcaactgctgagtcaccattcccaagttgtccagattgatcacttccacacctttctcaaagaaaagcccttatgagaaaaaatacatcacaaaccacaaacgaaaagataaggaagatattaaagctcacccgaatacaacttcttgaccaagtggtccagttttaagatcgccagtaacttgttcaagtgttaacatgtcccttataaactttccatcacttgtgctttcgtccgcatagacaatgtgataactacatccaagagcgggttgacagctatccgattgcgaaatgaaagagcaaaaatcatcatcacaaccaaccttcttcgaagtcgaagaagcattcatgtcgaacaacgataaacgaaactgcattggcgtaaaaaaaacaaagatatgatccatctgtgttagcactagacagcaagtaaataagaagaagaaaacattacattcaaattagttttcgtgggacattttggacacggcttgcaatttatccaaagtatatcacttcctgtatcaacttgtacatgatattcctttggtggcgaccctagcttgattttagtgaagtataaactataacaaaaccaagaaaatgtaacttcattagtacctaaacttaggtatgtgtcccaaatgttacataaattatgacggtactaaatgatcgctgcataatcattttcgcttattgtcaattggttttgagtcggaagctatttattctacgttaaactattgaaaagagagggaaaaagaacaaaacccgacagagtctacgcggctgtctccgccaagagggagatcaatggaagcgagcatccgagagtggcggcgcgtgtcatgagacttgaaatgctcgaggttcttcttcttccctgcgaacttgtgttgtgccttaaacacgaaattggctgatgcaaattcgatcacaattacgaaaactgcaaccacaatgcacaattttctcctcagttccatcgcctataatatgttagatatctccggaggagaaaaatttgagattttgtttgaattaatgtattgaattctggtgatttctttgtttcataatcagacaaagaaacggcaaaagaaaaacacagaacgcgttttcaaagacggatttagaaaagtgccaaatgtgatgtttgaattttttttttttacttttcatttattacaaaccaatgcttttgtttttatttcctttaaaccaatgcttatattagtaaagaaaatccattttgggaacaattgacaaacttgaagaattcaatatttaaggagttaagataaaatgataggaatgaaaagaatgattggtgattaactgattataaacttaaaacgtaaatgataatttagaaaaactgttgggctaaataattttgataagaaaacggtgataaattatagtataatgtttaaaaacttggaataagtttttgtcttgtaggttcaatcctaatgattagtaatgaatttgataagataaaacttagaaggtagtttggtcgcaactactttcttcattatgaatgttccgagcgaatttggaagctctccaaagcttgtagaagctcccaaagaatttgaaagctatggacaacttcttaaaaaatccattagtttttagtgaaaatctttacaaggaagtgatatacggtttcttgtataaataagctctaaaaaactaagaaaaaaaaaagaatttaaccaaaaataaaaaagacagaacatatttttgtaacttggaaaaggtagcaa

SEQ ID NO: 117 - DNA, 87192 bp, Arabidopsis thaliana
aagcttgtagaagctcccaaagaatttgaaagctatggacaacttcttaaaaaatccattagtttttagtgaaaatctttacaaggaagtgatatacggtttcttgtataaataagctctaaaaaactaagaaaaaaaaaagaatttaaccaaaaataaaaaagacagaacatatttttgtaacttggaaaaggtagcaacggatgatctagtcccagccgataggtgtgaatttttgatgaccattcactaaacaagtaacaaacgttaaaattttaaaatatgatgacatcagcagacccaaatttcctaaaagtccttgcaactctaataaattcctattttctgattttcgttgaagaacgtaatgttgaaaattcaacaagaattgagtacattgtactcgtttgcaactcattgtgtgaggtctcgaatcctttgctcattttgatttcaaataaagctttctttcccttaattcttagattttgagatgggttggctgaggaagaagaagaagccaaaatccgatatagcgtccgagagaggggccaagttgttagaagagctcatcgaatgttgcgatggcaaatccaatcccatcaaattcttctctgctgatgagatcctcaaagccaccaacgatttcagcgactctaattttgttttacgattagaagttcccttcaaatggtattctggtaagaacgagaatcatcccatgatactaatcaagaaagatgttggctggtggagtggcttgagagtagatcgtttgtgccgcgacatagcagtttcatcgatggtgagtggtcacaaaaacttcatgaagttggttggatgttgtcttgagttagattatccagtcatggtgtatcatagtgttaagaaacattacaaattagaaataagtgaacagccatggaaaaagagaatgaagatagcagaagatatcgctactgctttagcttaccttcacaccgccttccctaggccctttgtatataggattttgtctcattggaatatcttattggatgaagatggtgtcgccaagctgactgatttctctcactgcgtctcaatcccagaaggagaaacatttgtccgggttgacagagacgtgggattatatagttactttgctgataattacgttaggagtggcctagtctcagataaaacagatgtctttgcctttggaatctttatgggtcataggcttctattaggatacgaatactatttcgagcattatcgaggagaagaagaagaaagtgaagatggatttgacagtctgatgaaaagacatgctcggaatttgctctcaacattaaaggaagacagaccaatggaagagattgcagattcaaagatgatagaaaagatgggtcaaatttcagaacaagagcgttgtcaaatgaaagctttcttgaagctatcactgagatgcaccggccctagtgaagaagttccaacgatggtggaagtggccaaagaactaaacaagattcaaagatctctttttaacgactcttcttctctttcttcaggtcaaacccaactcgactctgcccaagacatttcttccacagtggtcctctcaaattagacactgctaccaagtattgcctgccaggtatttcatgaaatgtttcaatgggttatgttgagctggtttcgttttttcaggaaaaaaatcgaacaatgtgctgaaaataacttcgattcttgtttgtattaaaacattatcaagtttcatttttgttgttgtatttataaatagtgctacgttacttttgattcattatattgtcccttagagtctgtgtatgtgtgtttggattttgatggatgcgtctgtgtttgttaattcaagagatatctactcgtgtattataagggaaagtctcccaagtcaataacaattctaaagtttacattgtgagttgggaaacatggttcattgacgtaagtttgcaaattccagcaactacatatgaacaatgcaatcaatattgaactgtgaactccatgattgtttggtggatttggacattcacatctatactaaagtgaaacattcatgacggtaaacttctcttggagctgtatcttgcatattaagaatcaaagaatatcagtgaattatgatcttcattgtcagctttgtcttttcaagagttctgatcttcagctttgagtaatttccgttttcaattccaataaaatatgttttatgaaaaaatcaatgttattcatcgaccaaaacgacgtaggatagagaaagaaaaatgggaacaacatccgagtagcctccgagaccacaaacatcctccaataagccaaaagaagacgagagaaggagaagagtcgaaatcgccattgaaatggctctcaaagcttcacctgttaccggattattccctcctctccgtcctactgcttcttcttccccttcgacttcttctaatcgcccttgttccctcaggattctccctctcagaacatctttcttcggtaactcaagtgcgtctccttcttctctacttcgctttagggtttggctttatcttcatttcactagcttgcgccttgtttggattgcttggaggaaaatagtgcagctatttgctcaaattgggtaacgtgattagtcagagagagaattgaagtaaaattgggtattgattgtgctttttagtgtatgatttgtcgattttgtgtttcttgatttagtataaatgaggttactcttagtcagtgtctataacttcagtatgctttgactgtttcacatgtctaacatttagttctcttgctttttagttatgttgttggtttgatgtttccatgaacttattgttagactcaataaagattattgtttatttttacaaggtggagcgctgagagtgaatgtgttgagattagcttgtgataatagactcaggtgcaatggtcatggtgctactatgaatctttttgaacgattttctagagtggtcaaggtacttataccctttctcattctgtatttgactgtcattatgcattggagttcattaatcagttctcttgtttatttttcattttaataagcgaagtcatatgcaaatgcgctcataagctcttttgaagacccggagaaaatcctggagcaaactgtcattgaaatgaatagtgatttgacaaagatgcgtcaagccactgcacaggtgcacttcttactcttgaacaaactttatacattttcctgtacgatatttttcttcttcatttttttactacagcatggttggcccctatttatgagattagctaacttgtgtattatcaacgtgtctgaaggttttagcatcacaaaagcagttacagaacaaatataaagctgcacagcagtcttctgatgattggtatgtgtgcttttgcgtggaccttgcttccatacctaaattcttctctgagctgattattcttacatgttacacgtttaaataggtacaaaagagcacaacttgctcttgcaaaaggagatgaggatcttgcacgtgaggcccttaaacgacgaaagtcttttgctgtaggttatatctatccattcttttgtccaccagttttctgtttcttaagtttgcttactccaacaaatgaaagaccctaatcgtttagcgcatcgagcgatttgaggctgatctcttggttttctgcaaggtttagttaggtggtggtgaaagtaaaatggaaaaatttagatatctaagtattctgtaattctcctcaggacttgcccccttttccaatcattttttgatgcaatagagcttggcagtgtttatagtactcttttgaaatatattgtttgttgagtttgttaaggtgattgcagtgacaaaagatattttggatatatataacactacagatgcagccaaaaacgacccttctgtgtttctacatattaggatgttgactattgtctttcagtatcagaaaaaaaaatcaaaatcaaattttggttctatgtagaatttcggaaacagccaaacacgattcttcagtgttttttacatatcagtatcttggctatcatctttgatgtgcttttgtttgagcaacagaccgtatggctctttttcagttttgttgatttatgtatttgtgtaacctttgcaaatggctaacgaataataggcaggtaaattttcactatcttttacctgctgataccttatcgactactgaagtctcttgaatacatccattctctaactttataaagttaccttaaaaaaaaactagaactttaggttttgaagttattaccttttttcttaacaggacaacgctactgctttgaaaactcaactagatcagcaaaaaggtgttgtcgacaatcttgtttcaaatacaagggttagttttcaccatatttatctatatattttgtattttgatttactatacactgttggaatctttagagctatgattaaatgaatttatcgtcatgcatttactcaataaaacaaagaatcatgtatacattaattttcgtcatgccaccatacaatttgaatggtttagagatagtaccatagttaaatacctccgtcataagattcatatgccaagtatctctcttcacgttttgtactaaggagctattgtatctctatggacataatgtagaagatattttagattagtatctgtattttcagagttcttccatttccatagcatatgattcttatattttctgaaattgcttagggcgaagtttggttcttagaaaatgagttctgtaatttttttgttgtttccccttttatttgcagctcttggagagtaagatacaagaggcaaaagcaaagaaagatacgctccttgcacgtgctcgcactgctaagtttgtatcatttccctaatactcttctttatatcatttatggaagctcgtccatacagagtgtttcttgtcgatttatatattgtcccaactctatttgttttttttaattcctgctaggactgcaaccaaagtgcaagagatgatagggacagtaaatacaagcggtgctctttcagcttttgagaaaatggaggagaaaggtatgatctcttgatcctccaacttgtctatacgcaaccaataccagttagtcctattattcctttctaaatttgaagtttggcctgtagttaggattagcattcagtctttgaaagtgagtttagattccactactttctctatgttagcttgtactacttgccacctaggcgacagggttacattagaaatagtgctcagattctgggcaacgtggatgtggaattagtgttgtagttacctcatgcaaaacaatagaacagtaatataatgtgtgcaatgggacatcggagtaaaggataaacttagcggaatccttgcttgtttagatacaagagagaaatgccactggataaccttttttcttattgctatttctagcaattcgtttaggttctggttgatcaatgttagtccgtgcagatataccctcttattctttctgtaaatctctgagttgctagtatcagaattccgaacgtgtaatttttcgttgtgaaagacttcacattctgcttgttgatgaatgctcagtctgatagagactaaaatctagaaagtgcttgacagttatggctatggagtctgaagcagatgcactaactcagattggaaccgatgaactcgaggggaaggttggttgtctatctcttgtcttggtatttctatgaggagaagaatctttctttctcttttaaatttgtttcagaggtaaaatcttgcattgattagggttcgctgctttatctaatatcttctacgactgataggatggtctaatctggtttactgtttgtttgttggtaggagaagaacttgtatatctgcaaccatcttgacattaacgtgtatttctttgtgacttgcagtttcaaatgcttgaaacttcatctgtggatgatgatcttgcagacttgaagaaagaattgtctggaagctcaaaggtttgtaaaacgtcaatcatcttgttagttccgtagagtttataatctcatcattcgcgaaaatattgtatccacaagctaccatatgtccatattgcaaattaccgtccgaagagactaatgggttcagcaatttgggatggttcactaaaatcaacaattcaaactactcaaattacttctatgtttaccttactgtcttgtttcatgtttgacgatagcctactttgctactaacattttacttcactgagttaagagtctgtgaaacatacatcttatagttatcctctgtttatatgatatggagcagaaaggagagcttcctccagggagaagcactgttgcagcaagcacgagataccctttcaaagactcagagatcgagaatgagttaaacgaactgcgaaggaaagctaacgacttttagatatcggctgtttccgaattgtgactgggttacattacgttcctgctgtaaactatcttgtgtcttgtagaaagacacaaaaagcatgtgtactcttaaagtaaatatccagctatctaatccccatttatagttgggttatgtacattcagacacttttgaaagtgtggtttccattttgactcactttgtgtcaagtggacacgtttttttataagctgttttactcgcataaccctctatcagcctctaaggcataaaagaaagagattcgtcgatttaagatagaaatgctcgtcttccatgttgacttgtctttccagtaaaacatgttgccatattttcctagattcctagccaatcgtcttcagaaactacaaggtatgtctatgtctaatcaactgtaccctcctcattggatacttaaagagcttaataatgagggtttgaaatgttaccaaaagttggtttagccacaaacacaattctgcaagaactccttgatactgctagtcctgtttcaactttcaagcaaatatatatctgtttatatgatgtggagcaatcctctttttccgctaacagtaatgttaccaaaagcatgctttcaaatcatatgaactgggtgtctcaggataatgtggataaagatcccttagagatattactcttaacgaaaaagaggcacaattgtggcaagtaggccatattgagtttagtttggaaactagttgttttttaaattcggaaactcgaactcgagtgagagatatttcacaaaatgattcttatttaggatatcacccttttttggacgggtcttggaaagatagtgataaattctcaggaatatggtggttcaatacgtcatcagatggagttacaccaaccatgagagctgccaacacccttacacgcatatctccactacattcggaagtggaagctcttctctaggcgatgaagtgtatgattggtgttaacaactaaaaagtaatgttttttcgaaactattcaaatctagtgaatatggtgtgttttctaaccgaatggccgacactttcattgtatttggaagaacttcagaatgataaggaagaattttcaatttttttgttatctttaatgtttcgttgtgctaatataaaaacggatgatttcactcaaaaaattcgtaccgaactgcattagatcccaaatgtaaataattcctcagtagaaaaccaatatgtctcaatttttatcctttttacaatatttgagataaaccttttttcttcttcttcttctatttattaattcagtttctcgttagactcaaaaacttgcaaaactctcgtccgagatatatcgactccgcgaccctccactactctgctgatctacacacacacacaaaaaaaaaaaaactcaatcgccagcaacaatggcgaagctcacacttctcttcttcctttcctttctcatcttctcctcatccatcgctttccaatcagacgagctcctcgttgacgacgacgaatttggtctagaaggagcaaagccccgctccaccgatctttacacatcttcttcttcttcgccacagcagcagcaacagactccaactatccggagaagatactcagatcctaccgatttggattcaaaagtccaatttactctcgaacatgccttcggtgactctgatttctcccccgccggtactttctccgctcgtctcaaaacctggagtcatggcggaaaggtatcgagattcggtttattgattttaggtttttggatcgaatcttttcatgttacttcgatcatattaagtttcatctgcaaattctggaattggcttgctctgaagtgaattgatctaattagagtagtagcatagtttaattcagtaattaagtagatttgatcttgtgtgtatgcagacattaacgaagctgcgattctctagaaatgatttttctgctgaagagaaagatgcattcaaggtaatgttctgatgttattgatttatcagttgtttgtctaatttccttggaatggagatttgaatttttttttgttggaatgtatttgtagaatctgctgaaaggagatgacttttatcggattcggcttccatctaatgtggttagtccaccagggagagagtttgtgattgcatcagtgagagctgtaagtctatgtctacctttttggttgatttctttgtgattgttctttgattgtttgctagtgctttcccatgtctggaggtgtaaattacaggctttgttttaagtctatataaaagactctttgtaaccatggtggttttgttttagtttcactctttgaactcttagtaggctacacctttctagtaataatctaattctactctttcgagatatgagagcttgtttatataattggatcggtatgaaatggttagtcgttttgtaatacacttacagatttgtttctaggctagactgataaagacaacactcgtttagacacccttcttgctttttcccacttttcagtcagtttatgtgtctgttatagaacaatatacttgtttgattgcagagatgtctaccacgggatggcttggatgagcatttcattatacacatggtaatgcccttttttggtataaacttttgttgagttcaaagtttagtttgcgccttagcattttaactactacttgagtgtattacagagaaagttgggactatgaatatagttcaaaactgtgttcggcacagtttgtttacttgctaattgctatactgtctccgtttgcaggaaggtgctaacatcttggcagttagttatggttctcctggggcgtgtcaatatcctcgccaattgaaacttgtaagtgaactcgattatcccagcttctctttttatttacactctaactgagataaattggacatggactgatcctttcttgccttcggtctagaatcagataatactgatacaattatgaatgcggatgatgtaattgagtcattatctttccattcaccaatattttctgtgatttaatatattttgagtcatattctagagtacagtatcgcaccctctttctctactgtgcctaggtattttcagcataagtggactatctataagtgttctgtaatatgttgatagatccgcagaaacttttgtgaggaaatagtaataccgtcagaagattagatatgtgagagtatggtcttaggatcactgtaagcattccataatgttgtgattttgcggtgtggtgtgaagtaattagtgttgggtgactgtgccatgttctgtgagtttttttgtgctggtctctctaagtgtcactcatagtgatattttctgatagaatccgaccttgggttctatcacatctcttgtctgaacactgaaaccgtatattcatgaaggaaaaaggttacattatcgttagagcttctgactttgattatgtatgcgttctaatctacgtttttcgttttgcttactgtagccagcaaaatggtcgtttaactctcacacaattctgaaaagcagtgagcaggcgccaaggtagaataattattgtgttttttttttgcatcaaaatggcttaactttgcatgatcctggatgtctatattcgacttgtgttctatagatataaatatatttgtcagttcatcaagttatatcaatcaagaaataccattgcttctccaccctttagcccaataactaatatttttttatcttatccttacctgactgtttcacagaactccaatattcactgaggagattctaggcagtgagaatgtagagggagaagttgaaccaccaccagagagatcattttgggcgaaatatgtgagtaatacgataaagatcttttgatgattccttctttattttaggtcttgatgtaactttcatatgatacgcagtggatgtatttgataccgctgggactcgtagtgatgaatgccgtgacacaagcatcaaacatggctgaagaacctgcgggtggacaggcaggaggtgcacaagtgcaaccagctgccaggagaagatgattccacttttacttctcccaaagcaatgaaaggtagaccacgccgcaattactatgcacaaatttctcttttacctagcagtctttaaatcttatgatcctaggagaatacatttatatatttgtttggctatcttcgcagctgtggatttatattatttggttgtaacttataagtcacgtggaattaaatgaattcggagtttgcatggaaatatcaacaaggtttaggaagctgtctttgaagtgcgttataagatcaaatctgatttttagcttatgttgttgtagctgcagctggttagagatgatgattcaacagatcttcatgtaaaccatcttgccatcatttggttttatgtaacctttaattttaatcctcgatcggtgtgtttttgtactcaccaatcgggaaatcaaaaatcttgtcttcatgacatatcaagaacaaagacatttagcagcttccatatcttgttttgatcgcatttcacctgtccaaccacatgtttgtcaatttgtatttgttagtaaatttaagggaagtcaagtcgtttacaggccatgagagaaatcatttataaaataattataaactgaaaaaataaaatatataaagggtttattttctcaaaacccagtttttagggatgttattatggaaatgcgggcctaaacgggcctttagcaattcaaatattagcccatagaatgtacaacttttattttttatttttcttaatcataaacgacgcagttcttgtgtcgatcttcgctcatctcttctaccacgagcagactgtagccacggcgaccaaaaggggaacaaggatacgattacgacggaatactccgccggaaagttatttctcgtccttaacggtgccggagtagtgtagaacaggtcaatagttaatttccacgttttagtttggtgatttgagggattttaggctcttgattggttttggaaaatctgattcagggattgaacaatatgggtaagcactggaagagagattctgattcgggagacgatactccatcgtcagcaacatcgtcctcctcgtcatacagctcagacgaatctgattcatcttctagaaagtggcggaagaagcaaaaggagcggcggaaaagtgacggaggaagttatgagagagagaaacggaggaagagagagaaggagaggaagaggaagaagattgagaggaaggagagaaagaggagggatatgaagaagaagaagaagactaagaagcgtgaatatgagtctgatactgagtcttactctggttctgattcattctctgatcaagaggatgatcctgaaactgtggttaaagagatgcttttggagtttcctaatgttggcaatgatttgaaacaggtaatatgatacttctttactctaagataggtttggtttatgagtactcagtagtggaattgtggtgaaccctgaactcatagctagtgctattcgtttttgatgtagcttttgaaaatgattgatgacggacaagcggttgatataaagggtatttccgagagcactttgaagaagaggttgaagaagttgtttctttctttgaagttaaaggaacgtggggatagagtctttttattaccaccaggtgcttctccttctttagatgtagtggggcatcttattaaaggcggcgaagaagatgttgagaaaagccttgacgattcttccccattgaaggaaactgaaaagggtttggcagatgagaacggtttgggatcgaattcagctgatgatgttactggtccaaagaaaaggtgaccacgctttctatttgtggttaattctagtgtgcttgatattaattggttagaggataaaacatggtgtgataatttgattgtagggtgattggacctgcaatgccatcagctgagttacttgctgcagcagctaagctaacagaagctcaagctgaacttaggtacttttaattgattatcagctcaaagatcattgtctttttattttattatggaataaccagtttaatagatattcattataaatgcttcagagaagctgagctagaagaagattcagaatatttcattggacctgctccaccagctgttgttgcagaagttgcatcgtcgaacgaggcagagcgatttgaagaggttcttagttttccttctggcattatcaatacagttctttcttttacaaagtttatggatagtgtattcgctagagtaccaactcatacttcttgcattaacaggtgacacggattatggaagctgacgctaatagtccatacgacgtcttaggagtgaatcacaatatggctgctgataatatgaagaaaaggtatggactctgttacactttttggaatcaagaaaaatgattattagtcactaaataactgcgctcaatcattttacacaagtttaagttatcagttacataattgatgatatagacaattctggtctgtaggtactggaagctgtcgcttcttgttcacccagacaaatgttctcatccccaagcccaggaagcttttgttttactgaataaagctttcaaagaattacaagatccagaaaaggtgagataagaatcatctactgtctgattatttttcaatatgctcttagagacttactgaatcatgtggccatccatcatctctttatgtgtattcacttaataccatctcttatatattgccctttttattatatctctaatgtattaatgtctacagagaaaagcaatggatgacaagattaaacttaaggaggaacaagaggcatttaaggtttgtaattctgccggattgatctatgtaatctttcaggataaatatgttggttttacttacatagacatggtgtatttccctacaggttgaattacgttcaatgcaagaagcagcacagtggagaagatcacaaggtgaagatgaatcattgtggcatgcaggctccttaatctctttgcctcttagggatgaaaatctaatgaagatttttttccgttttgcaggcatatcaatggaaggggatgcagagttgttggcagcaaccgaggttaaacctgaacctaaaagagatgagtggatgaccactctgcctcctgaaagaaaggtgagagatccacaattgattgaaaacgcttttgaattattggatagtgtttaacttttaaatcttatttggggttcttctttcgcaggttggagtggccgtgcagcaatcaaccacgtttagtagaaatgctagagaaggacgcggagacactacagcgtggactgatactcctatggacaaagctgaaagagcaaagatgaagtaagaacacactaattaactacatttcacgatgttgtttggtcatgaaagcaaaacacattggttctttttgaagaagttcagctgctcaaacctaagttctaggtctactataattagcctaggactgaatacatcaatcgtagctgttgtgagttgttagatagccattagttagggttggatttatagggctgtctctgcagattgttgaagggcggagtagatattcaaggttttggtcatttggttgaagtttcatagcgttgttcttatatttgttctttccgctgttcttatcagttacttggaggcatacaacaaggcgagtgcgcttgcatcaaacgaaggggaaaatatgaaaagaagcatggatgctgagcttgtagacaagtataacaaagagaaaagagcaaagtctctggtagagaagcacagagaagactcttcttcttcttcaagccgtctgaaaaagaagaagaaattgtcttcatccaaagagaaaaccgagaaggacgagtgggtagggaaacatccgtggaagccatgggaccgtgaaaacgaccttactgccgggagacagaatgtgaaacttgatgccgatggtatggctgaaggtttggcttccaagttttcttctgggaatttccaaagaagcttcctttagagcttgttgaaggaaacttgttttgacgataaatgtatccaattccaaatatttttggaactttatacccaaaaagagtatttcttaccaaatcttgttttttcttttgctactgtagtctttttttttcacatgcatactaagttaaacaagattcgacactttatgtatgttctgtggtagattataaaatgagtatatgttgaatagttattaactctatgtatgttccatttatttgaacgctaaattagcaaatggattttttttttttaaatgaaagacgagccagggacacttgaaggattgtttaataatgcaaggagtgtctgatgcgtttaataagataaaatcaagagaaaacaaagttctttgaaaggcctcgtaattcatgcagaaacacatctaatacttatgaaaccagagtagtagagccaacacaaaagcttatccattctcatgacaaaaagaaaatgttgtttgcttctttacttcttattaggctttaacaaaatctgtagacacagctgaggcacgcatgaacaccgaagaatttgtttctcttttcacttagcctgaggatgagaagcaataaagtcaacggctagatcgatggactggatcttgtctgcttcattatcagggatctcaaacccaaattcctcctccaatgccatcacaacttccacactgtccaaactgtccaaccctagatcattttggaaattggcttttggtgttacctgccaccagagtacaaatgtattagtacagagttcaagcctagtagaaagcaatgaaattggagcctgagacttccaatatagataacaactgattagttcagatagtcagatgaagtctccaagttattatttagtgtttcgttgctgatcaagagggctaagaagcactacatgaacactcaaacacaaagcctacagtaaatgcacaaataatcactcggctaaacttctcaaaaagctttcaagatacaagaatgataacttcttttctacatgatgctgaagggatcttgaaaatctcaacctaatcaaagataagctatcagtagaaccacatcagtcaaatgcacttttcattagctagaaacacccgaacatggcatcgagaaaacaagaattcacagaaatataagagaacaaggagcgaatgtttattatcgcttaacaataatacataggactcactaatagtttccaacccttcgaggaaaatatgcattgctactagacgtaaataagaaatggacaaatctccttaagccacaaaagaagacatcaacacaagtatgaacaaaagtttccaaattgttgtaatgtagatactcaaatgtacatatacaattctcaagacgataaaactttctcctttgttcttgcaagtgaaaaataaaacgatgcagaatcctaagttctctctactcaaggttagtaaataataacgaataattgctgagtgatagacttcaatgaatactaaatccagctacaaatcaaagcttttaatcatctttcatttctagataacaagtaaacaccagaaatcaccacggatcacacaatttcatcgtaatacaatcgaaaatgaagaaatgggtcggatcgaagaagaatttaccttagaaggatcaactttttggaagtttttgacgacagagagaactcgatctgtgacctcagatttgtcaaggaaagagcctctaacttcctcggagaaacgacgaaggagaatggagaaaggaagtacacattctctagggttttgaattgttggattgacgttgactctcaggtatcgaagcatagcacctctcgccgccattgctgtgtattgcagagtaagagaaaaacctagcaagctctttctctttgctctcgaaggagagatttccttactttgagatacgcaaaacgacgtcgttacatttgtaaagtgggcctatctgagccctctaacgcttgggctttgtcaagaattttatctagtagtatcagtttcacaagtcccgtttaatccgtttgacttggcattcttcaaatttgtgctttcagaatctagctcccaaccaattgaaggtttcaaattttaatttagtactattaagcaattttgagatttccttgttatcttcttcaaagcaaacgttttttttatctcttacaccatcaactttacatagtattattaatgagagttgcaagtagatttacttttgcttgtcttgcacctaaagatatataccttgatcttctttgtattaagtttattaatagaatatatgaaaatctttttgatttactaattacggtaatagtattctcgtaatttttcttccggtatatattggatattgaagattactactttacaaagatttcagatttgtggacaatttcaaaaccacgttttggcaacgcattttctagattattcctttagatattgtgagatgactcatttattttatttgttatcagatttcagtaccagagatatgaactcaaagaaatttactgaaactatgaactcaaagactatatactacatgtacgacacacttttaaattcttgtcattgaccaaataagctcttatgtatgggttataaattttgctgcctggtatcttctccacttcactattctaaatgctaattgaaaaaaacactcaacgttattgaaattatatttgtcaccaaaagaatcagatccttcgaaaagaagaagaagaatctgttttattacaattggtatggttttctctatcagttgattcgatattggtgtggtaatgaagtggagaaattaaagaatagtaaaattaaagaccccacttattatttcttccctcaataaaaaaaacaaaaacatttctctacaaaaatcataaatgttataaccaaaataattgaaaaaagtagctcgagagagaagtagcatttgctactttacccaaaatccctaaccacataataaaccaaacccaacaaagaaaataaaatttcaaaccaaaaaaaaaaaaaatgagaactttagaagaatcgaagatctctattgtcttcttgttgcttcttctcttctcaatcttcatcagttccagtcaccaggttagtttctttacttagatccctctaaagttctcttctttcacatctgggtatttctaattttgttaaaaatcaaacctttaacataacctgaattcaaagttttgagctttatgggttttgattggaattttgtttaggcaaatgaggtattaccagctgaaggagataatgagatgatgatggtgccattgggggaggagaagtttatggtaatgaatgaaacaagaaggaaacttggaagttttcagatatgttcagtttgtacttgttgtggtggtgctaaaggtctttgcttgccttctccttgttgctatgctattaactgcaatatccctaatagaccctttggttactgttctttcactcccaaaacttgcaattgctttggttgccatatctgagatcttctacttcattgtaatttgtaagtttcttattcttctctgttcttagtttctgctcagttcatgttttgatgtttggttatgaatgttttgattccaggggagagaaacaagtgaatctaaatcttgattcatcttcaagtgtgaaagggaggaaaaaaagaagaatatctgttcttggtttgagtcttctacttattttttgtctataatttatttttcagtcttcattaaatttcattacctactatctcagcaacatcatcatcctcattaattaattgtctttttgcatttgccattttttcataattttctagggttttttttgttttgagaatcttgttcacacttcaagcaagatttgtttcttcttctctgttcaatcaattctctctatctgtctttctctctctctttttttttttttttcattctcttgtttacttcatcattttgtttcttatgtgttttaagaaagttaaaagttagaatttagcatattttggaaaagagtcattgtttggttaagctggcaattggaagagtatttaatatgatgatgatgatggtattgatggtgatggtggtgatagtgaagctgttaaagttaagtctttgtaatgagtgacatgttaagaaaatggatcaagtttagtgccttattctgatctgataagatctttaagtgttttagtttaaaatagaggaaaaagagtaaaaaagcaattattcatcttcaagtgcagagactagacaatatctttgaatatgtttatttatctgacactgttattattgtaagagatgttttatgtcaaatgtttgttccaactctctctattgcgttagcgtaagtaacctgcaagatctgtaaattaattactaattgttatttattattcacacatgggacatcataaagttgtcttggtgataaatttagtcaatatgtgtgtgtgggttaagagtgttgactataccagtttccccgtgattgattggcttttattaaatcggacaatttgcatttatattcacaggtcatgtttattaaactctacattgctgtctaatgtctatagtacaccaagtctattggtgattgaaatgtcggagaacggtatagtttttctgttcttacaataaaaaggtagattaagaacactgattaactcaatgtaacccatacacttacacgtcgggtcaatcttgagcggtgatcttttgggtttacctctaaccccggactggttaaacacttttctcacctcaccacatcaaagccataatcagggcccaaatttgagtgcctacagcaaaaagattttggcccaataacaaaaaactgttttttaaaacaattacaaaattttcgtctaaattagattcaaaactgtatagtaaaatgtttgggactaaccactaaactacagtcacatttttgaaaatgatgactctaaaacaagttataattatttgctgcgtaatacccttgcttcatgggattacgtggagaagaagagtaagtatcaatcaatttattgctagagatttgcaaaagggggaatccgtgtgcagaggtgtctagatgaagccatgagtctacagcggagtttgaatttgcggtggatgagttacggtggagatgacattttccaaacattacaagccttaacacgtgtacctactgagattttgatagaacttgaaattgtttcccaaataaacctcttattcggaagttaggttttggactcaaaatggatgggatgcatcatgaggtatgagatatgtttcccaatgtagtctccggcgatgagattctttatcaccatttttatttaacgttaatacttaaatctttgtaagacagaaaaagaataagatgttagtcaagattagaataacgagacctaatttgtgaaattttccgtagctttttgtggataatagtttgtttagtaaaactgatccgaattaatgtgaactcgtaagactcctccatctcaatggagcggctaattagaacaactactaaattgtgacaaatctaaggttgtctcacataattcaagagtttaaaatatggtatagtcttagatatagatatcttataccaatattcataatttgctaaagctaactagacattcctagataatttaccgccaagaaaactaattaattggatatgtttttcttttctctataatttttgtatatttaattaatgtaaatatacaaaattatatcaaatatattatttccttatatgtttcattttaatcattttttattaaaatgaataattggacacctagatagctaggccaaaacaatttttgacattccattgacttatttacccaaaatggaaagtgtgggtgattctggctgtttagatgcttagacataatcttactttctatccaactaattattacctgtaactgtaagtttcaattttaggcattttatattaattatattaaaataaaaataataacaaatagaaaaatgtatagagaagaaaatatcttaaattacctttgaaatatatattttcctttaaatggactttctatataaaaaataaatcacattacatatatgatacaattttccccctaaatgtctggttttatgccccccaaaaggtaaaatatctatatgggctgtctataaagataaatgattatcactttaccatcaatcacatgccaacacgtaagggtgaaagtaataccatatcctgaaaataaaaattgaaaatagtccagcaaagcaataagaaacacattttatctagtatataaacaatcgtcctcatgctaacaaagcaaaacacatataacaaaaacaatagatatgaagagaaagatgaagttatcgttaatagaaaacagtgtatcgaggaaaacaacattcaccaaaaggaagaaagggatgacgaagaaactaaccgagctagtcactctatgtggtgttgaagcatgtgcggtcgtctatagtccgttcaactcgatcccggaggcttggccgtcaagggaaggcgttgaagacgtggtgtcgaaatttatggagttgtcggtgttggaccggaccaagaagatggtggatcaagagacttttataagtcaaaggatcgccaaagaaaaagagcagctgcagaagctacgtgatgagaaccataattctcagattcgggagttaatgtttggttgtctcaaaggggagacgaatgtgtataatcttgatggaagggatcttcaagatttgagtttatatattgataagtatcttaatggtcttactcgcaggattgagatccttattgagaacggtgagtcttcttcatctttacctcttcctattgttgcgaatgcagctgcaccagtcggatttgatggtcctatgtttcaatatcataatcaaaatcagcaaaagccggttcaattccaatatcaggctctttatgatttttatgatcagattccaaagaaaattcatggttttaatatgaatatgaataaggattcgaatcaaagtatggttttggatttgaatcaaaatcttaatgatggagaggacgagggcattccttgcatggacaacaacaactaccaccccgaaatcgattgtctcgctaccgtcaccactgcccccactgatgtttgtgctcctaacatcaccaatgatctctagtctaagggatgtatttcgagtgaagtgtttgatcgtttgcatttgtgttttctccattttataagacaaaacttatatgtgatgtcttttttattattattaattgttggacaattcttgcgtccacacttatcttatttaccctttcttaagttccttattaaactttacattttttttaacaccatcaaaaactttctctttaagttgtttattacactttacatttattttacaccatcaaaaactaaggtcactaaataaaaaaaactatgaagcctcattttcccataggagcaatgtgagacatagacaaattgagtaaacaattacatcacttggtaaacaatttttttaatatttaattagtattggttgttattgatttaaattttatatcactttctaaataatttaaaatcgtatatttgtatcaagtgatgcaaatggatttagatttgtatcaattttagtgaactgatgccacataaactaatacgacatcgattattgcaattgatgttaaactataattcttgtatcgattgtaaacaagtgattcaaattaatagcattcaatttttttcatgcaactacttttttgtttgtagtatttgttggatagaacgtaatgttatggcttaacatttaaacggccagaactatccacactctccattttggacagatcaagcaatggaaggtcaacattgttttggcttaaccatctaggagccctatttatttgtttttaattacattttaagaaaaatgactaaaagaaaaaatacaatgaattaatatatttaggataatacagtattcaaatatttacattaatttaatatttaaaacagtataaagaaaaagaaacatatctaattagttttataggtgcttaaacatatacgaattcagtagttcttagcaaattttaactattgaactttgtgttcaaaataaccttcctatgatgtcaaatactgaaactattttagaactcttgtgagttatcttagcaccacattttatcacttataactctttttttattatttttaccaatagaaagtttataaccatgtttttataccaattgaatttcttatatttttcaaataattgtaataccaaaagatattcttagagtaatgtactttacaaattataaaagttgaaaatagcgatatatgggctccatctaatgatctcaatgcgggaccagcatgtgatatacgaatgtctatatacattattttctctgttttgtaacaataaacgagtaatgaaattatattttattggcttcaatttgtaacaaccaacaagaggtcgaatgagccaactagaatacagcccacgatcaataatcaaacctatgaaacttccttctctctttcttttaacatttccaaacactatatatactaatgtcacttacctcgattgtccatcaaacaatacatttgagatatcaatactcctgtgagaacaaaatgaagctttcttgtggtacaagctttgcgttcttacttctgtttcttcttgcggcacaatctgtgcatgtctatgcgggtagcttccacaaagacgttcagatacattggggtgatggccgcggaaagattcacgacagagatggaaaacttctttctctctcgctcgacaaatcctctggatccggttttcagtctaaccaggagtttctctatggcaaagccgaggttcaaatgaaacttgttcctggtaattcagctggaacagtgacaacattctatgtaagttacatacaattttcaaaccgttttttgtcatcttttgctattcctatagtacatatatttaggcctacattaattgagtatgtttgtgtttatgatgactttgtgtagctaaaatctccgggaactacgtgggatgagatcgatttcgagttcttgggaaacataagtggtcatccatatactctccatactaatgtttacacaaaaggcacaggagacaaagaacaacaatttcatctatggttcgacccaaccgttaactttcacacttattgcatcacatggaatcctcaaaggattatgtaagcgtaacctttgatactttgtataatcttatatgttttgaggctatgcgctcatgaacttacgttctcttctgtttttgcccctcttacagttttacggttgatggaattcctattagagagttcaagaaccccgaggcgattggagtcccgttcccaactagacaaccaatgagactctacgcgagtctttgggaagccgagcattgggcaacaagaggaggattagagaaaacagattggtcaaaagctccttttactgctttttatagaaactacaatgtcgatggatgtgtatgggctaatggaaaatcatcttgttccgcgaattccccatggttcactcaaaaactcgattcgaacggccagacaagaatgaaaggtgtgcaaagtaaatacatgatctacaactattgcaccgataaaagaaggtttcctcgaggagttcctgccgagtgcacttaaattcttgattctttgatacatgaatatgttacttggcattgcctttgtaactcaatcaagtttttatttatttttatcatttatttgttgctcatatatacagtatgtggtgtttgtgtaagatgttttaagattgaagtaataaaaataaattatggaaaaaagctttcatttgttaacgtaattaaatttaactggccggcttcactagactttttaaaaagttaaaaacataggtagaggagttcattaattctacaataatgctttggaagaacataaatcataggcttactaatatgaagaactgatctatctgatatgaaggtactttaatactctccccagtaagaacactaaattctttcatgtacttgcactgatttactagttttttggtaaacaatatatgttcgattgtatctaaaattgatacattgttctggtgatcaatatacattgtattctcaatttctcatcttccagttataataacaatactatatggttcttggtacataatcttttacttaacaaaaataattataatatatgagttcggagaatttgctttacctgagttctcgagagtggttattaagacgctgcacacagagtatgcacaccccaaccccaacttgcagtattcactaacagtatcaccttgagtcaaaaataaaaaatacatacaacttgcatcaaaaataaaatcttgctctattttgtaataaataacaataatacagcataatagaatgaaatcaatttaccttctgttttgggaatgacatgatgatatcccacagaacatggccctggaccgactttgcatccagtcattgattcacaataactcctgatatagacatcagacgacagactttatattcaagttgagcttgttcggactacttgaatttgtgccatgaaaagactcattatgattttacagtcttgccttccattttttaactgatttacctgtttgatgataaaatgtatgtagaggaaaaccttataatttataagctcttattgatgaaatggtgatgaaactaaacttacatatatactacaaaaaaaaaaaaaaaaatgccaccacacatttcatctatttaatgtttaacagagtctagctaacacaatggctgccacatgcttcgatgaccaatgacccactcttaagtgctcaaactattacacctactgatacgctccagcaatctttctaactaataatggcgatctagagaattcctttgtgtttccacgtgttctgattttataactccagtcccatgcaactgaacggaacatatataaatactctgaattttatcatgttacgttcagttcacgtgcatgatgcgcaataggtgcctcggtgcagaaagtaagaacttgtcacggcatttagatcaaaggctcttgtgtttcatatcttcttagtcaactcgaatattctttagttctgttggtgtctccaaactacgagatatttgagttgtaacaagggtgtaacgcagcttttgtgtgtgctcaccttgcaatgaataacacctttgactgtcttagaaaaaataatttaattttgcttcatggagctctgacaatagattcaatagtacacaaattgactgaacacccaagaatataatccttctatccatagaacgtctcaaaagcaacttttttcacaggacacaagatgattaaactttgcttcttgacactagtagtacccaataacaaattgactaagcacccaaaaatattatccttctatcctgagaacgtctcacaggataacagacagaaatgagaccatcttttttttttattgtagtcttagctttgattttcattgccaaaaccttcataagaccgattcgaaggaacgaaagcagaaggttgtttagttacagcagtcaagatctctccatagcccacaactccaacaagaacatcatctgaatcagcctctgtaacccaaacatgagtagccctgtgagacagcatctgagccataacagcagctaatgagctcgatgttttgcaagttagcggcgcacttcttcctctgtacatgctcctaccgatgctcaatcttgtcgggcttgtcggattaaaaccgatgctcctgctgctgaacttcttggcatttgttgctgttccgttctgttctcctcctggaaatgaagtttggaggaagtcgctgaatgatcttgatgacatgttgtcctcaactcccatcacaaattgtcctgcatagagattagctagagcccaagctgcagctagataatcacatttccagagctttgaagctgagatttctcctattatcttgaactgttgttcgttttcggtttgttccaacacggcgatcgcactagggtcacacagtggcctacgagtggcttcaatggctggaagagaggcttcaatgaagttatagttttgattgatgattcccagagtggagattgatgtgagtggtaaaggagctaatgctccaaggacacctataaggaagcggatcacgtcttccctagagagacaacaaaacttgtcccggcttgaagtcatggacgtagtaggcctgttggtggagtcagcagagagaccactgctactactagagttttcactgttcttcagccattttccattgtaaagaatggagaacctcttgctcatacctctccaaacaacgctttttggaaccagaagtcgtctcactccttgtttcatcatctccaaagcatctatcaaccttgcattatatttgataaaagaaaatcatcatcataataaaaactggtatttaaacaaggaaggttattccatcaacagacacatcaaattcactgcaacaaatgaatcatttaatcaataacttttggacaagagcgcattttaagctcctcatttagtcttatgtaatcaacaaattagacagaagttaaagtttataagatgaaaggaaacaaatcacaaaagtgaaataaagaatccttcttgaacagggtgagaatgatatgtagaaactttttgtaagagactaaaacatagtaatcccttttatctagtaaaatgcttaccatcacatgatctaagacaaaactctattcatgtcatgtttttgtattatttagatgacataaagttttataatagtcaattacaaagttagttgcagacataaaagaagcattgactaaggtctaagggacgtttaagggggaaaaatagaagtcaaaaagagattggaacattacaaactattcactttttagtatttgggtttccccagatgtttgcagcattttcctaaacactgagcacaagaaaacattgtatatactattactaccaaaggttgataatttgaggcccgaggccatgaaccttactatgttatcaccctctaatcaatcaacaaaataagaagaaaaggaggtcccactagaacatgaagttagatcaaatcatcaaaatatgaatattgaaagcacatggcctatatgtacgaatttctctgattagatccaaccatgttctgagaaataaatgatgtaagatgcagtcaattatcatatatgattagaccaaataaacggtacaaaataatggatctttgttagttttgaagttgaaacaagtgaccaaacttatcgaactatgagtcctagaaagtacaatctttgaaaggtcctaagaagcgccactagcacaaaactcatttattcaagtaatcaactttggattaaactaaatccacagaaactagactcagaacactataatcaacaaatcaaacatcaatttttcattgccacattttactaaagtcaagactccaacttaaaaggaaactactctcagacacaacaaacagaatcaaaccaagaaacagtatcatttatgacataaatcaagaaacagtatcctttaaagacaaagtaacagtacctagtcccaggatcaacctgtttcaatagagtattgtcaggagaaacaacctcagagacaggaatcttcatagctttttcttcttgcaaacactcagtcttagccaaaaacgcaacgatatctaaagaattcaaaatcccaacgaatctttgttgtctcatctcactattctcaacaaacccaggaagcgaaggtgtcgttctcttcctccaaaccggaatcccacactccgtcgattctccgatagctctaatcgcagattccaccgtctctgtttcgtagaactcaaccatctctggctttcctacagttaaatctcccaccacatgatacaagaacactgacgccattaaagagatcactagatctacttcaatttgaagaagaagattggggaaaattctgaaggaacagagagttataaaagagagtgaagaaagatgaggagaaggtggaggccggtgattggtgatcggagaaggattaagagaagaaggaggagagaattcaccattgaaatcccatgaattggtttctgagacttctttgatcagagctttgtggatagagattgagtttgtgcctgtccgtataattgtaatgaaatttttggaagtaaagaagaaaaaaaaaacataacacgatgaaacatatgttggacgtatcttatgtgtactttggatctttgatgtaataaaatgaaaacaaaataggtaacaaattgttagaccaaaaacagaaatagaaaataggtaacaaatatcttaaaaataagaaaaaatatataaatgaaaaaataaagaagaaataattaggacatattattttaccccaaaaattaatatgattttagtgaaattgtttttttaagaagacacatgttagtagggatgtgtattatcaattttgggtaataaattgacaaactaaaaaatggatcaataaatagaaaataagtaaaaagattttgacccaaaaaaaagttaaaagaatcttaaaaagacacatttaagttggcaaaaaaaaaaagaatagaccatgttattatgaatgtgtattatcagtttaggatcttgaaattgttgaggaatggtcccataatggtaacaaaatgtcaaatttctaaagactacaaaaggtcagcacatgtgatttcattgagacagagaaagccctgaggatgagatgggcacatgttttctttgtcatcttcgtctacacagagagaccattttgtttactacaaagtcaccaacacattactgatatttttaccttctcacatttatatatgtattgcaaaaatcagtaaaaacttgcgtatcaaaaatgatatggaatccattgtcgtaaatcattacagtaaatattgtctatattttgtaatataaagttcctctttattcagttgtaaatgacaccagttcaatatgaaagaaattcaacgtaaaagtttcttcacattgttactctcctctcattacactttttttttttctgccatcaatctttcttatatttatctcttttatattctttctatcattatactctttaaaacataaaaagaagatgaattgacaaataatttacaatatattattctatttaattacaacatattttcagaacgatcactctaccacatcgatttatttattaccgaagtacggctatgcaactcttttataaacataatggtttcatatggttgtttaacgcatcataatttctttactgtttttaattctttaatatggatgacttaaatcaccttatttttacggatgattttagtcaccatatattattttaatattttaatatagatgagtttaatcgttatattttatttgatactttaatttaatgctttaacatagatgattttgatcatcatattttatttaatattttaatttactgttttaatatggatgatttaaatcatcatattttatttaatattttaatttactgccttaacatggacaatttaaattaccataacttatttacttcttttaccgcttttagtttattctcttaatatggatgatttagtcaccatatcataatcatattatcgtctatattatcattattattaaaggaggctcagccacctatataaactaatatatcttcttgattatttgtttttgaactaagatttcatttatcttttaaatctcaacagtcagacaaatttaactacccatgctttaatatttgtttttacttttcaaacggttacttaaccgctaataacaataattttcatctatatatacacttatttttcattaattcctctcactcaaatatctcattttttccaaaaaatattctctctcaaaaactgactcatcggtttttagtttttataagagattttatatttgttttaatttacggtttactctttggagagtatttttcctaaaacgttttgatggttattattatactttttaaaatgtaattgtattgcttatacaagtaccttccatgctataaaataaaatatcaaatttctaataacgttctccatgattttatattagaaatgaaatgactaatatcgagaagcttcgatttacagtcttatacattactcagacttactacatatcttagaccatcaatgttaagttacgtttggagtctcttgagataacggagaccttaaaagagtatgatacttcgatggcccaagaaaaagtaaaatcgaatcttccttaaaagacaattcgataaaagtgtattatatgactatgcacacatgcgagatcttaaagaactttggaaatccttaaaagatccttttgatcaccaacgagatatcaccctcccacttgcttgggatgaatggcaaagtctaacgttccaaaactttgacaaagtaataaattacaattctatcatgttgggataaaaaagcattccatgaaattaatgcattcgatgttaaaaactcagtgatgaaaaacaaagtttttcgaaaacgatagatattatttatcaagaatctttttccgttggataaaatagataatacaagcacacaaatttatcaaaatttgcgatcacgcaaattcttgttggactagaatttaggtgtcataaataaacttaactatatttgcgagtcttttgatccaaaaatcttgtacaacgtgtctcaattctgaaacaacaaagcaggggaagtgtggaaacaatgtgaaagaagagatttttaagattccttaatttcttttatggccgtatcttgctaggttttctactattctatgtttttttccacaagcgtgccaatatgttgaaagaagcgtgtattcctaaaaaggaatgagggcttcatttccaacgtattcatgtgtcacggttgtttagcttaagcttaatttggaaactactaacttcgtgggggtttattatgggcggttccgacaatatattatctgttaggatggtaaggattctactctaggttccaaaacgtggcagaagctactgaagttaaaaccaattacggctgagtatgtacatcaggagatccacaatggtcagcactatatatgtacttttgtcttcgatttttttattcccatgggacgtcttctcgactcatagatgaggtatgcattagaaaattatgtgtgccaaagtatgcaaaggtctcacaagtggtcacctaaactacgtagttgagaatttgctagaaacatcttgaaatagcatggtacacaaaattgaaatcctttcttttttgtgatcaacatttgaatccaacaaaaatatggcaataacattcataatcattttagttcaaatataagtaagacgaaaacatgacatagccatagcatatatataggcaaaacaaagaaagttgacttaatcaaagctattttagatattatagggtttttaatgacatcatatctaaagatttgtttcttctaaagatactgaaaactctttattttgtaatgattaaaattattcaaattgaactaaaccttttcaggcaaatacatcaacggaaatgaacttaaaggcaaaacctttaactgtagtacaataataaaaaaaaacatcacataaattttattttctgaaatggaaaaatcaaaagatgcagatgatcaaccacttcactcgaaatacatcccttcgactagagatcattgatgatgttaggagcacaaacatcagtgggggcagtggtgacggtagcgagacaatcgatttcggggtggtagttgttgttgtccatgcaaggaatgccctcgtcctctccatcattaagatccaaattcatactctgatttggatctatattcattttcatgttaaaatcatgaagtttctttggaatctgatcataaaaatcataaagagcctggtattggaattgaaccggctcttgctgattttggttttgatcttgaatcatacgaccatcaaaaccgattgggacagatgcatccacaacagtaggagctacaccaataggaggaggtacagatgaagaagactcaccgttctccttaaggatctcaaccctacgaataacaccattgagatacttgttaagaaatacattcaaatcaagaagatctcttccatgaagatgagacacgtccacctctcctttgagacaaccaaacattaaatctcgaatctgagaattacggttctcatcacgtagcttctggagacgttctgtttctttggcgatcctttgacgtaaaaacgtctcttgatccaccatcttcttggtccggtccaacaccgaaaactccataaacttcgacatcacttcttcaacgccttcccttgatggccaaggctcctggatcgagttgtacgggctacggatgaccgcacatgcgtcaacaccacatagagttactagctcgttgaatttcttcagcatccctttcttccttttggtgaatgttgttttcctcactgaatcattttctatgaacgataacttcatcttccccctcatatctcttatctttttcttttgtgtattttgctttgtcttgttagcatgaggaggatggtttatatagtcaattttcgagtcaatagattttttattgctttgctggatatgattaattgattttttattttactaatttttcaggatttgtattagtttcacccttacgtgtaggcatgtgattgatggtaaagtgataatcatttatctttagagacagcccatatagatattttaccttttggggggcatatataaaaacaagatatataggaaaacagttgtatcacatatctaatgagatttatactttatttaggaagtccattgaaaggaaaacaaattacatcaaaggtaatttaagatatttcttcaatctctaaattttttctatatgttaatagtttatataaacataattaataaataatttaaaatacatgtaatatcagttggatagaaagtaatgttatggctaaacagtgaaagtaatgttattttattttttttgtttcgttaagacacatgctattatgtgtgttatcgattttgggtgttataactgtggggaagggtccaataatacaaaccatagctgccaaaaaaaatattagtaactaaacatcagattctaaagaccacaaaatgtgagcacatgctattgtaaaaccgtgatgttattatgaaatagagactcttataaggcaaatgactgatacaaattaaagacgtgtttgcaaaataagtctaagcatgagtaaacatgcatgttttattgaaatctttaacagcaaaaaaaatacaaaaactatcactagatcctagtgatattaactttgagaccatgttgcatacgaaaaagaacagaaggaactggttcggttttgtgcccttcaacgaccttgatgtcatagtttcgtatgatttccgcagccactgtcttcatctgtaagaacgttaactttttccccaagcaagctcttggaccggcgttaaacgccaagaacttatatgaaggttcatgttttaaccttccactgtctgaaatccatctctctggtctgaaatcttctgcgtcatctccccaaacagatttcatcctccctaatgcatacatagatatgacaatcttccatttctcatctactctatgcccacttggaagtacgtctggctttgccggtgacttgtggttaaatggaactggtgggtataaccttagcgtctcacacacggcaccgtgtagatacacgagcttttctaaatctgcgggatcaaacctcggcatcttcttgttaacctcttgtcggatcttgtttattgcctcagggttcttggacataagccagaagaaccaagtgagtgctgaacttgttgtatctcttgccgctatcaagaaacccaaaatagtgtctttgatgaatctatcatcacttggttccaagtacttatatttggtcgtgtccatagtcatgtagtatgtcaacacgtctatggcctctcctcttgagggatgatgagtcccatgactattgatctcctctcgtttagccgttatgatcttctcgagtagttgatcgaataccgctagacctcttttcaatcttttctctactcctacaccaatcaaatattggagcctccacaagaaaaccggcttaacatgtctatagaaaaccccgtcagaaacaccatcgaccgcgtcaccgaactcaaccttaggcatttcaacggataaacattttggatcatacccggtcatcaaaatcaaagatgtatcaaacaagaatctctggaacaaatcttgcaagtcgacaaggatatttttatcagctgcgttttcaagaataggaacaagcccttgccttaattttcttacacttgtactcacccagaacatttggaaatcttgattactaaaaatggcatgagacgagttcctcatatcctcccacaaacccgagtcaacgttgaaaattgaatcacccacgacttcgaagatcttcttgaactccattcctttggggtagttagcaaaatttgagcttagaatgtagtggatattcaccggatcaacagtaagcaagatgtccattccgctaagacatggacctttgaaacaaaacgtcatatctgtcgcctcaagaacctcggtgatccagtcgtagatacgaggcacttggaggagtagacccggaagcatcccaagggccggccagttcgtgagcaaaggcttgggagttttcttgtggagtaataaacattggaagaaaatgaagaaaacaaatgctgtgaagatttcaagtaaacctatgactatcgccattatagtaacaaaatgtttattcaagaaatcttttttttcttttggtcaagaaatgttttgtcttgttagtgagtatatgaactcccttacgatatcatatacgaaatgaaatgaataaacacatgcattctatttcgatccgttgcattgggatgtgtaacgacattaaatcatattatccgttaaaacttttttttccaattttatgtatagtgtatgcgcagaggcggaaccatattttgtaataaatgcctcgagtaaattttgtaagatttctgcaaattatgaaagtttacattgatgtccccacccataagtctttttctaatcagaatattttaggtggtgttatgggttagtttgggtttatatttcataagtctttttctaaagtttatatcttaggtttaaagttttatcggattttaaaaaacatttgggttcattgaaagtgaatcattaatcattttgttaaatacgtagaagtgtatattcaacgatacgtgatgtcatttggttttctattattgaatgaaattttataacaaatgatatggtaatctaaacaaaatccaacaaaacttttgaccattttttatttttttatttcaagcttttctactattttaaagtctttttaagaaaatataagctaaaattttgttcataaatctttcgataattccaaatcaaaactttttaaaaaaaataaaagaaaaatacatgaaaaaacctttaaaaaatcattaaaaaaacataaatctacatttatttcattctacctagcctctcttctaccgacatgctcgtattcccaaatggtaaatcttaataagtgaagtatgtgaatggaatccaagtgtggtttggatcaagaagaacatattagagttctttgaaattttcgaaacaagtttacatgtatatgtataaatgtttatttttcttttgaatataatttaatattagattcaaaaaaaaaaaaaaaaaaaaatctttatgtgtgtcttgtaacgaatacgttcatctaaatcagaaatttctttacatcattccaaacattatgctttttgtgccacttctttttatcgtctatcttctctttgttgtattatattcaaagtttaaccgataacaaccatcataagattttctttcttttgggaagtactttttcagatcttgtatatattacatttaaatgaatatattattgttttaaactcttgtaattgtatgtgcggctcttaatttagataaagccttaaaaattaaaattctggtaaataacaaaagtaatagaaaatcttaattaaagtcggctacggatatatagaaattagaaaaggataaactttaaacatacatctgttaataatccaaggaaaagagaattatctttttggttaataatccctaaatttagggaaaagagaaattatccccactccaatttatacatgtaattaacatatttcctaattaaactaggaaaaaaaacaaaggtatattctcttatatatatgaacacccacagacgctctcaaacatcacaaagtaaatctgaaaaagctttctcgaattcacgtaaccaaagaacaccctaaaagctccggattctcttcaacaatggtgaatacttgtagaatcagcttcataagcttcatgatactcttgctcttcatcaatcagtcatctctttcttcttctgtacgcatcggtctacaaggaggtcgagatcttattcaccaccgtacacttgatgagattgagagagacaaggcacgtctcagtttcttgtttaaaacgatggaggatgcatatgattccaattttgatgaggatctcccgctccccccatggccttatgttagggttaaaggggtcgaggtgattggacgctcgtatgcaacgaaaggcgaagtcactgaatcgatattatatccgagagtttgccgtttcttcttctgcaagtctaggcctttggtttggttcctttagggtttgatacttcgatgtatcatataaaccctctttttttagagactttgtaactcttcttcaatgtaatggatctattcttttgtaaactcttcttcaatttctgtaataatttttctttagtttttcattcgtttttgtcaatttattgatctatatccatagataagatacgtccaacatatgtttctaaactttttcatcgtgttatgtgtttttcttcttacttcacaaattatatatacacactcgatctctatgcacaaaatctgatcaaagtgtcataaagacataaaccatttcatatgatttcatggcgaatcgaataacaaatcacaaaatcaagtattcggttaaaatgaatcgaataacaaatatcacaatttttccggatatcggcttcatacccagacctagttattggtattaaagttattggtattaaagcctttaggcttctgttcaaacctatttgtctgtgtcagccatttcaagataattccttaaaacagaaaacttcgccatagtaaataatggtaaaaccgtaaaagtaaaacttaattacgaaattcatatccttggccaaaataccttcccacagacccaatcccatattttgacgagttaagtatgcgacatacattggtaggaggaatgcaataatagattttctaacgtgcacttggattattattaatatttgaaacatacaggcccattaagagcccaaccgaaaggttcataacaagaaaaacggacataaacagaaaatgaaacatcaacacgatagagaaagtgttcttcttttgtagacatcaccacacaagtgcacgaggctcaatcgtacaacatcagttttgaccacaaagctcagaagcttccaccacgaagacgaagaaccaagtgaagagtcgattccttctggatgttgtaatcagccaaaaaagccaatgcttctgccttttggaagtgtctgcctatatctgtcctccccatttaatcagtctctgtccttaccttcgacggtaacccctttatagtacagcagtcccgtttccggcagtgccttccccccccctagtctagaccgagtatcaatagttgtagttcctgtccgttatggacccttcgtatctttcaaatccaatcaatgtgtggtgtgtatccaagggcaaatgcaatctctgaatctgttacagccattgtagcactaggtgcctacccataagcagtagttgcccttgaatgtgcatcaaatcctaagacaagcctatctaatctcacttcttagtctaaagcactcaaatccttagagatgtaattgagaaagaagcgctctagctctcacttgaagtacaggaaggataatgactcgagcttttccgaatgaaaggcgataggggacgtaccctaaggaagcaagaagggaggattttctttactttaccgctataacctttctttcacgagtgaacccgggcacgagcctaccttgtaagaacccaagaatgggtacctagggaatgaaccgagttagaggcgtatgcttccttgaccgatagtttgagtttgtggaacaagttgtagagatcccatactttctagtacttgtggagaatcccagtaagaaatagcttgagttgttggtggaagtgacctatacatatttatatttataggtcctagcccttttcttccgctaggtaagttgggaagtccaacataaggcaggtcaattacatcgaacctcaattccatcgagccttgcttagtctgcctatggttgatagtgaacagcagatatgctacatcaagcactcactttctgtctattggccttagaacactccttcttatgttgttttcaatgaaggggaagtgattcctgagttccttcgcacagggtttgaattaaattaagtaagttttgtctacatcttctctgcaattacatcaggaaagaaagcagatactgatgctgaatgcacttaaaaaatcccatgtctgaatgccttaaacttcgattccaaagaaagcagaactagactgccaacgatctgacgatagagagtcttcaccttgtggacctgctttcgcctaatggtaatctttgtctttccttctgtctttcggggatgggattgggtgtccgagtaccgataactaagtagatgtctcacaggcgaaggattagacgtctttgtactcacgaagcaggtctacagctttatgttttacctcaggtggtagatattttcccacctggacaactttgcccgagtttgaattggggaacgaacgatctaagtaaggaggtagctccaggaaggtagttctttgacccagttcagtgagacgctccgcaaatgttgaaagaataagcgatgacatttgtatggtcttgctgttgatggtacctaaaaatggggtgctgcccaagctgagctaactacaggtccgaatatactgcgatcacccagacctttctaatactgaatctaatagtgaaagaaatcctgtataagaaatttattactaaatgcgcttgcttccgtcttcagttcagaagaatgttccattgattggaccatacccattagcctagcgactgcttaagataagaaggcaagaacagtggaagaccggatagacacaaaaaaaaagataaaaagagttcagccgcttgacctgcgaggaattcaagaaatcataggcgcggaaggccaatgaacatcggcttcagaccttaccttagacgtaccctacttcctaaaaatgaacgtagagatgatccaatctctggactggagccccggctttctattttccagcttaataaagataaagatggaagctgttcccgccttatctctaacttttcttagtagacactgtattcatttactaaataaagtaatttcactactggactccgctcgctttctatagataagagttgaatacactgaaactactcaaaagtatgcttacccgggataactataactagtaactaaaagtaataagcttgactcctttcaggagtaggtatgcggtcaagcctgttggattcgtttcgttaacatgattcctcgaaaagtcattatttgattcttgatctttcgatcgtagcgcgaagacatcacctccttctggtagcatcatcgcaatcacatctcggttggattatctgaagtgaagaagtatactagaaatagcttttctttgtctttgtttgatttgttatgtttgcatgtatgtgtgtggtatgggcgcagctcctagtgtaaaatgtttactacttaatgctatgctaatagttgaatttagaaagacgaattcgtaaaaatgaaaatttatgtgaagtatcaaacctctatgttttggattctgatccatctctttcaggtactactttttttagtgcctctgttattgcagattctcacacttggcataacaggctaggccatccttcttcttctaaaagtgctatcctttcagattgactccctactcataagaataaaaaggtcaatcagaccatttgtaaaatctgtcctttggctaaacaaaaacacttaccttttaaatctcataataacatttgtgatgaaccttttgatctgattcacattgacattttgggccctttttcagttgaaacctcagaacagaaggttttcgatatttttgaaccatagtggatgatcattcaagggctacttgggtctatcttctcaaaagtcaaagtgaggttctcactgtcttcccagggtttctaaagctcatagaaactcaatacaaaagggtagccaaagctgttagagccgataatgctcatgaactcaaatttcacactctttttaaataaaaaggcattctttcttatcattcttgccctgaaactcctgaacaaaattctgttgttgagaggaaacccaaagattcattcctttgttcacaacaactgcccgcaagatttttctctctacgttggatgatcgaacttcttagtgttaagcaaagcactatcaacaaaagttcgtcgtgaagatcagctctcctcaatagtcagataggatcttagacaccggggaccggcttcgcgggatcgccttaaaggacctgatccactcatggcgaagcttatttgggcggtgttttcttgatccgatttatcacttgaatgagtcattctctgaaagcatggtgcttgcctcctcccttcttggagctcgtccattcgttgggtgatcccttgctctcacgttcgagtgttttctcgtcgtttaggccggtgagtgagatttctgctcattgcagtcacctccggggttcttcgcacctggatagtaccaggacccgtgtgccccggcccttgatcagataaagctgcccgcccgaagcccgacctatgacccataactcaaaatgagccttgcgacgagacgcggacattacccatgctgcggttccctccggtccgttcccgggttgggttaggggaacatccgagcgatgattgccttcgcggatacaaacgcgctcacaagacgcacaataagaataagaccaatagatacttcataagagaccatttgagctgcagatcgtaatgctcctagaaaggcatatttcgaatatagaggagttcaagttaccaacaatcaacgagttgatcatacccttctatgaaccgtacgagcacgtcctctctcacaccccaccgcgcttacggctctataccccaaccctacttgctctggaccccccccccccccccggtcctccctcgagctgtttcccagcgaagatgagtctctgttggtctggtggaatcccctccttgtcctgtatcttagccttgacgttatcgattgtgcctgagctctcaacctccaaggtaattgtcttgcctgtcaaagttttcacaaagatttgcataccaccacgaagacgcaatacaaggtgaagagtagactctttctggatgttgtaatcagccaaagtccttccatcctcgagctgtttaccagcaaagatgagtctctgttggtctggtgggatccattccttatcctgaatcttagctttgacattatcaattgtgtctgagctctcaacctccaaggtaatggtcttgcctgtcaaagttttcacaaagatttgcataccaccacgaagacgcaacacaaggtgaagcgtagactccttctggatattgtcagcaagtgtgcgaccatcctcaagctgtttcccagcgaagatgagtctctgttggtctggtgggataccttccttgtcctgaatcttagccttcacgttatcgatggtgtctgagctctcaacctccaaagtgattgtctttccagtgagggtcttcacaaatatctgcataccacctctgagacgaagcaccaaatggagggtggactccttttggatgttgtaatcagcgagtgtgcgaccgtcttcaagctgcttaccggcaaagataagcctctgctgatccggagggattccttccttatcctggatcttagccttaacattgtcaatagtatcagaactttcaacctccaaagtgatggttttgcctgtcaaagtcttgacaaaaatctgcataccacctcttaacctgagaaccaaatggagtgttgattccttctggatattgtaatcagcctactcatagcaaaaagttgaggtccaacatttctgtcttttgttctagatgacctcacttcttgcgcggttactaaaacattgaatgtaggattgtccaaatcttgaggataaatacatatcgtatgttgattttagaaagctttaaaaacataagttcaggattatatatttaggtaaaaactcatgcttagaatatctttactaaatattgtcaaacgtgttgatccgagattttttctttcataagtcataactatagagatttcatgtccaatatctatgagaatcttccaaatctcctgccttaaacttgccgttgcaatttattaaacaaatcagaaaattgatgagaatcaataatgttcttggcaacaaatcagcttaacttatgtatatatacacgtttgtataatgataatcaatactatcaggaatggagaaaatagtgttcaggaaaattgtgtttgttgccttcttattgtccctttcatgtgagtccatctttcaactctaaatttaacttcagcgcattatcatagtgttctttatttttcatgataatctttattgtccacatgcaagttaaccgtttttcttacatatagtttatcttttttaacaacaaagccaaagaaacaaaataattcttttgtaagaaaaaaaagaaggcaaatcaattcaaatcaagatgatcatatatattcgtaataagaaacgaatatggaacctaagtgcataatattcgtaatgattcaaactatgttatatataggtttattggagggagaagcaagaatgagtggagatgtaacaatacaacgtggagggtcttgcaacaacgacaatacctgtcacgatacatgtccgggttgccgtatcacacaatgtattttcaggcaatgtgtttgtactcgttgtaacactccacgatcaagtttacgtattgaatctcatatgtaatcttgcttgtaataaactatccagatttgtgatgacaagatgataataataaacatttttacttttattttatactagtgttttttttttctcatactctaggtcacttttacaaacatcaacaagtggaactacatacatcttataaaatgcagtatatcttaaagtagtcctcgtataaaaacccttgcaagttgcaactgttgaaaatctaatacaatattttaacgcattttcccccttttgacataaattccataagtttcattttcttcaaattgtaaattactggagtttcttaatctcttttataacggatgtacttatttaagaaaaatagaaaataagcatttgcacaaattaagaaaaagataagcataaccacaactgaattaagaaggaaggttttgatcggaggaaggttttaaaaccacaattgaagaagccagcttgaaagaccgggattaatatatgaattatgtagatttttattattgtgtgatttgatattttcaattttaatgttctgtttcaaagatgattgactatattcctcggttaataaagccaatacattacaatatatatgacgatatctgaatgtataactctctgtaatgtagatatatttttggtttctatggggtcagagacaattgctgctctgtggtttttacacacttggttatttatcggatgtgtatagtagcttaacatgcttgataattccatgtatgtgtttagagtttagttttcattatcagatagatattagttacactttatattgaggtccctaagttaaaccatgcatattcactatcattatttcggtaaaagttaattatactcaagatggtttctcagtttgggggagttgcaagactgtagaaagaccttgatctccattgccttcacttcaccatgagtgagcttaaaaggtaactttcattttcaaaatgtgatcttctgttatgtctatgcgatcattctaaatgaaacattagtaacgtcactgatatttcaatactcaaactaaacaaacggataaagagaaagtgaattgactaacaaactggtgtatatatgctttatatccaaagccttttttcgttttgtttaagtcgttcttatctccactctcttttttattttctttgaagggcacaatatcactattgtatacggcttttgttgctaaactactttttataacctattcccatggtggcaagaatttgttaatgcaatttctggagaaataaaggtaatgtagtctctagctgtaagtaaggaaatcactttaagaaaatgcagatactatacaggaaattcggctactcttgagaaaagtcatctacttaggcaaaagataaagtgcaaaatttaacgttgatatccgatatacatagataggaacgagtacaaatatgagatttgttctttacaaagcaattttacatgcaccaccaatacaatcaaagaaaaataggtatctgcccaatgttttctggcgtttactttagcaagcaaatcttgcaattcatcaaaatgtttatgagttcttgaaatcattataataatataaaatatctaacttattttccaaattttgtcacttaacatttaacattgccaccacttattatagttaaaatttacattgttgtaaagaaatttcaataacaaaatatttaagaatattatccaagttttatttatttatttatatattttaattataaaactccaaataaaataaacatttaaaataattaaaatactatggcatagtattagagtgagtcgatttctagtataatcaattatatacttttattgtcaaaatatataatttactcctacaatggtaatttattattgttataatgtttggcattcaaatttgttaccttatgtgattgtaaagtaaaacataagatgtcgtcatgtgtcatgtttaaattggattaatatatttaaagataacataaactagtttttaaccttatctaaaaagagagttatacatttatttatttagatatttttaatatgacaataaaaatttgaaaattcggagataaaacataatttaattatttttacatcaaaagtcggcagtctaaaaattcaaaagcaggcgattaaaaataaattattggacaacttttttaatttagatatttttaatactacaacaaaaagttgaaaataattttaataatgaattattatacaattgtttttatttagataattttaatcttatacaaaatacttgaaaaggcggcgatgacataaagtattaaggaactaatttagttggattctttgtaacatccaaaaataaaaacttagaaaggggaatcaatcttagagatgtgtgaaatatatatatatatatatatatgtttatctcacaataaaaacttgaagagtcggcgatcacagttaaaatatcaaacaactattacttaatatgcaataagaactttgaaagtcggcgatcaaacttaaatttatatttttcaattttctatataataaaaggaagttggacataatatttcattaatgcattatgaattttatataaatcttaaacacttaataattatttattttattttataagattagtttgattaataaaaaaggttaaaaaggatattgactatagaaaataatggaaaaaatcctttaaccaatcattggtacctatatttgataggtttgtaataggaaagatatccccaaaatttttaataacttgacaggctgtaacaaatataatagctaaatgataatgttatagataaaactgtaataattatataccttttattgacaaaatctgtaaatctgtatctaagccttaaatggtaatttataatttatttctaatatataaaataggaaattatatttacatttaaaactctaaacaaattttgtatgtttttttctataaatacaaagacatattatctttaatacaatcaattcaatttttctttcttcaaaacatctaaaaaatggtgaaaaaaactcttggtcgtagaaaggtagagatagtgaaaatgactaaggaatcaaaccttcaagtcacattttccaagagaaaagctggtctttttaagaaggctagtgaattttgcacattatgtgatgcaaaaattgcgatgatcgtgttttcaccagctggaaaagtattttcttttggtcatccaaatgttgatgttctgcttgaccactttcgagggtgtgttgtaggacacaacaacacaaaccttgatgaaagctacacaaagcttcatgttcaaatgctcaacaaatcctacactgaggtaaatgtcaattgttggcaatatctaatatttgtttctctcttatttttcgattttgatattgaatattatataaatgtttcacaattcatggatattcttaacaaattcattattcgtggatttattcgtaggtgaaggcggaagtagaaaaagaacaaaagaataagcagtcgcgggctcaaaatgaaagagaaaacgaaaacgctgaggagtggtggagtaagtctccattagaactcaacttaagtcaatcaacctgtatgatacgtgttcttaaagatttgaagaagatagttgatgaaaaagcaattcaattaatccatcaaacaaacccaaacttctatgttggaagttctagcaatgctgctgctccagcaactgttagtggtggtaatatctccacaaaccaggggttctttgatcaaaacggaatgacgactaatcctactcaaacacttctgtttggatttgatattatgaatcgcacaccaggagtttaaataagtctatcctcattatgggtcttggtactataagttcatctctctcgttgttgactttttaagtctccaatagtttgttgtgtctttttttttttttttttttttttttttttaattgttggtgtcgtatgtcttttaattaagtcttgagtcaattggcttgttgtttcttttcgttgttctttgtgtcttgtagctttcgatgttttttggtggaacatgaataaagctatatgaagttttataatattttcattactgtgatcttatatgtttattgtgtatatggaactatatatttttgaggcatagttaatattctagtaatttcccaaagatctatataagtctagtaatttacaactttgatatgctatattaactcagccagcacaaccacaaagctatagacatcactctttgctgtgaattggctagactgaaagtactcaggatccatatatcccatcgcgaaactttggctcgatatttctcatctaacatgatgtttgtagacttgacgtctctgtgatagattggagatgattcagccgagagcaagtatgaaagagctcatgcaatatccactgctatgcggagacgtacatcccaagtaatcatcgtgaaatcatcagcttatcgtgaagatgctcgaaaaggttgccattgggaataaactcgtagacgagaagaaggacatttgtctcattacggaaacaacctaagattttcacgattctatggttaatctgcgaaagaattacaacctcattgatgaactcttctagcttgtctgcgtccacaactttgggtttctttactgctacaattctagcatcgacaagcattcccttgtacacagtaccttgaccaccctgaccaagtattctatttaggctgaagttttcagtggctttctctaactcactcgagctgaacactcttgtcttctcgacattgccttctgttgaagtcaattgttgttgcaacaataaacccccagtacgtttgaagaactttctcttttggtttagcctcatttgttttctactaaattttataaccaatatactccaccaatgaagattaacaagcctaaccctgcaaaccggcaaaaacaaaatgattagatatatcttggaaatataaatactaaaaaatgaataacttctattttattttattttggtgtgttgaatattaacttcttttattgcttgtgtagatggtaatattaattactaatggctaattaggggtgttaatttgtgtaaattctcatttatttaaatgcgaattactttgatccatacggacctatttagaccaatttataatttaagcaatatatatcactacaaaaaaacggcctttaacgtcattttatttagatgttaacctcggtatttatatgacctagttataatgacatccgtatttaattgacaattaataacatcggtatttaactgattttgagatctaaaaataagaagaaaactttaaatacaattactgaccttggcatccgacgtatgggttgccgttgtaaccgctattgcatgcacaacttgcatatcttaaattcacattataatcacatacatggatcaataaattccttcttattgtactctgttaaattctggcatcccaaagagtctataaacgaaagatccgtagtgtgaataaaccatcctagctcaacgtgagaatatcgtagagcatggatctgttgtggactgtatctacccaacatatcatacggttcgtctgttaagaaagcaaatttgcaccctttagttgttgtgtaacttgtgttactatcttctattttgacaccaacagtcaacacgttgaaccccataaggcatgcttgccttgcaggctgcagcatccaatagcattgcaacttgttgacctgaatagaacacaagcgtggagtatccgattcgtcagcgctgccttgttatagcaattgattcttgcaaagtaataatctgaagctataaggttttttgcgccacaacttgacttgcatcccaccacacttggctcgacattcgttaaggatgccgtattgttgcaaccagccgctataagtgtttgtgctatttttcttatgtatctcttctctgtttatagtctcagatttctggtatgcaggttgtggccagagattctgttttatgaagctggtccattgatggcctaaagagtgaatagataagttaagcagtgaaggtccctagtttctgcaacttcaaagagctagaggaatgtgttgagacattttgagatatacacaaacaaaaattaataactaagaagttcattaaataaacacataaaacagagtagtcatacaatagtcagatatgcatgatggacaaagagatattcctaaatatagatagagcgtttggtggaaacaacttcacattcagttctacgcttaacacaaatagtcctagagtagtagacatggcatgatagctaaatagatatagatagagtgtttggtggaaacaacttcacattctcttctacgcttaaaacattttcctagagttcacaacttcacattcgatctccacattcaaagtatcttcatccaagtaagcctcctgaagatcagctaaagacaaggattgaggaatacccctcgctttggtcgctgccatgatccattgttgaactacaagaacaaggaatcaatgtcgtcaaaagagttgggacatttgcttattgaaaatgtcatcagtatcatccatcaaggcaagacataagcattgtgaaaatagtaatatcaatagtttttgacttacgccagactgttttgtgtttggatccacgcgggtctaaagcccttagttgtgctcgcacggaaatcatctcaccaggcgataagacttcaccgtcagctaaatgcaagtacttgcagaactcgttatctgcctcagagtctccctttggatacacagttagagtcctgtaaaacattatcatccacttgttagcaagttaccactaatacactcatacaacaatatctatcagaaggaaaaaactcaccaattctttcctcccattgcaaaggttttagatatgcaatcattctgtttcagaacagagaaatcacgaatgctccaagagaatttgtgaaaagggagattctcatcaacagggacgggtgatgaagcaatcttcacatgagcaccaaactcacatggttctccttccacgataaatccctttgcagggtcagtgaatgtttcaagcgacatagcttttggcaatccccaaaccgttttagaagaactgaaacgcttaacttcaacatctacatgtttacacgtatacacacacattacgattcattcattcatatatacatacgagagaaaaagagagataataaggatttgagcatacgaaccttggattgagaggtacttgttgtctttcttgttaaagacaaagaaagagagataatcaaacacatcaatgggtggtgttgtggatgagagacattccacatacatagacacaaagccctttccattgtcctcttcgtttccttttgggtaaacaaccaatctcctgatttttacaaaaaaggcaacatttcttagttatatatgcttgtagtgaagaaagatgtgaaagtctgacaagagaacaagacgaaggaggagtctttctccaagtcttcaacattgcagaatctgatgcatatgaacccattttctctacaaaatgttgcaaccctagagagcaaaacaaaacatacccataatcagaaatgatctgacgaaaatcgagttacaatacacaagagaacattttttttagaattctcagatattaaaaatgacacagaaagctttatgctttttcctcttaaaagactaaacaagttgaaatctagagaaagaactgaccaacctgagacaacgagagagacttgagagatttcttcggcacttactattagatctagggtttagataccatttatatagagaaagttttagagttgcacaaaacataaattaatgtgttagaatgggcctaaagctacaaagctggcctggttttgttttaaattgttggtttcatggacattttcgacatcttcgaacatgttattttttgagactatgcaaacttgaagctctttactcgagttgaaatcgtatgacttatagtgaaattgtacatttggtttcgatttttcttttacactctttcttctttgagccggtaaatttggaatttttcttcatagtggaatcatatgctgttttttttttttatagtaaacgttacaagaatgaatggtaactttatccaaaaaaaaagaatcatattattttgaaatgattttaagtaaattctaggttcaataacataagatttgagactaaatttaaaatttcttagtaaaatatatgatttttttataaatacctataaaattagtaattaacaatacggattacgtactgaatcaaaccctttgtattttgtttttcctagaaataagtgtagatttttggaattttgcattaattaatcacttcttgggtctgaaaggctaaaacaaaaggaaccgaaagagaatgttctctctgtctttatcttccacttccacttccaggtcgcgttgcttcactctccattgcaaagagaggtctctgcgatttctgcaactcacccctgaaaccttcttaatttacttcaactgccgctatacctaaaaacttcatctttctcctctgagctatgataaagattgcagatttcactctcttcttctttatcttcgtcttctctccctcgttgcctctagctcaatctcagcttcccgatctcgacccacaagacaaagcttctttattgatattcagagtttcgattcacgacctaaatcgaagcttatcgacatggtacggctcatcgtgttctaactggacaggtctagcttgtcagaatccgaccggaaaagttctctccctcactttatccggtctgaatctctccagtcagattcacccatctctttgtaagctctcttctcttcaaagcttggacctttctcacaacaacttctctggaaacattccttcttgcttcggttcgttgcgtaatcttaggacacttaatcttagtcggaatagattcgttggttcgatacccgccacatttgtaagtcttaaggagcttagagaagttgttctaagtgagaatagagatttaggcggtgtggtccctcattggtttggtaatttctcaatgaatcttgagagagttgattttagtttctgctcgtttgttggagaactacctgagagtttactgtatttgaagtctctcaagtacttgaatcttgagagcaataacatgactggtacactcagagattttcagcagccattggtggttcttaatcttgcttcaaatcagttttccggtacgctaccttgtttctacgcctctcgtccgtctcttagtattctgaatatagctgagaactctctggttggtggattaccttcttgtttgggttctttaaaagagctgagtcatttgaatctatctttcaatggcttcaactacgagatatctcctaggcttatgttttcagagaagcttgtgatgttggacttgagtcacaacgggttttcaggtcgtcttcctagtagaatctcggaaacaactgagaaattgggtttggttcttcttgacctctctcacaatagcttttctggtgatataccgttgaggatcacagagttgaagagtttacaagcattgcgtctctctcacaatcttttaactggagatattcctgctagaattggtaatctgacatatctccaggtcattgatctttcccacaacgcgttaaccggctcaatacctctcaacattgttggttgctttcagttacttgctctgatgataagtaacaacaatctctctggcgaaatacaacccgagcttgatgcgttggatagtctaaagatactggacataagcaacaaccatatatccggtgagatcccgcttactttagctggtctgaagtctctagagattgtggatataagttccaacaacctctcggggaaccttaatgaagccattaccaaatggtccaacctcaagtatctttctcttgcccggaacaagtttagtggaacacttccttcttggttgttcaagtttgacaaaatccaaatgattgactactccagcaacagattctcttggttcataccagacgataacttaaacagcacacgcttcaaagattttcagaccggtggaggtgaaggatttgctgagccaccaggaaaagtagagatcaaaatatcagcagctgttgttgctaaagatgaattaagtttcagctacaatctattgtctatggttgggatcgatctttctgacaatctattacatggagagatcccagaagctttgttcagacagaagaatattgagtacttgaacttgtcctacaacttccttgaaggtcagcttccacgtctagagaagctgccaaggttaaaggccttagatctttcacacaactctctgtcaggtcaagtcattggaaacatctcagctcctccaggactaaccctactgaacctatcgcacaactgtttctctggtatcattaccgagaaagaagggctcgggaagtttccaggggcgttggccggaaatccggaactgtgtgtggaaactcccggaagcaagtgtgacccggcaaacattgatgcatcacaagaggaaatatatcaaaacgaattggtggaaggaccgatatctatttggatattctgcttaagtgcgtttattagcttcgattttggagtgttaggtatcttttgctcagctcgtgctcgtagttatattcttcagaccaaagcttaactccagagactgattgatgtatattcagttgtaacacatgcatgtatgttgttggtctgagctgtgaagtggaaatgctcgcttttaactaaagtctctcccaaatgttgttacttgtgtatatagtttgaccggttaacctttacatgaaccgtattgggttcttgttctgtttgtgattcaagaagtgattagactcaataatctagtactatctatctaaacacatcgaaactcgagtcagtgagtagtggtgttcatttcggagattaggacaggaaatggtgggtaatgatcaggaacatacaatttgggtgtttaaatgtataatccacgagtacaaaaaatgataatcgaaaatcaaaccgaacgaaatgaatagaaaaaaacagagatatggagatcaattaaagtttagtaacagatctaactagctagaaccaatttaatttctaacaatctcggtttcaactgaaatatggtttcggagaacctgtgataactttgccaaaaccattcactaaaccataaccaggttaatacttatctgagtcagaacaagaattccgaaggtttgaagagctgaccaaagaacaaaacggtcccggttttgtcttctcggataaggaaaataaatggatgatcagccacaaaatctatcttcttaggaggtggccccatatcaagagcacaaccgtcatcttctacatcagcagttgcagccgcagcttcagcaccttcttcatcgatctcgacacaagctttatggtacattgacactgaatgcagtactcccacttgattcaaaacgcttgtagcagaaaaaccgaattcgatcttaaactttggaattctaaattcctcaagttcaactttgtatctcggaatgtgactatccaagaatccaggtgtagatgctattttcttcaagagataatccaatccatctttcttgtcagggagatagaaatacattgagaatttgcggttggtatcatcacggcctcgtcggtaaggaccttgaaaccgttataagctcttactttttgtgtctcgtagctggtcatgaatggcacagagactgtagtgccattgaccatgtggaagtctctgtcttttgtatagtacttttcaaatggtctcttccaagctcccttgaaatacaatgcgtttgcgtaaatcttgttggttcggcttgtcacagattcacgaggaagaagatctttgatgagattattggtgtgatcttcaacccatgaattcacctccttacgcacttcttcagccttcaaacaaaaaaaacacatattggatgatttttgaaaacagtctcctaattcgaattatgatttgggaatcaacatacattacgaactattaggtttccaatttgactggttgagtatgttctttaagtcaaacagctattacacacttcatctagaaacaccaaataacgtttctgcaaaaccctaattatatttcttcgaaaccctagtttcttttttgctgttaaagtggaaaattacctttgatcggaaatctacgggaacgtaaacagccttgaagaagttctcgaagagagccttgtatttgggatcaatcggtagtgatttctcaatccagaggccattcaccgccctcatctttgggccgccactagcgctgctgtcggcgtagacgatggatgatagttctcggaagacggatttgagctcatcgattgaagaagatctgaggaaggagaggatttcaccggcgactaagccacctccggaaccagcggcgtgcatggtgatcgcagagtttattgacgccggcgagaagatgacgttagattccgactcagaagataagacgtgcctcccaaggatcatcgcgacgtcgttttgcttcttcatagcctttttcacattcatctttggtctctccaactagatagagaacttgcaaaagggtggaggattatgcatggtctatggagggacagttatatatagtgaacaaatccattaagaaatttttaattattattagggtttcttggaaaactagtcactttgcaatccaggtgtataaatcaaacacttaaaaatgactactttgcaaattgtaaatagtaatatgactactttcccaaatatgtttgaaaaaattaaaatgattacttttcacttatctcaaattatttttacaatggaatataaatagatttttctatactaaacctctgtaaattaatactcgataagttccacttcaaaaaacgaaccaaaggtcatatttcatccatgcatgttcgaacatgcaaagagaacttactaataatgtttggtcccaaattcaagtattctctggttctctttgcatggatgaaagaagatggccatatttttataggaatgttcagaaggagaattcacaatgtggagaagatagtgctactggtttatattgaagtcaggttaaggtttatgatagtttcaaggacattgatgcggactaattggcatcagatagtcgtgcttccaagactaatatcaggcgtaatgggttttactaatacgattatgaaacagcctcaagaaaaaaggcaaaaaaatcgtattggagcaaaaaagtcgaagaaatatcacgaatatgtgttttcgttagcgaataaggcgttttcgtccaaaacgcatcgtgaatcttatttttcgtatttttttcagaaaatggctcacatatctgcttgtgtaataattttggttctgtagtcttgtataactttaacactttaatttcgatataatggaatgattttaaaaggaaaaaaaaataataaaaaagaagtaaataaatcgatttttattaaattagaaaacaatttaattttggattgaaaaaaattaacgtactagttcaaaacgccaagttaatatctcggatagtcctactttctcatgattcagttctttatagaccatctaaatcaatccgtctatggatctaaaatcgttcttgaaactaacatgatgaaacggtccctagataggttggccgaggcaaagaagaagaagtcagctcttaactctaaaaaccaaaaggaaaaaaagaagtcagaccttactcgttttgtaaagatttagtcagcgaagaagtcgactagtgttcgagtggggaaacacgttgtcaactcttaagtctaaatctttgaccccaaaaaagagagcaagttgtccactataattctgtcttcttatgcaactttcatttttggccacctaaagtttcaagcaaaacaacaaaaatgatcttttagaataattattataataataacgacgattaatgaactctatatatctcacaaaagaaggacatgtttgcaatcccaaccaagaagataaacaccttagcaaattcaaagaagaatatatcaaacatcttttgtttctaagaaataagctctctgattatgtcgggagcatcttctgtttcttctatttgttcctctaatgtatcattgatccctacgggacctcaagtgttcatcaatttccgggggaaagatttacgaaaaggcttcatgagctttcttaagcctgctttgaaaaaagaaaagatcaacgtgtttattgacgaacaagaggagaggggcaaatacctaatcagtctttttgatacgataggtgagtcgaaaatcgctttggttatcttttctgaaggatactgcgagtcacattggtgtatggacgagctggtgaaaatcaaggaatacatggatcaaaacagactcataatcattccaatattctacaggcttgatctcgatgtggtaaaagatcttacaggaaaatttggcgataatttttgggatttggtagataaatatcaacctgaaccaaaaaagctccataaatggacggaagctttgttctctgtttgcgaattgttttccttgatcttaccaaaacacaggtttttatttttccacttttatatgttcttattacttgataaattaagtgttatctgtttaactgtaacaatttctgttcactcattgacattttactctcttttctttgtatcatagtgacatttcggatagagattttgtaaagtcaatcgtcaaggctgttaaaaaagtgcagaagaatttcttccaacgaagaaatggagaaatagaatatcaagatttctcagtccctgcatgtaaactcactatcactatgcacgagtcaccaaagtaagtagtgcctctcttacgatttcatttaggaaaattaatgatattctgatgaaacatacattgcttcagtggtatgtcatgtgaaagtattgatcgaatagctaagttaaatcattttagctactagtatttccacaaagtaataaataaaaaaatgctaaaagcttgtgtagtagattgttaagttttacttttattatatttttagtacatctctatcatattttaacttgtataaaatgtctactatattttccttcatcatttgctttctaatttattattggaaaaagttcaacattttcttcttaaggatagattagaaactgtgacattaatttgcatgaaaagattagatcccctaggtctcgtttcctgataactttttttttttcatttcgatgtttctatttatgtacagtgaggaagccgttcaagttacggtgctaaatgaattttaccagatgaagaatcagtcaccagtgccctcatacgaggtcctaatttacatttgctgtcttgttagttgattttctttatatatgtttattggtatcatttcatgaactgacatggagatttatatatcgacagttcaaattttgggtcgaccttacgagaccaaagggtaacgttttcatgattgacgcaagagatctttccattgcatggtcagaggactccaaccattggacctggctccctctcccaaaccaaaattcaaagtaaaacttctcttaaaagtatttcttatataaattgaaagaaatatcttaaatcacgaaaatatataccttataacgataatatttctagatttattgtctaatactaagcacaatactttccagtgaatcagtgatggaaattgcatttttgaaaagtgctagctggctagacgtagctggaaagtttgacactcgatatttgaccccgaggacaaggtacgaggtggtgttcgtagtgaagttagaatacacattcgaatgggagacactagtgaagctaaagctagacttgccgaatacttgggagaaaccgcaagaacagagtgtggacatgtttgactacataagtgaccaatggctcgatattccagttggagagttcaccacatcgaagaaaaacgtcggggaaatctcttttgcaatgtacgaacacgagtgccaactgtggaagtcaggcctcttcgtcaaaggtgttacaattcgtcccaaatactaagtcattttataagcatgtatgttgttggtctgagatatatatagtggaaatgctcgctttgaaccataatcttagtttcacctcccaaatgtttgttacaatgttacttgtgtagatagtttgaccggtttcaaaacttatactctatttactctcttctgcattggttatcacatccataaccaccaaactattgaattctataactgaccaaacccaaaccgaatttttagaatatccgaacagttcccgactctctatcctattagacccgaaaccgaaaaaaaagaactgattgggacgagtatccgaatgcccaaacctaccaaagttgtaggcctagagataatcctatcgaaaaatgaccaacaacattttgcaaaatttgatattcaaccgattttaattaaagtccacaatagtcatccataaaaaatattgtttacaatgataaggtgcggttcgatactaactctattttggtattcggatgattgatcaacaacattttgcaaacattgaaaagaaaacgtaaatttcgtttcctaaaaaaaaaaaaaattcgtttcctcacaatataataaataatttacaaagaaaaaaacgaaaaatggcaatgtgactcactcaatcggtgactcgctatagtctgtgaagaaaggccaatttcgccataaagttcacacctttgatctcctttgtttctgggtttctcctaaatcatccaaattggtatcgaatttgcccttctccgattcaatttcttcacgatctcaaaacccagaagaaagaatcatgctttcgttatcatgctcttcttcttcttcttcgttgcttcctccgagtttacactaccacggttcttcttctgttcagtccatcgttgtaccaagaaggagtcttatctcgtttcgtcggaaagtctcttgctgttgcatagctccacctcagaacttggacaacgatgccaccaaattcgatgtaataatctcacgatttgcttcttctaaagtaattaaatggatcactgtggaatctggacttaaataaagtactgatattggtatcattttggttgcaacttgtttgataatgtgatgatatctcatatctgcagagtcttaccaagtctggaggaggtatgtgtaaagagcgagggcttgagaatgattctgatgttcttattgaatgtagagatgtctataaatcgtttggggagaaacatatcttgaaaggtgttagctttaaggtattttgttgtgtttacagtgatgaaagaaggcttatagattttgaaaggcacacaaagacaccacacaaagacaccacattctaaccaatttttaagtatgcagattagacatggtgaagctgttggggtgattggtccttctggaactggaaaatcaacaattttaaagattatggctggtcttcttgctccagacaaggtctgttactgtttcttctctatatggcagattacaacctttcaggttatggattgtttctgatgattggtatgcagggagaagtttatatacgaggaaaaaaacgagctggtttgataagtgatgaggaaatatcaggacttcgtattggcctggtaggtgctgttctggagatgtatttctcataagtcgttgagtttgtatctaaatggctttttgttttctgtctcacaggtatttcagagtgcagctctctttgattcactatcagttcgtgaaaatgttggttttctactgtaagatgttattctttaacgtcctacataacctcatttctagctaaaacattgctgatgttctttcgttttcagtcatattgattaaacttttctgtggtaactaatcacagttatgaaagatcaaaaatgtccgagaatcaaatatctgagcttgtgacacaaaccttggcagctgttggtttgaaggtatctcaattcagtacaactttcataacataggctagttaagtgtacctagtcaatagtccacatccagcttattattgccttttgtttctaataagatcagggggttgagaatcgattaccttctgagctatctggtggaatgaagaaaagggttgctttagctcgttcactaatttttgatacaacaaaagaggtcatagagccagaggtaatcttaatatctacttaagttcatgaatgtgtttcttctttagaggcttgactcctgcatctgtatagttattgatgaaacttaaagtcatcatgtggcaaaaattaggaattcatttatgggtttcactgccttttcttaggtgcttttgtacgatgagccaactgctggacttgatccaattgcatcaactgtagttgaagatcttatacggtctgttcacatgacagacgaagatgcagttggaaaacctggaaaaattgcgtcttatcttgttgttacccatcaacatagcaccattcaaagagctgtagacaggttccgcttctagtccatattacaagatacgtttttgcagcttttgcttcatcccttgagtaatatttgtttcttctattcaggttattgtttctgtatgaaggaaagatcgtttggcaaggaatgacacatgaattcacaacctcaactaatccaatagttcaacaggtcccttcttttcacatgttcacatctaatttcaacattgaagtacttgggatgcagtgttagtcattcatttttgttgtgtatctcgcagtttgctacaggcagcctcgatggaccaatcagatactaggggaggcaaaccgagcctaaagagggacactaaccgataatagggaacgcaaacaagtaatggctgacatacaccacatggctggatcaattggttcaatacgatgctacttgtaaacactattttatcttagatgcatagatcagaaaagcattgtaagttgagatttcattatgcatcaatgagaatctggtttaatgtgccaagaacaagacctgcattctcaaacatataccccaacaaaaatgaaacttttaattgacacttgtgaacctccaaaacagtagtaacaattgcatatatacatagagtagaagaaaagaaagatttgtctttttaactacccaacttgaaagcatcaacaaagagacctaagcaaacaccagctttccaaaaattcataaacacaacaaaagactgcaacttccctgaaaacattgaagaagacggtttcttatacataagcataccgattccttcgatcgcagcaacgacgattccggcaacaagcacatcccaatcaccagtctgtccaagaatagtagctagtgcattggcagtgtagaaaccaagaagcagcagaaatatcttcattgggaagttttttcttgcagagtttatcttcccaagtaactgtttgcctcctgcaatcgcaattctacctaaccgagtgctaccgagaccggttctgtctccattcatctcttgcccttcaccactatctccaggaatagaagaaccagtgtctaacgcaaacgctattttccggtttggtcttcttatctgaaaactattggcaaaaaatgaagagacttttcaataaccaaaccaatgattatgcccaaattcaataagccaatcaatgattgtgcagaaaatcaaaacgcaaacgcaaacgctaccttttcatgggataaggaaatgaagtgagagtaatggacgaagcttttattctcctatggaagacatttatcataaaggagagacctttttcaatttctagaactgggaaaacgcgtgaagcttgaatttgacaagccattagaaccagtctcgagttttctgagatttagggttttctttatattacgtcacagcgatctactagacacaaaacgaacgaatcttaacggatcatatccacaaggaatatgaaagaaccagattgatctaagaggagaatgcaagaagcttggcttgaaggaatcaatggagattggtgaagatgagtgatgattgagaaacaatgacaaaaggcattgaagctttttagattttcattctgttgaaaaagacattttactccttctactcttttttttgttctgaatttcaagttttacaaattttggaggacgattaatcaattataataaatttggtaattccacatattatttgaaaatctcacaactatcaaaacctttagtctcgctctcttctctctctaacattcttcagagagggagactttatccttattctgccgttcggacgtggtccgatatcgccgttagtttagccgtgacacggctttccgttgccgcgttctttgtcgtccggtttcatgccggcttatgtaccaaatctccgcgatggtcagctctcgtctagcaccgcttagcttcttcagcaacggtggctagctcttgcccggcacgaccggctattctagcggtcatggccggtttatgttcttctttaatttctgaattttgttttagttttgctaataatctcatcggatttatgttgggggtaataatctgtcatatcctcgatggttcttttccctctctatcctttgagttttcaagatgggtttcgccggatcgttttttgaacttaggatttacataatggtttcaaagaaatttttctcttttgttgaaggattgaagattcttccgtcgtttatcacgattccttaagccgttatctttaatttggagctttgatgttttcattctggtgcaaaacacaagaatcatctcaccggaatcagctcaacggcgaaggttgttgccggaaaacttttgattattcatccagcgtgtgacgtggtatatcccggttgtcgacatgtgttcatggatggagttccgatagaatttcttctgcagaaggttatctaatgggccttttttgggctttatgtaattccaaagttggagcttttgtttaagctcttgtatgatatgatgatgtttaataaaacttatgagacaaaaaaaaaaaaaaatcaaaacctttagaagttttatttttcagaatctgattaaagtatattattgcttatctaattctgtgttccaactttattttagtaagaggtatgatttcctgccaaaaataataattaatattagaatctggtctaatcatgcatatctctttatagctagcttctgtttttaaatcttaatttttttgtctaaaatttaaattaacattactaaaaggtaaaaacaaagagattaactagatttaaactaccacactctaaattcttatgcaaaacgaaatgcattcatccattttttcatatctaaggaagaaaaaggtggaagtgattgttccatcatcactaccagacgacgtcatagaggaaatcttcataagacttccagtgaaagaactaatccgactcaagttttctcttccacaagaatggagattgaggatcgagtctcatggtttcggcccacgattccacatatataacccgaaactgcaccccatgtttatccttttcgtaaaatacatcttcaagtgtttatacatttactccaagtctggtttcattttgtgttttactattttgctttatcttggtttacctttcctagtgcttttgggtgtgatgttcttactaggtttttaaaatagtcatttataaacagatgtctctttcagtgttaagagatgagacctagtttgaatagtgaaaagagaacatgtttgcttggagattcttgctagacttttgaacaaatgtttctatcgcttccgtgtccatcacattgttgttgagctcgttcagacactgacattggttttagtcttttagacaatctgtttggaatcgacttctcttctcaatctaactttctttgctggcattttaccagccaggttcacatatttggcaaatggtggtcgaacttggatttacctaagtacaatattcacaacaccattggcttcaattggagctgctggctctagaagtcgatcccttagtcttcccgcctaagctctttgaacttgaagttcgatcatattcatatgcaccatgtgagctcgcatccaatagctcattctccaccgctcgatatagttttccgtgtcactgttcattcatagtaatagtaggttattagcttctttcatcacccagagccaactaattcaatgcataaccttcttaagcatcctcagtactaagtttcagagtataacttactttccttgaaactacaagactcgaaccggattcgttacttgaatctctttttctggattttgtatattctagaataataatagaaatcagcaggcgttacaaaaattagattgtctggacaaaagattagaaaaaaacttacagaagttttacaattattttgtaagaacttatatataactcacctctcatgttttcactttttggtcattggcaaatcaataataatggccaatctaatccaatttattggacccgtttattctaatacgagaaacatacaaagttacacgacacttgatcataattatgaccaaaagcgacgaagcattactattacagtctttaatgccagtttctggcatttcaccggccatgttcacacatttggcaaatggtggtcgaccttggatttacgtaagtgcaatattcacaaggccaatggcttgaatcggagctgctggctttagaactcgatcccttagtcttcccccctaagctctttgaacttgaagttcgatcatatgcatcatgcgagttcacatccgatagcccattctccagcgctctaaccaagttctcaaaatagtttttggtaacactgttcgtttccaggttagaaaatgttattagcctctttcataaaacgcagtgccaactatgtgaacgaaaacttccttaattttctctaaattttgttactcagcactaaatttcggttagtgactcagtcgtaactaaatgtgcttgaaactgtttcagaacagctactaaacataccatgtcactaatttggattatcagtttgttatgtaggttatgaaagtaccttgttaaacctgccagttttgtgcggaattcattaaaatcttcacttggacctttggcatctaagtatggtagcagctctttttcagcacattgatgaagtcgttcaaggcccgactcagcttcgcctaaattcatggtaaaataagaagaagtaatataataaaaattttgcataataaagcatgttacaaacaaaagtccttatacctatgaagtatgaacaaatcgaaattagtggtcaaagatgggattgaaccctgaccaaattggttaagatttggattaaggagcttgatcaaattcttatgagtgacgcttgactacatagtccacatgatctcacatagggaaaatcctaaaccattcccaattgtactaagactacatggtgttctataagaatcacgacaagatccatcaatgcacgtatgaactactgatggatctaaccatcactaagtactctccctcaatataatatccaacaattggaaaagaccatagattaatggttgtttaatctcttattctcatcttcatgcataaacctatatttggaaattttaaatgtgagagctaaatcaagttaccttgcaagtactcaaaaaacactctttttccatgctcctggtcaggtatgtaaaaaccataggcatatgtccattttagaactcgtctgcattcaactatctatgatcgtagagaaaattagtgagcaaaatccaaaagtctcagaaaggccaagggtggaatggattttacctgtaaccatgcttctataatgaacttcagttgtgattcaggctgacactgtatgtcactgagcttctcaatctgcgaagtccatagaacaaaagctttagtgaaacccaacactgtaataagcaagaaaaatcatcgaaagttgaggtctcatgccaaaatagaaaaatcaataacctaagcaaacttttgaactttaaatagatacaaaatctggaatcacggattgatattaaaagaagcaatgattattttagatatttcacacgtttttcacatcaagcaatacttgtgatccttatttacatcagcaagtgttgcactgtaagctcacatcatctgtttgcatcttcttaagatccagcagcgccttttgcctagactgcagcaagcagtgaaaaaacttgtaaattgttttggaataaatgccaatgtcctttagtatatacaaaacttatttttctttggggtcattatctaacaaagaatacaattccccaaaaaagaaacatgaaacttcaggcagatgatatgataagacaaatctcaatgattatgatgaatctgcctaagcctaatttcattgtgttatgcttaatatacatagaaatttataaaagtactttgctccagcagttacacgactaattaactacctgttactccaataacagatttgtcacattacccaagcccccaacgaacatagccaaaagatatataaatgagctggtagaattctcctaacaatagttccttctccgaaaaatacataacagacactacatgtacctcaaagtttcatagtctctttagtttttcaaatcagtcagcttcacttcctaatttttcaaacctctatctctcaaccaaaaataatgattttcatatcttgtggtactctaactcgaacaattaaaaaaatacaagctttaaattagtcattattcatcaaaatatgaaatagttcatctatttttcaaagtacataaagagattttcatttccatagcaaaggaatatgaatttgacggctgaaaattctttcttaaatttccccttcaagaggagctaaataaaacatgtgaattctaaatggataaaaatttacataccgattgattggttgcccatctctcatagtagtgggtatatctctcaagagagttctttgccatctctcggcgtttttcagtctcatcatactgcacagaaagattatgaaagacaaaaaatatgttcaaagataaatagacatattagttgttagtcaggaacataaacaatgtacagaactcatacaatgccatcttgctttgctgcttcataacggttacaagcataaaagccacctgtcttctcaccatgctctgtccacgccccaaggcaaagcctacatttaaacaacacaactatttataatgagatttcattgtgagcaaccaagaatcttacacaaccagattcatatgacgatcagattacaagatacagaaaactacagaaagaaaatacaaagcagattttgtacactgacaacacttaaactaaaataatctatttatattatatttcttcagagtccataagaatccaattcagagttagattacaggaagtatagagagaataaaagcataacttctgacattatagcattttgtttaatcaaccactttatcaacttaccagcagaactcaaatttacatggtggggtgcacgtaatatgcatacaaccctggtttttctctattggccgtttgcattttggacagggcttggaatttgccaaaatcctgaaattcaatatggaacttagcagcaacaaaacaaaatgtgaagcatgatgcaccctaatgctaggagatggaagagaagaaaccgaaaatggttttcttcttatagttaaaaatgcaaacatatccaacattttggcttcctttggctatacaaaatggtagccataactacgaatatataatacaagaaaacaatctatttataaagaacccaaatattttaaaaaatctaagcaccctttaaggtcgagcacaacaacaacatatctcaacgatatctcataaatcaacgtaccaattcatattctccgactcagcactattcttcaatacccacttagaaacagtgtcacaatctacaggacggtgagcttcttcagcacactgcagacccatgacgataaaagtgacatggtatagttgtgtcaattaaattctaaacaatggaaagatgaaactattctaactctaactgatagcgtaacttacattccagcagaaactgtaacagcagcgacaattcacatcataattaccacttccaacaacaaaatttacagcatagtcacagccaggagcgggacaccacttggtctacaacataaaagatgcattactatctgggtgagcacatatatggacggatagagaacactaaaattatgcactgatttcatttgaaggttaatataacacaaataaatatcatgcacactaacgtacgatcatactgagtttgctagcttacctttctattgtcttcaacgtatgatctgacaaaataactagtgtacttttgcttatctttatcaggagctagcaaattgatcatatcctgaccaacagcagctctgcaagaaggatctggacatcgtaatgtaagacaccctggaccatcattaatcgctgtggtgatataacctaaagatgaggggaaaggtcagatagttaacccaacaataatgaaccattattaattgtaatgcttatatgttgcaatacttgcaaatgaagactgaaatgaaacataaggtacaagttactgaaatcaagcaaaaaaaaaaaaacagtacattgcaagttaaatctaaacatcacgtttggaaatgggtctcaatatataaaacaaaccttcccaacatgagtcgcagaatggatgaccacaagcagcagcatgcaatttgtcagaaaggaaagtctcaaaacaaattccacaatcaagctgccaaaatgacacagctgaattctattagatgaatttacaatgttaatcgaaatgaaaatataaacaatgggagacatacttctccatcagttgggaaatcaacaacaggtttctctaataaaccaacagcatctcgaaccttttcctcatcagcaaaccattcatcatgaactctgctcacacacctaaaaacatttacacaaatgaaaagttcctctaagcacacacacacacacacacacacacacacaatagctgtaatatctgaataacagaatctggaatcacaccaattgtagtgacgaagcaggatcgcagatgaattcctcgaaatggacaaaacagtagaaatccttgaaatatcatcttcttgaagcttacaaatatctgcttcgcttaacacactataattttgctacaaaccaaaaacaaattcttcattagccattgtgatctataaaattttctcaaatcatcattaacattacaaaaaggtcctgcgattatttcagaaaccaaaacttcaatctctgtattggaaacaacattaatttcaattttggttaagatgtagatccagaataatggagaagagaaacctggcggcgacggaagataaggtcatcggaatcatcagcagcgtcgtcaacgaactcgtactcgccgtcggcgtcatcttcgtcggagtcggcgtaatcggagtagttttcggtgccgctgtagaaatcgtcatcagcttccattgagattctcttcttctcgattcgatttcgatttcaaacacaaagcttaattttagatactttctctctctctcgtaagaagacgtttggaagggaaaacgttttaatcgaaaaaggaataatggcaaaatggtaaattaagcttagccactaaatccccttccaattttatcccaaggcacgattagaagaaatatttaaaacgtttgtttcaaattttttggtgatgaaggcaataatgttttatccaatgaatatttaggataaagttgtatatatggcaacaactaataaaatttgttttgctatctctcgacttcttctcttgaaaatgttttttttttttcgaaatgaattgtttagatcgataacggctaattgtaatttcatgttcacaaaaacaaaaaggatggaaaatcataagtaatccaaaatgaacatgccggtacagcaataagtaaatagttcattaatttacgagcttgattatgtaatttaggtgaaacagaagccaaacaaacaaaaagtattcaagataacgagattctaaaattttgtaagcatcgacttaaaaagactttcctggaacgttaagagtcgggacaagacataaaccgatactaataccgacaggttaagacaaaaatgcagagaatcaaagtaaaagtaaaaggcatttagggagaaagctaatttactactaatgtgtttatactattatgtcttgccttttgccttcgtaatttaattacccaaccaacatttgtagccgaggttgtgtttcttcaccatccaccaccaccgccatcgctcttccggctgctgggttcattcccccaaccgccctctccatcgctctttttaccaccagactcgcttccccaaccgccatctgcactgctctttttaccaccagactcgtttccccaatcgcttccgccaccgccagaaccacttccaaaaccgccatcctcactgctctttttaccgccagaatcgtttccccaacctccactaccaccaccgccagacccactcccccagctgcccgcaccgtcactcttattgccaccagactcgcttccccaaccaccagtactgccaccaccagtctttttaccagcagactcgcttccccaaccaccgccaccactatttccccaacctccatctgcagttccagtatcattattaccccaatctccgttaccatcttgtctatcactattcatatcatccctccgtcctctgcctcgaccacgtccacggccaccatatggcctaggcgctccacttggatgtccatcacgtccaccaccatttctgtactcaccgcctctccctacaatacagttgcacagttacttaagagcggacgtccagaagtatagtcaaggagacaacataaataatgttaatatataaatacttctcggcatctaaaatccagattaccagaagttaaattaaaacataaccccgagaagtagaacaatgaccacacaagcttttctatgcaagttaaaaaaacaaatttaaaatgcattacctgagcctgaacgatccgagttacctttccagcctccttcactctgagaactaccccaaccacttcctccagatgatccatggtctgctgggcttctcatcggtaccttggcagcaatagacctgattgatggcgccgattcttgcaatgggtcatcaatatgcctctggaagtatgccacaagccgatcaatgtcctcaaacatccttttcctgaacttaaatcccttgggatataaacctatatactcatgatgtgggtttgtgctccttatgtaagacagaataaaagtgcctggatgttcgtgtgaaatcccaaaacaataaactattcttgaaggattttcgcccttctcgatcctaagaagatcatctacttctgatttggtccccttacggaatttccgatagttgagcattgtcttaagatgagataccaaaggatcaacatatcgatccatgacctgcagttatgagatggtgtggttaacatcaattactgacgcaacaaattagatccaaaaaaggcttacaaaagtcggaggaatgttaaaaagctgacggatgttcaagaatcaactaaatgtgttcactgacaacaccattacattaaatatacctcatctagatcctcgaaggtgtcctctccaattgtcagggtcttcccaatacactgtaggcttgtaatgtccttgttttctttcccaccttcagctatctccttgtgagcgtaaactccatcataaatcttgagggtcaaagttaaaaagttgagtcctcgagaacttggacgaacaatgctttctccaaagtctttgtcagacaaatactgtacacagcaccaacaaggaaactcagagacagagacttctttgaatatataacaaatgcattcaaaactcaatataagtaccaaagaagagtaaatgtttggcatacctctgttgcttggtcagctgtgatattctgaaagcggggatggacaatcatccgagacttaaaatgcttcctcaccagctctttttcctttcgagccttctcttttacaagctggagactgtttctatcctcatggtaatatgcatccacattctggttatgctggtgtctgttgtttctcatttcactttctttgcaaataaggaacacttgatacctctgcttttgaatcgatttgatcttgcatgtgaggatatcgccttctttcagctggtccgccaagtcaacaatatctctcccatcatctgagaaatcttccttcataagcatcccagttaacccagaatctaatacacatatggctcttccattctgcaatctccgaacactggcctggacaattctgccctccgctatggtgtcctcagtttcacctgaaatcatgtaaaattcttcatctggacttggctctttaaatggtatccgccaatcctggaaaccacaacttaattctcttatgatattgctataagtttccttcttattctcccgtttcttgctggcaagatattcatcaaggacaacttttctcaaagaagctggccgatctctcacatgctcaatagccatttctatcgcatcctcatcatcatttgaatcacctctgacatcctcatcatatatatctttcgccaattcttgagcaagactatacgactctggatggattctggtgtcatccaataagtcaataaattgactgctactagcagccagcccacttctgcggatgcgcaagaaaccggcagcatttacaaaaacctttttaccaagtccatgcattatcaggtccttgcggacaaagattgaaccagctcttacaagcgacctctgcaaggatgcagctttccgaggcccaagtccagaaatgaactgtaaaggagaaaagaaccaatcatggctagctgccaagttaatatcgattccaacctggtttgtaatgtcaaccataacctgctcaaccattccatacttctcatctagctgaagaaaattctccaagggatgaagcttccaagacaaaatttcccgacctggaccgcataaagttgccaccattgctagtggattctggagatagcgtccaagagcaactgcacgtctcacgttccctgactgctgaggtagctgttcacccgagattcgagaattttcatatagcctaggaagtgattcatccacataaacaatgcttaaatcatccatcccatgtccgacatctctaggtttttcctccaccatctggaatatgacctgatatatagaataaagcataacaaaattttactattcaagaggagtagttatgaaaattgaaacacagcgattaagttttcacaaagtgatataaaagcagaaacttaagcttatttcatcagatatataacattatcattttcggtaaagcagttgaagtctaaaaaggtatagcgagtttgaaagtattgatgaaaaacacacaaaatccaggtctctacaaagtaggcactgaggaactaattaagtaaaccagtgaccacagttatccagaaccatatggatataggtcctttatctcaagatcaaactcggaacatgtacattgcaatagcataagtcaacgaacatagtgtcattatggtatatgaagtcttacctcataaatatcatccttcagacgagtacaagacaaattgacagctcctaaagccacaacatgcggttggtggtccatcataaactttaaaacacgatcctggtcactctttttacgttgctggtcgttaacattttgagatcgcgatgtaagggatccagcataaagcacgtcaagcacctcacctgatgagtccagcatcacaaatgtatttggtggcttcccaggtccccaacaacatgccatgaccctcggtgcagcttcctcatctaaattaatgtccatttctttcttttggtatggccctgcagacaccttgttccacaaagcctgtccatactctgaaagcaaccgactcttcgctctgctagttagcaaggatcttgcttctttctccattgatggcaaaagaaaagcatgaagtgcatcctccaatatcaactttctttgctcattccagagttgagcatacttactaacaccaacacttagatagtgttcattgcagtcgctaattagcctattcatgtaattctcaggcagcttgaaggttacttgaagaagtttctcctcttctcccttctgaatgagaagccattgtgcaccctcaaacttgctcaatggcttttcacgcaaccacttaatcccagaaaactgatggaacgaatcaattactgtatttccatctgctgttggacttgttgagaccactgcattctccatataaatgccacggacatactttttgactgatggctcgcaacttatctcaactgcagcctaacaaggaaaaatgggatatctccgcattagtgattagggaagtccttctgatattaaacccagctaagcaattcaaaaaatagtattattgcagagtatataccatatgccgtgcacctttcagaactgccagagaattttcaaacattgcgcacacaaagtttttagccatctcctctggtgtttcctttgcatcctcaagctcatcaacctgcaactcatttagcgtcagaactgccattccagtacaacatgcaaatcaaacaatataaaagcataccgaccagtttttctagggacaatgcaagtcccagttgctcagcactatacccaaatttgtttgcaacctcccagagccctgctttactgcagatgctatattgtgatttccttttcggcctcttatactgcccttcatcaacaccaatttcaccgggaggaaaatgcaagttgaacttggaatctacatcatcaacttctctttctgtttctgcaactttaagagacttaatgactgattcaaaaagatactgatttagattaagtcttgtttcatcatagaccctcctagactcttcttcgtaacgttttgtatagtaaccatgcaacgccattttcctttttcgaagaaggagccacttcttatccaagtcatgaatcatccagaagacctgcattggaaaatagtatagaatccaccaaatttcctctgacaataaatgttaacctgagcacttgttgtttatccaagataattgcttaccttatgccacttggtctcaggtttcttgccttgattggcgccatcaaaatcaccagtgtccaacaagctccggcattgctcctttcggtacatagctataaacggtatctagaagagacagaaaacattagcaagctaatcaatgaatcaaagaaaatccaacgagagaatgaatccaaaacctctaatttctgcacatgatgtagctccaaaaattttgcgatgtcatccttattaaccgagaaaccccgcccatcaaaagttccatcagattctctaagttgggaagcaagttgagcatatatccaattgctttcttcttcaatgctaatttcatctacaggagggcttccggtgctttcttcagatatctgtcaaagtttacaagatatctttacatctatccttgaacaccaaagaaaacatagaccacaagtatacatagagaaaactaaagaagataatgcacctgcattctctcaggaatatcaagctggcggatttcatcatcattccctgtcatatatttctcagaaagaacagttggttcaaactcatcttcgagccttctttccatcctttgattagatgccaaaccctttttgcgaattgttaataattcgtcaacatcaccaaatatttcattagcatctcgcatagcagtaatatctgatccctgcctatatttctttttcttcgagttgcccctgaaaagtaagttgattagaatcagaaaatgtacatgacataagtgatatgttagggcacaaaaaagacagaaaaaaaatacctcttaggaggaccatgctcatcatcttcatctacaataaaatctgccatttcatcctcgctcccaactacatcttcttccacaactaagtcttcctcatcacctacatcatcaggtggatctagtagacacaaaatgtacatagtcaactatgtgccaacagtcaacataatagtatcagaaggcacagagaacctaccatcaacatcaacatcatcaaacagcctgtctttgatcttatcctcagcacttctcctagttccacctctactatcaaactcatcatcggatgattctccctggccatttccctgttccctttgagctttcttcaaccgcttatactgcctctgtcatggttcaagaaaaaagtcaaatgtattagtactgcacatatatttttagtgtatctacaaaatcctgatgtattgttatatacacaaatatgactaacctttttgaatttgacgttgttatcttgtagaagcaaataatcatcttcatcaagaccttcgtccctattaaaattatcataaatggaaggttagtcagaaagagaacagacctgctatagttcgtctaatggtaacttacatactcatcacaaacaatgtatgaaaatcacaaataaagactgctgagaattaagggaacatttcttcaaaagtatcatgcatgtcaacactaacatttagtttttcatatgttagaaaaggataaaatctaagagaatgagtaaggatataaaatattcactttttctttcgtttcttcttctttttctgcctctcctcatcgctatctttcctttcttcgtcttcttcctcttcttcctcttcgtcttcatcattcactatgaacccatcattctcatactcattcccaactacaaaacagatatacggatcccacatcatggaacaaaaatagcctgaatctaagttaaaaagcctagaaagaaaaagaaaaaaaaatactcaaacccaaggtgagagaaatgtgtgcagctcaaaacttgcagaaaccatgaagtctaaaaaggaacaaatcaagcaaccgtatgaaacagagaatatagaaacaagaagtggtagaaggagagactttgcagcagataagtaaacatctaagaaacaagatgcattcactttttttttttttttggttgccaaatccagacactgcatcttctaatggagcaaatgcagcagaatttctccaaatgaatcgattttaagacaaagaactgcatgcgcttcagtactaaaccaaaccataccactaatttccttcgatgcaatcagactctacagcttccagatttagggtggtaagcaaaaagaaacgaaagacgacacatttctcactgggagaagtcaaaatcaaggaaaaaacttataccgtcatcatcatcttcttcatcatcgttttcatcatgctcagctggatctccatgaactggctctccgtcgtcatcctcaagctcatgatcctctacgcaaaagagaaaaggattcaattttttcatacaaatcagaagaaataaacaaaaccctagtattattacggcgtttcacacagaaaaaaattagggtttgcgacgaagcgattaaggtaccttcatcgtcagagattgcgttcctcgccatgtttatctcaacaaattagaagtacgataacgcagaaattagccctgcaaactgcaaaaaaaaacgaagagattgtgattatgatttctgattttgcgaagagaaagggggaagaaggttctcgcgattactagggttcttcgaaaagagaacccagaaggagctagagaagagaaatgggtttggtaaaggaagaagctttaccagtgtgaatttttcataagcgaaaggcgacgaagaactgataaacgaagaagaagacggagacgatgaaattacaagtttatactgacagatttgcctcaattttttctctgcgttttagaaatattttttttttaataatgtttttaaaaattattatactttttgaagaaatgtaaagaaaaaaaagtcgagactaaaaacaaaacaaagtttattcaacttatcttataattagagtggagaatatttaattcgataattcgaaatataagaaaatagacatacattaataattaataaaaaaacgttacatcggctaaaatgtttaaacaattatttaaatttatatgataaataaaattaaaataaatctaaatcggattcaaatttaaaagtttgtctatagattaatttaatttttagttaaacaatttaattttatcaaaaatataaaattttaaactgtgaaaaagttttaaatcttataattgatatatttaaaattaaataacaagttgataataatataaacatttggacatatataaaaataaatataacactagacaaattatattgtaggacaaattttacacatgaggccctaaaaactttttatattaggtggcctaaaacaaatgtttcggcttttttatgaacgggccgggcttggattcggccatattttgagttcatgccttttaatatggcaagaaaaaggttagaaactagactaattgtagattgtaagtttgtaaccgtaatgagatactgcaaatgggtaaaaatcgtattattccataaaccacaaatggagaagtcaaagtttggcaaatatcacaacaaaaaggttgatatatcacatgcatattatgtagctacaccgacatatcaaagttctcctatcaaattttaaaaaacataaatcaccaaccctactcacacccaccaatgcagcccatcattcttcccaaatctataaacacaacacaataatacaacagtgacaattttagcttttaaagaataacgttttcatgtgactggataaaaacgacgtctacgtagcacgaaactgctttgtttgttcttgtaacgatccgtaccatatctttttttattaaaaagtcacatttattatgggatcaataatttactctccatggattatttcatactataatgtacacgtacattatcataaagccaagataaaattaaaaacgccttttactacgtgttagtctatataatatagattaagtctgaaacccaaatcacaaacttcactcaaaacctaattaacttagagagaaagagagagagagaagggttgcaaaatgggttcttcgtaccaagaatctccaccgttgcttcttgaagatcttaaggttacgatcaaagaatcaacactcattttcccatctgaagaaaccagcgagagaaaatccatgttcttatccaacgtcgaccaaattctcaactttgacgttcaaacagttcatttcttccgacctaacaaggagtttccaccggagatggtctcggagaagctgagaaaggcgttggtgaaactcatggacgcttatgagttcttggccgggagactccgcgtggatcctagctctggacggcttgatgttgactgtaacggtgctggagctggctttgtgacggcggcgagtgactacacgttggaggaacttggagatttggtttatccaaatccagcttttgctcaattggttacaagtcagcttcagagtttgcccaaagatgatcaacccttgtttgtctttcaggtaaccaataaataaacctttgctttctaattttttttgttccaaaatgatcctaaatctagttaacaaataacaagttttttttttgttctctttgcgttttgtcttttaatcaggaagaaagaaaaaaaaaatcaaaagttttgagtgtataaacacaaagaagcttccttagaatcaaaaaaatttcgaacatgttcacaataaattttgtgaacttttagctattttgcaacctcgagggagggatctcaaggatctaagtaccatcatgatatttatagaaatctagtttatataggtcattagtcgaggaccatgtgggtaaaatagaataaaaacttgtttcttctatagagtccaagtattaatcggagttttgtgtgagatcctccgtattcaaaatataaatgtttaagaaagttgcaccatgtatgtcaaaagtataactctacaaatcttatgttttatagtagaaaagtaagtctatgaataagttaattagtgaagaaaattattagaaataaataataatagtataatttagttttttttaaaaattatttactaatttagttaactgaagaaatattctatgaaatacagaattcgggtcaagcctcggcattatggagttttatttctatttgattataacacaccacaaacgaaaacgttaatatatttgggatattgactcaagtaaaacattcttatgaaatctttaagtaaatcacccaccctactcagactataattcatcatgtatttcaagtataacgaaacatgtaatcacaaagtaacatgtgacatatatatatatatatatatatatatatatattttcatatatttgacatatatatactcggacacgttccagtttcgcctgcagatataatatgccaaataagtgtgaaaatcttccaatgcacaatataatactgacacacatatttgcttgtcaattttatttcttaattatataaatactaaacatacgttttcaatctacatatagcattgtcaaattatcaaactatcgaagcaagtgaaaaatgttcattaccaaatgtcgttagctcaattggtaaatactctaggcaaattttagaggtcgccggttcgagtgacgcttgagacgaaactaatattacatgctgcggtttttggtttgggggattacggacttcggtccagtaccttctagcattaaaaaaaaaagaaaaaaaaaatgttcattatttcaaaacaaaaaattaatctagtttattttttttattgacatcaaaatttgactacagttagttgttataaattaaacattattatatatgattgtaacataaatctacttgttacgcgtaaaattaaaacgctggttttctttgttgctcatttattgaatcctaccaaacatatagcaatctaaattaatgtgacataactgtctgttatatactgccaaatcatgtaatcattttgtaaagaaaattatataaaccatatacatattacttgatagttaatgaacgtataaagtaggatttcataatgcaacgtctaatagctagaacataagtgattcaaaataagttttctcaagtttggcgcatgtagttgagtttcatggagatgtatgtactttaaatttttaaattttggcagataacatcattcaagtgcggtggatttgcaatgggaatctcaacaaaccataccacgttcgatggacttagtttcaaaacattcctcgaaaacttagcttctctacttcacgagaagcccttatcaacacctccatgcaacgaccgtactcttctcaaagctcgtgatccaccaagtgttgcattcccacaccacgagcttgtcaagttccaagactgtgagacaacaacagtcttcgaagctacttcagagcacttagacttcaagatcttcaagctatcctctgaacaaatcaagaagctcaaggagagagcctcagagactagtaacggtaatgttcgcgtgacgggtttcaacgttgtaaccgctttggtctggaggtgcaaggcactctctgtagcagcagaggaaggagaagaaaccaatcttgaaagagaatcaacgattctttatgctgtggacattagagggaggctgaatcctgagcttccaccgtcttacactggaaacgcggttttaacggcatacgcaaaggagaaatgcaaggcattgcttgaagagccgtttgggaggattgtagaaatggtaggagaagggtcaaagaggataacggatgagtatgcgcggtctgctatagattggggagagttatacaaagggtttccccatggggaagttttggtttcttcttggtggaaactcggattcgcagaggttgagtatccttggggaaagcctaagtatagctgtcccgttgtctatcatcgaaaagacattgttttgctgtttccggacatcgatggagatagtaaaggtgtttatgtcttggctgctttgccttctaaggagatgtccaagtttcagcactggtttgaagacactctgtgctgatttcgtgatggcttcactttgcattgctattgctttattttacttctttgacgattataaacacattatggtattttatatttgtatacggttgaaaagtgaacgttataaaacatctattttctgctactttctctaagtataaacaagcacaaaagatttaaaggtgatttgatatggaagtacgtaaaggaaatttatagagacttttgagtactgaataaaaacatttcttcttaaccatttatcattccctcacctaaaacgcttttaccgatcttatataaacatcatacatttgtatccacaagaaaccgaaaaaaggatgtaaccaaaaaaaaaagatggaaattatgagtcttaattaaactcgcgcgttttccaatctctctgcctctatggactccaaattttgttaaagataataagtagcaatatatattaagagaaatgttatttgtttggagatcttaacatgtaatctagcttattagtaaataatctcattctcattaatttggtaaaagttacaattgggggtttatatacaattgaccaggcctaaaccagagcctcttaaccagctaaaccaacctatacagactccagttaaaactatacaaaaccagaatatttacaatgaactctatatacataatatagctttgtagacagattgatttcgaagtcgtgagaaaacttgcgaagaagaaaagatggaggaggctgagaccgcgaggaagaagaagtgaaaacgatttaaacggtgtcgtattataaaataagggtttatgattactcccaagttttaaagcctttttaacagaacaaaacatctcgctatttcatgttgcttcttaatacttaaaccattttatcatttccctcatctcaaacatttttaccgatattgagcattatacatatccacaagaagcaaacaaaaaggatttagccaagttgagggatggatgtaaccaaaaaaataaagatggaaactgtgagtagacttaagcattttcgttttccaatctctctgctgcgtcttcaactgcaggttgtggttttgtggatggaggtaaacaacgttttgagaagaatgtagatatcgttttcggtaatctcttaccgcctttatctggtgacggtgataatccaagctttgtcaatacttctttctttacctgctcgttagaacaaaggatcgcgggaatggtgataagcaactatgtctcaaggcaaaaaactcaaaatagaagatcgaagtattaactaacctgccaacgactatcctcgaaatctgatatttcacgcactttttgtctaagcttggtctttggaacatcagggaacttctgctgtaatgtttcaactaccctattgataccttgagagcatgattgaatagttgatacctggacgccaaattcttgttagggctaagtagcaatacataaacaatgttatttgtttggagagatccacttacaactgtaagcaaatctgagtctggtatgatttttgcttttgaattagatggaggagtgctctggctacaagaaaacttgctggcttcttgatcttcatcttgaatgtcgttgatcgatatctcaatgagagaagaccaagggaattgtcgcaccatgagagctcgcagacatatttgttctactttttgtgtcccttctagatctttagcagctaagagagagaccttctcatgagttaggttacatatgatcagtggctgcgttttcttcagagcatggtcagttaaattttgcagatgtttttgttgttggagtaatgcgcaaaactctggactttcttgatcttgcttagatgatgtcgtatttgcatcctgttcagacggatcaatgtccattctgtccacttggaccccctgaaacaaacaacacactttgttaagaaactttacattcgttatagcgtagctgcctttagttaactatccccttcacaaaattggcacatgctcaaagaaaatgagtgatcaattataagaatgaatgaggaattcaagttgtaacttgatcaatagtttggatactacaaagaaatgcaaatttgacttcagcagattcctagattgcaacctagatttataagaatctatgacgagttcattaaaaattgcttttgttacctcatcttctgagagatatccatcaggcaccataaagtcatcttcactatcatcttcatcatcagcct

SEQ ID NO: 118 - DNA, 109560 bp, Arabidopsis thaliana
gaattcaagttgtaacttgatcaatagtttggatactacaaagaaatgcaaatttgacttcagcagattcctagattgcaacctagatttataagaatctatgacgagttcattaaaaattgcttttgttacctcatcttctgagagatatccatcaggcaccataaagtcatcttcactatcatcttcatcatcagcctttgaacatccttcttccaaactttcgtcttcatctttctcacaatctgaaaggctttcaccagcttcttcctgtaaagaagtatctttattacccagtgatcttttgtcaagtttaaaaagcatgtactgaattcaataaacctacctcttcccattcttcatcactatcaacttcataatccaattctggatccttttgcagaggacgacgtggctttacaacttgactgcaaatgttaaacaacagatccctcagtaccattgtaagcaaacttagagagtgaacactacttaattgaacagctagatgcatatcagaataacaaatggtattgtcgtatcagaatcacagagaacgttctgtacattacaagttcactacaatgattgttcaatccaaattgaaatgcattggacgataataaccacagatccaacatagacgatggttagttaattaaggaatcagaacagggtaaagtagcgtaaaagtatgtttacttcataggtcatttatcatctgctttattaaacaccatgaaaaaagtagtcacataggcagcatcggaaaactttatgacttatgcagtgaaaattgaaaaatgtttcgcaacaaagctaatatcaaaaaacagtaccaaacaaacccaggggaaagcttgcagttagtcaaggctttttggctaactaataatctatattatataagcttactgctgaaatgaaaattttcaaaataattactaacctttggctgggccagataccataaaagcctggtctgcagcttttatcaaattgtaacaactgcttgaccctcctggacttcttacgattagatgaggaaggcttacactgcctaccatcaaagttattctcttcacatccatccccttgcttctccatgttaggttcaccgtcagatgttactccactatttgtagatagttttagttttggaaacagttcactcttaggctgcctacgcatcccccaatgttttttcgaactcgagagcaaatgacccaactgacgccaggaagcaaagtgttccctacaaagaaatacaactcagatcacaatacccaaagtgacacctcacagaatcaatcaacaaggagaaccaatgtcatacctgcgaatatcatcaactgtagcttcacaagttgttgaaaaggcgttgtcaattgcctgaacaacttttccaatttcattctcatgttttgtacatgacagctcctgagcagttacttcactggaaggaagtttgggttgggtcaatgaactatctttgctctttttaagaaaccgttccatgattgaagcttgtttctgtacttgaagttgcttctttagctcggcttgttccttctctctacgcttctgctccttctccgactcatcttgctgtttctttatccgttttcttgactctgtctcttctttttctttattattttcatcaacaattgctttctgcagtagcttctgctctttttcctgtcacagtgaacaaatgctcagtcagaagtcagactttgaaatcaaacaacacatcctagatgactaaaagagaataaacagcgccagaaaagacttctagaagacaatgaagaaaaagatcagcttacttgttgcaatttttctttcaatacttgacgttccattctcttcttctccttctcagcttcacatctatttttctccaattgtttaagaagcagcttctcttctctctttgagtctttctcagcccttaacgatcaaacacaataactgagtaagaatgaaaaacaagagataaaatgtaaaccaagtactaacagaagatacttacatttctgagctgttcttctgcatcatgttatccatgaatgatcgaatatccacctcactcagtattttaccaagcttctcagcagctttactcaaatcagatctccacaacttttcagtttcttctctttgtaatgcagctaacattgctgaaacacaacatagggcataaacactcacatcttataaacaaacaatcaatacgaatcaccactaaaaacaacatttaccagaaactgctgtaatcctttcatgaatcttctttcgacaagtccggcgaagttttaacactccacgaacggaactcggcatgattttcagatctctcgtctacaacatcaaataaacattacatctcaaacattaaatgacatcaccaaagagtataaaccacaccaaacttaccattagattcaaagatcaaaacttgtaagattagcaaactaagattacctcccagcaccaaagacaagattcagaatcatcctccaaaacatcagcatctacgttaagcacaccgtaactaactctctgaccaacagaaacaacagcactcttcacagctaccatagtaacactttcagtcttctccttcaatttcaagtaaatctcatctacaagcttcgacaacggcaaactcatttcctccattaacaaagccaccatcgaattcaatgaggaacattcactaaatccagaaaacagatctgttctcttactcttatccataacttctctgaaataatcaaaaagccctttcatctctagattcaacgacgagatctgagattctttctcctcagatgttagattctcaatcgccgtgggttctctcttccgcttattcagcttctttggctctatcatcgtcttccgattctcattttcattcaccgtcgaaacttcgtccatcgcaaaaaaaaaaactagaaaaattcgggaatctataaacccaggaaaattgaaacaagatctagaatctaagaaatcgattgcgagaaacacgagctgagtggagatttgttgttcctttcgtgattttgattttggattttttttttctcagagttcttaggtttttggagaagaagaagaagaagggagtgggaagatggataggtttgaaaaaaaaaaaggataaaaaaataaaattggggattcactaaaaagaagggtcgttgattttcccgccaaggttttgacgggtggatttgcctccaaatgacaaaaatgcaattttactgtttggcgccactcaagttttggagaagatgaaggcctatgtgggcctgcttttgtttcttttaagcccaatatagtgggggaaacaattgggatgacatataaatagagactagaatttactaattttaaatactcatgcggatgcggttatataaatagagactagaaattactcattttaattttaattttaagcctaatacggtcatggtgagcaagagctccgaatgaaaccgaataatactttggatacgatttatgaacgaggtaagaaagtgaaaggaaatgaagatttgtagcaagaaaagggagggagagaagatggtgaggtttttgttcactgagcatatgttgttgactgaccatatgagggaatcaattgatgatgaatgatgtggtagtagtgcgtgttaatttgtcgttagaaaaatgtttgaattataattcttcgctttaattttcttctaaaagatactaacagtcatactaattaagaatgagtaattggttggacaattcaataagcaaacaaagtgagttattaaatggctagtgtttttatttgcggcattgtactaaacgaaataacaaaacaaaatagagagatgattttctgtaattgtaaaaataggagaaaccaatgaactgacgttttattcagtgttcacttttcagtaataggaatcagataaagaatatttcttttattttcaaaattttttaaaaatatcccaaaaagggtgataagatttggtggccattaaaaatgctacttttatgtgtgagctttttgtattcattcccacgaggctaccctcacggctcaagcatctctcgtcatgcttctgacgttcttcatctccctttggatatgccatttgcatgatatgatacattatacattgatagcttcatactaaataatgcgttttaaaggcttaataacaaattagtataatgtaaaatgctatttgaatttattctgtatataatgtttttgaaaaacttaggaaatagtgatgcattgcaacaaattatactagaaaatatcatgcttataccatttatggtgacggcataaaaaacttgtgcagttggaaccttaaaaacgatatttacgtaaattatgacactaaatggtgcgtttaaacgattaaacgtttatatttattgcaatacatcactatattgcaacaaattatctaaaatatccaacctatgctattattcataatggcggcataaaacttgtgcaattagacccttttaaatattctaagtaattacgtcaaaaaaaaaaaaattacactagatatttgttttcattgaaaaagatcacaaactcaacgtcaacacaggatggtctaaattaatcaacgtggagatgaaagttaagagctattttaaaggcacaaatttttatgttaaagacttttgttcctaacattcatttccacttccaatataagataattctaacattaaaaacttatggtgaaaaaatattttttaaaaattttatctgatttggggttcaaaaatattataaataaaaattccataatttctaacgaacatttgctgaacaaaaatctattacttattgaaccaaaaaaaaaatatgctatttttctcattgaaaatctcattgtttttaacctctcttcgaattacattcgtatgaatcacaaaagtttatatttaggagcagtcaataatttatttattccatttatattatcatcgttaaataaaatgttgacaaccaacaacaaattcaatcggaatcagttcgactgaaattatgtttaatttcttaaagatcaaaagtccaaagaagagatgatgaattgaagtttatcaagaataatgagatctttcttgttgttaaagataatgagatctttcacattattgagagagtatgaagatagatacgttgatgatagtgaagtgagacatcttggccaacattagaagaagattccataaaggattggatgagtgcaaagtatcgagacgtctctacttggttgcgtttcttctatttttatattcgattgttttacactacttcctatttttatattcgtttttacatacttcctatttccaaacgttttttaaaatttatttattaatttctcctccacatgattttccttttggtcttattcttatttctttcgctccatgtcaagaaaatatgaactaaataacccaaagactatcattttatttgtaacaataataagtggaaacatcgtaaactgacggtttcgttaatgtttttgagcttttataaaaataacattaattttgtatttattaaataaatataattatatatctttccgatgacatggtaaattgcatgatattatattatttatttaaatttatatatacgaaaaacgtaactttcttacggttttctcagggcaattttttccctagttttttaaaatataatgttattttaaagtaatccttttagaacaaggatgctcaatttttgactagatccacgtaggaagtagagaagaaaagaaaaatttgaggcccaagttcaggaactgttgatattttttagccaccaacttcacaagagatataaacacacacacacatgggaacaagacgactgaacaaataagaattcttttaagaaatagagtacgacaaaaacgtgagacgcaaaaaaaaaaaaaaaaaacttgtaatattctatgatttctcatgaaccgaatttattcagttgctatgatgattttgagggtcacttttaatagaaaggattgtgggggttcactatcttttaggttcttctacattttagtgttcgtaacaagcacttatgtgtgttaagtcttataaagttagttagataattgtaagttgttagcttcacataattaattttatcgatgttactaataccccacattttttgcgaatctaagttgcagaaaataattgacgtagtttacacatttaacttcataagtaaataaaatatgatggagagatgaaatttaattcaaatttgtagcacaagatcttttggagaactcacaacaagtttagatttagttttaggcaacgagatttggggttaaggtataggggttaagcatattaatttatttggagttttaactcaaaatcaaatagtaaagaatggattgaccataattaagtatttttccatctatctatatggggctccacatgccttaagagatcgtggttttttagattttttttttaaaactcatcataatgtacttctaaatctcgacaaaatgaaatcaagcttttgttggacattcagttccggacaatcggactgcattcaaataacttgttttcggacttggatatgatgttaagtatcatatattcatatgcgtccaactaaatatcaattgacaaaaattggattgacacatatctcttatatactagtgtttctttttaaaactttcaatgtgggatcttattaaaagaaatcctcttctcaaaactttataaactttcattagactaattataagctaaactatctaaaatctcttacatattatttgagaagtcgcaattttttttgtcatctcactttattgagtaaagaataatatcaaacataaaacaagttaatctaagacttgcagataataaaccaacatgggaagataattgaaggattatcttctagcttagagaacatgtgtcgcaattaatttgatgacaaagggcactcatgaggatatgatttagaaatgtcatcgaatactgacgatcgattttttcgagtccgatgaattacaattcacagaggtaaagaaatctgcttttgaatcaccgattcttctaacttctattcagatgataggttaaatgaagaagaagaaaaaaagagaagaaaatctatcaagatcccttatgctagcccaaaatcacatcaagtttttcacataatgagatttagcaaaaacttgtaaacgtaggtttgccggatctcttgttcctcatccacttgccaatcttcgtaatccaaaaggtaaatatctatgtttaattatcttctagattttaaggcacaacggattgatcgttctatattgtatgcacgattgaagaagttgtttaagaagcacaaacatttgactatcggctttaacacctttttgtcacttggagataagatatttcttcatggtgacgcagaagcctctactagctccaccgcaaaagactattgaaatttcttatcatggtcattacaccaatgatactatcaaaatctctaaactaatctctatgttcagtttttgatggtttattatcaagtatgtgtctttgtaattatcttctcttctaagattgaatcatcacaatgtttttgaattatttgattttcattgaatatttcaaccaaccaaaatgttttcgttctagaaataaagtcctaaagtgacgtacattcgttttctaatgaaaatgctatttcataagttattcctttcattttttttgggtcgtcaaaacataagttaatattctttttttatttgactaaaactacttttccaaaattttcaccggggaaaccttctcaaagctttatgagcttaaacatatgcaaagtgtctcattaacttaaataaatatagagtacaattaatttgttcacaacgtttttaataggaaacttagaatatgttctgtgatgcactatatgttgcttcgtaaggaaattgcatgcgaaaatctagtggaagaaatttagttaaacggcaaaaatcttcaattaatcgtttcctttatctacattaccaaaaggttgcgaacattatgcgacatatggtggttagaacttaatacactaatgtttttcaaagatgctatttgtggagttgataaagacaaaacatatttgaagaaaataattttaaacatgtagtgtttaggaacatcacggcttcatagatatagagtcaacttaatatgttacaatgatattgaaatatgttctctaaactctaaaaggttctacctgattttcttaaacaatgcatcttcgaaagataaagaaaatatatttttctattttctctttacatgtcaatgcttactatatcatcttacgatatactataaacgttttattcataagtaaaagacaagtggcagatacgttaaattttataatagaaataaattagttaaatcttaaaaagttgctgaaaatagaaagcaaactacttatcttaaagcaaacgtaagtctctttaagaagaaatacaaaatgaatatatatcggattaaatcaaaaaacaaaaagatacacttttgtttttctgaacaaatgaaaaatgatatacacaagtggcggacaatccatctatctcattttagcgaacaattaatcttgtctgcgactgcgacctatttttttctacatcacatcttttgtttcgtatgaacactaacatgattgaatgacaaaatttactaacaattcttatagtactgagctctcctgtccaatatttaaaaatgcatacatttttttgtgtgtaactaaaattagtagaaaataaatgctagtcgttaaaaagtgcatatagcagatttcgagttttttttaattgcgatttcgattatcaatggtcgatcgtagacgtcttttttagtaaacaaatctgaaatttctatgaaggttaccaaatattttggatttcaacctaagatgaagttaacctatggacgtgtagaacagtggctgaagtctgaaatgataagataaagttcaatatgaatacattactgagatgttacaaaaaactacatcactgaataattcctttattttccagtttggacagtagaacctatcgctaattatttaattaccaattaaaagaaaaagaaagaataattcctacagttgttaggctatggttataagtttcatctttgaacttaagaaatgctctaattagtggtaatggtagttacatctatatatgttgatgcaatgtcaaaaagaaaatctctcaaattagcaaatccatacctatttatagacgcataagtatatataccaattatcctggtcgtgcaaatggatggttagtatttttacaaccaaactaatgtctaattttaaaaagtaatcattattttgctttagatttttaatagttaatattatatgtatagatagattaccgtatgatataattgtttcaagacactagatactatctcaattataaaactcacttttccataatatggccgcttgtttataaaaaaagaagagaaataaaacaattgatttggtttatattatttaattgcagatatcttgtacttaattcattttgagataattttgcgtatttgagttcggacattggtaggtatggacgatgaaaataactgccttcattctacatgtttgagatttgtttgtcgaccatataacacaagcggctagaaaaataggtgactattctcaaatgtcctggttctatctaacctgaaggatcccttgttctacctggtataactacaagaaaaggctgttttataaaatatatcatttcttctatgatttctatctcaactttttttttagtttttttcttttagaacgttttcgctttcgaattttttaagaattttttttttctttatatctctaaataatagttttaaaaacataacaagtgatactgtaatttttttttctctataaacttggcggtaccctacttttttcttatttttattaataatcttactttgttatgataaattatgttaatatatggcaaaactaaatatatatgaaactactgattactcattatcataattaatatctttgtataaaagtaaataatatttagtcgagagaggtatcttgttaaaggaaataaatcaaaaattagtggctaccaagtgggagatataatttggaatatttccagtgtattagtgtggtgggtttggaataccacaaacagaaataaaaagaaagaaaaatatgaaataagacgacaatgtgtgatgtacgtagaatcagttttagattctagtacatcaatagacaagaaaaagattgtggttatgatttcaccgacccgagttaatgcaaatccgaaacagtataaatatgtgtagagggttcatgcctatgatacaaattaaagaagcagaaacaaaaacaagtaaaacagaaacaatcaacacagagaaaccacctgtttgttcaagatcaaagatgtctataaatataagagaccctcttatagtaagcagagttgttggagacgttcttgatccgtttaatagatcaatcactctaaaggttacttatggccaaagagaggtgactaatggcttggatctaaggccttctcaggttcaaaacaagccaagagttgagattggtggagaagacctcaggaacttctatactttggttctttcacttgaactcccttttgtctcttttcttctttagtttcttcagtgcttcttacaccttcttttttaaaatagaaattattttccttttttggggtatactgaaaatatttcttgggcatgcagagaccttggttaaaaatgccccacgctttccttttctctgtttttttatgatttatttggttttactttatgatacccaaatcaaaaactaatttatatttcatttcttttttcatgaagatggacccataaaatatttcttcctatcctaaattaaatagagataaatttatgatctatcccaaattttttccaccaacttcttgcataagtgattattatttaggataagaatcttgggatttttctttgttcctcctacctaataatttaatttgcatttgtttttttttgtttttttttaagtataattttttactatactttgaaaatggcatttttgaaatatcctttttgctaattaaaatatctgcaaaaagatatagaaaattgatgttcattaaaacaaatatatatattgatgaatctctgttgtggaatatttgaaaactgtttgaataaggatattctgatattcaagccagcctttaagatactctctgctatatatagacatgtagctactaccttttttctattcatagttttcttcttctttcttgtgttatctcattttccaaacttcaaaaaagaaaaagaaaaaaagaccttttgctttcttgatttctttgaaaatgataatcttatcttcttataattcttcgtcttatttgtttaatgaaggttatggtggatccagatgttccaagtcctagcaaccctcacctccgagaatatctccattggtttgtgcactaactcaactctttaattaattcacttttaagttatagcatagctcaaacatgttgctcgaattatatatatagacactcaactacacatgtaaaactggacatgtattttggatactttgaaattgagtagatcacttataacttaagactcaaacattttacatttaatagaaggagacatataaaatcaacttcgagagtgcgatgcatcaatttgtctcccaaaaaagcccacacccaagctaaattgacatattttgttcaaaaactttactatgtgtaatgtaaatatgtattatgtatgtctgtgtattttactgatcgcacatagattctatagaatgtataggacgtgacttgaactaagatttgtttttttcactttaaagtggtctttgtacgggaatatcattgagcttaaaatagcctgatgacatcatcattgttccttgaagtgagcaggactaggtttcctgttatatcactttttatttttatttatatattcatgcacttgaatgttattgcatgttttgctagtcacttgcactagtaatctaggaattagttacgttgctattatttttttgtaagaaaataaagtttaagtagcatttcaattctgtcaaaaaaagaagtagcatttcaattatgttgtggtgccatagcttaaacatgtgtatggctatctctcattacaggttggtgactgatatccctgctacaactggaacaacctttggtgagttttattctatatattagatcgctaggtgttagaaatatagaaaggtatatgaaatagcctaattaattagttactagctagaaaattcacatgttttgatgaactttttatttttcaggcaatgagattgtgtgttacgaaaatccaagtcccactgcaggaattcatcgtgtcgtgtttatattgtttcgacagcttggcaggcaaacagtgtatgcaccagggtggcgccagaacttcaacactcgcgagtttgctgagatctacaatctcggccttcccgtggccgcagttttctacaattgtcagagggagagtggctgcggaggaagaagactttagatggcttcttcctttataaccaattgatattgcatactctgatgagatttatgcatctatagtattttaatttaataaccattttatgatacgagtaacgaacggtgatgatgcctatagtagttcaatatataagtgtgtaataaaaatgagagggggaggaaaatgagagtgttttacttatatagtgtgtgatgcgataattatattaatctacatgaaatgaagtgttatatttatactttacgtgtattcatttcttttcgatgcaaaaatcaggcagtgggaagaatctgctgttttacttttgggttccataatacacttttttgtgttgctactaaagtactgataatatccaagtcgatcattatatatcaaactaaagagtttgcattcaatacataagctagaaaagtagagcaatattttggttttaagtttatgggctcacgtatgaagaaacacatgtgtaagatcgaatcctaggatcaaaccttaattattaaatccttgaaaggtaaacatatgaagtatttatacattctgaagattaattactaatggacttcgacgttagatcttgttcccatgatagaaaaacgttttttttttaatttgggataaatacgaggaacaacttaagcatttatgttttatttaaaagcggtttaggcggttgtattggctccgtctagacgttatgctgtcaagttatggttagatcactgattcaacgcctaaaatagtataagtttcgatttaatgtattttctattttaaaattaaatttgagtttaaaactaaaaataaaacactttagacatccaaaaaaaggaagtgtctttctgtagttaaactttaaatatccataaactctttatgaacgtagatggtcttactgtctaatgctttcttgaacattgatagccatcgttcgatgaaaacgctctcctccaagctgatcaacgatgacatttaaacgatctcgaacccctttgattttcttttattaacattttttattgattagtaaattgtgacataattatatatgatacaagaaattattgatacacgtgaaaatttattaacagttggaagataactctgactatgaaccatttcattttaaggttctgtgcattcaaccgatatattttttgcgtacttccacatatccactcagaggaaggtctatatttgatatagaatgaaagagtaacacgtaaaaggctaaaagtcaaatgatatagttatataaaaaaaaataaaaaaaaattaaacatcagccatacaagaaggttacaagaatcttatgctcgtaaacgacatccatgattatctaaaacaaaaatagcatgagatgaatactttgcgtcccaaaaactgaaagtgtctagtttttataaagcaaagttatttagagataaaaagcaatagaagttttttcaacaaatcaaaaagcaaaaaggagaggtagcatgatatttaggaaaagatagataagagaatattgtcataaagaagaatttattgttgttcattggtgcacgtgtacatacacctcttgggacttgatcattcgcatgtgacagtactatgaatataacatgtcagtaaccaaaaaaaacaattggtccattattttcaggttttactccatcatacggacagtcttgtcaaaccaagtgtaatgatgtccacgacgatatttgttattttcagatttgaatagtggagcatgtaacgcctcgactacttttgtagtaggtccatgatatttttctagttgactatttgtctatcgatgattttatgtttgactgctagtttaatatgctcgaaaattcgttagatattttctctgaccaaaaacatcatcacaattttttttttgtttattttcttggttgtagttgtaatgtgcacatagttcacttccatgtatttattcgttcaaaacatcttaaagtaaaacagtttagtgtttcacaaaaaaatgtaaaacagtttagtttgactatatttcattcatttaaatatatattttgttcacgttattagatttcccaccggttctggtattttttgtcaatatatgctcacttttttagtgtggaaatagggtaacaactaacaaggaggtgaaagcaaacgagaaactgattacctagttaccttgggagaacatgtggctgtttttcatatatgtggactatacaagaggaataatttgttctaaggactatgttggtattggggaatttgaatagggaacttattttaatgggcgcctcgcaacaatgaaaaaaaattctatctcctcttcatggagagcatatgaaactttgatcctatgatggaggaccggttgatacaataggaagtgtttttttttccagacaaattgttttgagttactgaaagtggtaacaaattctgagtgatctgatttctcaactttattttttgaggtttcaagcctgaaagctcacttctttctaattcttatattttatgtagcatgtagtcctaaatttcgttctttagattaattctatttatataaacttgatatgtctttttgcgtaatatcatattccgatgataattttgtttgttttaccatttttcaagctactttttatatatagatgttgtactttcgtgatatatttagtcaacatattctgataaagtcatataaactactattcgtgcaaaccttttgtgatatatatgttccgagaggatcctctaacgctaaagttagattgatctctcgtaaaaaaaaaaatataggaaacgcattaagtcttttagatatttgagtatatattctctctcgataatcttagtgcaaaaactttaaaaatgagagacatatcctttacaaatggtatttaggatgacatttaaaagattatgttttttttctttctttctaggttcgaatattagatatcatggtgttaagaatgtccacatgttacttttttgcagaagccatgtgtgtcttcggtgtgtcgaaactcacgtatgtcgtatgtagttaggatgatgtagtaataccttatcttcggatcttcggaaagtagtctaacgcctaccatcataggctatcatcttcgcaaggttcagtagttctttccgtgtttggtagtcttctaaatttgtgtgatatatcgattagtctatatggatattataatcagttttattttataaaaaaccttatgataacacattgtttaacaacaaagttaatatcgtatgggcggtggcctcacatatttgatttataattcttcagaaaatttgcaacatttatttattttttgatctaaagaaaatttggaacacttgtcaagtaattatgttgatttccacaaaattatatagagccttatatcttaaaatgacatgcattatttagttatgtgcatcttcgttaaatcacaaattgattcatcattagacagactaattcctattacctaatgcattgaaaatgaaaagtacagcaaaatcgaatgctgaaaaattctcaaaaatgctaaaaattctcaaaaccaaaatagattcacggttgccatttgccaatcctaaatcatgaaatagcaaatgtgaaaatagtaaaataaagaaacatttaatcagaaataaaataaattaaaataaacgatactttaatggcgctaagacgaaaactaaacaagtaaacgattgagacgcttatctgttatctgatcacttgattagaatctgactttttagagctttgaatagaccatgaccattaaccatgactacaacatttgtactaaaaagaattggacaaagcaagcgatcaatcatatttgggtccgacaaatgggagagagagacaatatagatgttttcaggactcatgagaagtgatcaatacattaagacgggacattatattcggaacattcgggaaaagagaagtgttgtagaagttggcctcagaatctgatttgcaagatagatatatatgtcacatctggcgtgaactttttgtttttattaaataaatagagtttattaaacttaaatatatatatattttttggtaacatttttatcatattaactcaaataaacaatagttgaagaatattatttacataaataataatatacagttggatatgaatattttgtgtcaagtaatccgatttaacatttgtacttcgaaaagttacagataaagaaaaataatcaaactcatccttatctttatgaatcgcctctaggtatgtatagaaggttgaccactctgttgggaaaaacactatcttcaccaaaccagagaagtctatatagaatgttacctttcgtttgtcgttgccaatcatacatctcattgttctaacgagtgcttccacttccgtgtgtaaacatgttaatttttttcgtagattatcaataacctgttaggataactgtaaataattatatctctcttattgttcataatgctagttctatgaaagacacaaaagttcttttattactgaactatcttaggtgggcagaaatagctagattcagaccagagttagtctagaaacttttgtgaatacattgaattttatatattgaagtaattatagatgttcagaggttttgaaattcatcttcaaatctatccatacttatttctttttaacaaaaacattgaaataagcaccctttttgtttttttacaattaccaaatatgtttgtagtgatccaatttttaatacaattgaactagctagaaagtctatttccatctaacttgaaatgcatctttggttcttgatagcatacgcaaatatttgacttctattaaaacattcgatacgataaatctccataactaagtcatatcaactgaattgctattccacattagatgaacttctcatccacttctcttgcaagggaccatcaacataaaatgaggtagtaattagtatcaaccaagtagcttatcattgtttactaaattctaacaaagtctactgttatttgaggtaacccattttttatgtgttaatactttattcttttactcaactctccactgatgcaaataaggtttctggcctagatttgacatcaagagagatggaacagaccattattcaactctatgctctgttagtaaataaataaaataattcacaaaatagttgcaaaaatattatgaaaagttttaagactctttaatattactttcttcaaagtaaactccactaactgtgactagctaagggaagttgacctgatatgtttttcagtgttctaataatgattccaagaggcactaaaaacatgtacaacttcttacattgggccttcagaaattacaggtataaatatgaatagtgatgggatgggattaaaacatcctatggtttctgtgaagtcaacttgtcaagcgctataaaataaactactttacaagttgggattgctattgtttggcttgttgttaaaagattctcttccagagaggaaaatgagaatgcgatcaagcacttacatataaactgccaaaggatattaaaggctaaagctaatttgttagaataatatcaaatgaaattagaaggttacaaggaaaatactttccgaactagccattaccactcacaatgtctctgttatagaccttgttagcccaatgcaatttgtcaagtagtgcctctacttggcaagtgtggagacgtggagacatagaataatttaaaaagttttcattttctgtctttttttttcggtcttgctagtcacactacctttattataaatatcattagtttatgtacgtgatgaaggcaatataaaaatggttaaaataacttcacaagttgctctggtactatttttggttcttctttttcttcttctaatcaggggacaaggtgaatcgttccaatccccggttacgtcacgtattggcgcattaccttcaaattcacgtagaggtcaaggtccgtagcaaaatcttctcaataaacgaaggagaagagatgagtagtagcttaaagttgcatcttcaaataatgtctactagttttaaaacaaattatggatggaacagtacgagtttgttcattgttgtagccttcaatgtcaaataccttctaagggttatgtgatcataatatataaagtcttgtatcataatgtcaaatacacaatgtcttgtacatctggtgaataaattctgtatcatccgttctggacttgaataaaatatttcctattgagacaatcatcccaattctcaacaatggtgaatttcaatatctacctacgcgaaagagatgaagttctgattttatactgactgaaactacataacttactacaagaaaaagagtcattactccctaatgcatatggttccttaacaacccatttgcttgtgactcccacgtaggtcactaaactccctttgatcgactttctgaatgctccattatagtgtcattaaagtttagttccattgagtaaagccatgtaccctccaagaagattcgaagtcacacagtcacacatgccttccagatgatccaaccagtatttgttacgtttttcgttggattctcaaaacagtacaagacaacattcaattcccgacgtctataaatgtcgttaatccattgttaaataatttaacaacgaagtaaccacaatcaattaagcatcgttagttgtttaactaaactagtttttcgtacttaagagtcgttcgtagttaaagacgtttaacccgtcgttaaattaatgatgcacgtatataagttttaccaacgtttatgtcaatgttaatttaccacattttggcgtcgcaaaatgacaattaaataaatcattgcaaattcataaagttttgcttaatgatatctactatttagcgacatatatgtttttttatagctaccacttatttttgttttcaaggacaacccctaacaacactctgtatgactgtatgtgattctgtaagatctcatgatctcatatcaaacttttttttttacatgtgatgaattctattattaaaatggaacaattatttacaattggttgggggcaaggagcttttatggccaaataaatgtaatcaccttagagaattagtacaaagaaacttgagtttactaagtgtgggaaaaccattaagagagcagatgtctacaaaccttttcgatatcatctagctagagaggaatgtctctgatgcttatgccaatctgccgaaagaccgctgtagaagttactgagacattgttgtgcaacctaatgtttctttctttccacatcaggaagataaaatttgtaatgactatgttcaatgattacaaaaataagaagagacatatttacatacatgagaaaaagaagattttcctggtttatttttgggatgaaatctcaatgtgtacgaatatttagttgtttgattaaaataaagatttctaattaagagaggaaattaacaataggctaatgatgatgtcttaatcttttttttttttttttttttgatgatgtcttattgttatgctggatgagttgggggactgcaaggtggcttcttataaggttcctttttctggggtcccctttttgacttgcttcgctttactcttgctttcatttggacaacaatttcattgctcctattttcatctccttctctattccctaatttatgttttagatgaatcaaacaaagcaaaaaagaattatgaatctttcatacaaaagaatcttcacataataacatccgaatattgtatgatctaactaaacctaaaattggttaacatacttagtctatgttattggttccggatcaagcaacgtaatgaaaacgaacgtgttaaaatgttttgactcaccgagcttccgatgctttggttgtttggtcgatatagcttttacttctccgaagaagaaagaagacaaaaggagcagagctgcgatgagaatcacgaagaatggtgcctttcctgtcattgtatatcttactgtccaaaaagcctataattttctaacttgttccatctatttatatagttaaaaatatccacctacccaacttgatttcacactaaaatgttgaaagaaattaaatctggcacataattgaaaactgttacttgattacatgtcctgtttgttatttttttttgttgtttcaatattcattttagatcttttcttactctgaacataataaaataaaatagaagatattttcttactgaaatatataattttgagatgcaaggtatactataaatagagaaaaaggtactgaaaatgttaaatttcttgattccgtactttttattttatttgatataaaaagaaagttgactttaatagagaaagatcataggaaattacacgaaggtttggcaaacaagtcatggtagagaaagtcaactagacgaatagttttgattgacaaattaaattaaagcctcactacagctgttgccatttcctcatatattcctagaaaaaatgttcaccttcacatgtgagtgcaccttatttcccggcaaaaagctctactacagtcacaacgacgaattcatttgagctctgatatacaatagccaccttactgcaaaactagacccaataaaccctaaagaacctctctattatttttttcgggcaaaaaccctagatacagcctagataagttcaatagattagatacatatacctagaaaaaaaatatcttataagaagagcgaaatatggaaattaaaggatgcgttaaatggtgttacttgatggaaataacaataattaaaacttgtggcggcacttttttgtaccttaattatatgcatctttaaggccttttgtcagtgattatgcatgtgataacatataggctatagaaggtggtatgctttattttgagatagggttagggttttaagatccctaacttaattatgtattaaaactgctcacacttagtgataaatgtgtcaactttctctcacgtggtggttttttttttttgtgactctgtttagctggtcttggtaatgtcattttatgcgtgtattgcatatttagtttataggtaaaaaattgtttattgcgtttcacatttaatgatgtttagtttcagtttgatttcacatgttgctctttggcttcagatttgtagtttcattttcacttacacttagcttgctttgattcgatttgctatattgttcactcactcttgtttcaaaattgttcatttttagtacatattcgacgaattctccggtgtggtatgagagagtcttagcttgttttgtgtttttttttaattagcacatgtcttctaactcatgttctgtttttaattagcgtcatgatgtcaaaagattcttgcttaaacgtatgtggaccaagtacttggtagagtatgaagctgaatttggagctgctttcgttcatgatgtttttgaagatgctcttcgacaaagggctaaaattgcaccggttaccgtcagaatttgctggactccaagctacgtaactgttgttggacaggtattttgaaacaaaattgaattatttaaattatcggataagagtattaattctaatgttttcacagggaggaatttaccaatccagtgtggatgagattgcagctaatgtttcggccacttcctcttggtgctccgtccggtgacgattgatggtgtcgactgctgggaatgccaagactctttcagatcaagctccaatcatatgacatggttgataattttcctcgtaactgtagcatttacatgctgtcttattctcaattatagatcttgcatgttatcccaatttaaatagtcatattacttggcaatttcggagccaaaaagactttaaaaagtcttcagtttctgtctttctcctctctctacttttaatatatatatcattagctaatctacgtaatgaatgcaatataataatggtttcgatgacatcactcattgctcttcttttattttgtgtttttctctctcttcttctaatcgaggtacaaggtcaaatggtccgtactccggttatgtcgcgaatccatgcaccaccttcagattcacgtagaggccaaggtccgtagcaaagtcccaataaacgaaagggaaaagtggtaacttaaactttatgtccaactagtctcttgtatcttatccttcaaattttattatcaaaaaaaataaaaattatcgtgtacataaattggaaagtatgaatttaatgtgcaagttgttgtcctttgttatagttttcaatagttgcaaggtaaataatttctaaggattatatgatgtatatagtatgtaccattcataaaaaggaaagtacatatgtatgtaatgtgcaatttgtttttataatttgattgagtcatcaaccactgcccagctttgcccgtctatacaaaaatatattaaaaactggtcgttactagaaatgattattatcttggatcttattcgcgatgttcgatttttatgtttatctgagtttattctatatgttggttggatttattcggaatttgaattgatcaggaactagagcaaaattcaacacgacctctatgtcaatatgttttttccgcggaataaagaaggaaaaaaagaagtaatctgaaatttttaaaaatacaatgattttaccaatataactatgttttcttgtgatctacgtctttgaggagacattcccagaatttcatttcttgtgatctacgtctttgaggagacattcccacaatttcaatatctatcaacgcgaatgagattaagtttctttaatattagaagacaaaagtaccataattctaaaacggttcctaagtcctaacaacccgttcggcatatctgcaatctgaagaagaatttgtaaatagcctcaatttttttttctttcttggacaataaataacctcgaaaactttattttgtcatattgaacgtcattatcctccttcatttctgtcgtcagctcattgcttgacgagatgcttcgtcgcttgaaacttttctcgtcaaagttttgaaaacatgaattgtttttaaaaaatctaagaagttactaggttattttataaaatctcccttaaaaattcaactaaaacatttgacctatattgttttctttgaaaactaatttgacctgaaatgacagatacttaagttgattggatacaatactggcatattaaccaaaaatctatagcaaataaattttaaatttacaattcaatctaggataaaattcaatatccttacaagaagaatagacggatagactttcgaaagagattgtgcattctgattctcaatggtatagttttttctgatatatcatttacacttatcctccaaattaggccaacaattaaggaatagttttcttcttttctaatgaatgtggttggaaaaagaaaatctattatgacgtggcggtttagatggaaatagctaagtttattattatatatattagttatttatcactaacgcgtaaaaagtatttacaagcccacggaagcaaaacatttgttttatctttcatgtctcaggagtaaattacgttaattctcagcgttgtattaaacaagatattaactcttgatttgaattagtcgtttcttttgattcatatataataacattgagggaggaaacactcttcgtccataaactatcgatgtcgacatgttccctattatactctatacatatgataatttatacaacgtataccaagaaattgcatccaaagaaagtcataattggattattattgtaaactttgtaagaagtctttcttttgctcaatagcttatatatataaaccggtctagtacaactgctaagaaaacataaatcgcctctatatacatgcaaagttacataacatatacaagaagaatgggtttaaaaatgtcaagcaatacttttctcctatctttgttccttttacttctttgtttcttttcggaaactggagggagagagaccagtcactggagattaggtcagtgcctcttgtatatgttctattctcttgttttatatttcactaaaggctatagctcaagctttactgaattcattttcacatgtaaagaagttgatcccttcaagtcgtacgtggaccctatttttttttttcatgacatttttagtattgttattcaattgaaatttccataactgtttctaaaactttcattgataaaaataacaatatgaattaaatgagcattttaaattgttttaatgtggtaagagcagagaaaactctgtcattatatattgaggattaattttactagaaatgataaataccaagcttttttgccattaacttataatatttatgtttaaatttggatagtgatgacaataacacaaactacaaagcatgctaatgatatatataattgttttttacacaaaaagtaatcattagttaattagatttttctccagagtttctacgttattttggtcactcccatattgtattaaagttgatattattctcatcatttctaacctaaatttccttattgatccttaggagaagtacctattagagagctaactgtaggtccatcttgttcatgcggaggcaaaggacagagtcctcgagaaggcgatccaagtccatgcccacgtccacgtccttgcccttgaaaaagaagtacagaataagaaaaagaaaagatattagaataatttgtgtgtgcatacaataggttgtttgatataaaattaaacagtgtttatcataaaccatggtattctttaatatttattacagaaaagtaataaaactcctcagtccaagcgagaaaaaaaaaagaaaaaaaactcctaaaaatataagggaaattttacaccgtttactattatctatactgaagtatgatatctgtagattttgatcctcatcattttggaaaaatatcaataaattctacatgagcattaccaagcctttattttgatcctcgttctggtatgatcgttggtgctctttgggtcagcttcatggtttacttggtgatcgaggttttattgatcttggtatatcatcttctgtttctgtggcggaagcgctttctggtcataggaggagaagccattgcgctgacatcttaaatgacattaaagaagagttggaaaagcttcggtgtagaggtatttgcataggaaaagataggcctctctgtcgaagtgcgggggcaagtttaagtctaagttattctctttcaaaatttggcatcagataagagaacaaggactggttaagcaatggcacaaggcaatttggttctccggagctacgcctaaattcacgttttatgtcttgggttgctgctcatgacagattaacaaccggagacaaaatggcatcttggaacagaggaatatcctctgtttgtgtcctttgtaacacttcagctgagtcacgagatcatctgttctgcaatttttcttcacataaatttcgtaagaaaaattcctatcgtttttctacaaaaaagtaatttaaaggcttgatggtgatttgtaagaaaaaatttaaattttaaaggtccatatatgatatgtaagaaaaaacaaatattgatggtcaagtggcagtttagatggaaatagcttattaataatttataaagtttacaagctaatcccacgaaagcaaaacttttgctttcattgttttcaaatgtaaattaatgttcattcttagccttgtattaaacaagattctggctcttgatttgaattagtcgttgatggtgggaagtcactcctcgtccataaactatcgatgtcgatatgtcccgtattaattactctatatacaataatttatgcaacgaccaagaaattgaacgcaacaaaagtcataatttgaatattataagaatattaacttcagtagcttctatataaaccggtccagtattattgctaagaaaacaaaaatcggcttatatcactatagaagaataatgggtttgaaaatgtcaagcaatgcacttcttctatctttgtttcttctacttctttgtctcttttctgaaattggagggagtgagacaactcactggaaaataggtcagtgccttcctatatctcacaatagctcaagctatcaatggatttttttctcccctaaaccaaatttagcttatttaagaatatggttgtttttggaaacaaattataatcgtaggattagtaattccgcgttatttttgttgcttttgtattgtataaaatagattttattcatcattttgaacatatactttctatctgataccacattcaatcttcagtagaagaaccagtaagagggcaaattgcaacccctccatctctaacatgcggaggccaaagacttggaggaccacaaccacgtttaagtccatgcccgcgtccacggccaaggccacggccacgtacaggctcttaaagaagatttactaccgacccttgaagaagaaggaaataagaatataaatattctatctttgtgctgtaactttgatttacattttgttagagacagtacaaacaaaagttttaatccaaaaaatagtcttatattatatgtttataacgagacattcccaaccctgcaagcaagaatatcttagtagggactttacaaaatcagcaattcttttaacttggattcgttacgttttttgtcctttttttcttataataaaaaacgtagactgttttctcctccggttaaaaaaagaggaactaattttgtaaatatttccttagacaatatactttctgtaacttctcatgacatattcgtaattttaataataattttttttataaaaggaattaatatttttttgtagcggagttcactagacttttaaatcagattttattagtggtgatatagttgcagtgataacattcgtaaattgtatgtttctgtgaaattgatctctataattttattttgatataactttataacatactgtgtggatttagaaccccgagagttggcccatttttgctttgagtttcattaggttttattacgcccacaactcttttcttctttttgttcgttcaatttcactttgtaatatttgttatgctaacaatcttgttcctgtttgaagttccagaaatttgatattttttcatgtaagcatactactgggagcctaaaattaaacactaatagtggaaatttcattctacaagaaataacaaacattatcacctgcgtagcaagcaaaaagtccgtgctttataaaaggaacaaaaaattagaccaattcaacaatcattgatagtggcatatatttgttcatataaaattcaacgatctcatatatatagtgacactgaagatagggtgaacgagtcgttattatacacataagtcaacggccaatattaattagtcaactcatattgaatattcctctctgctaatattaaatggcaacgaagtcgtctttgattttttttttttccccaaaagaagggacaaaacacttatctattaaattcaaatatttctagccattcgtttatctaatcttataggcttgtagctgatgtagaaaccgcgttcactagtgaaaatttgcaaataaagttaaatagcaaaagcaaacaaatatgacgttacgcttcttttatatatctagcacttgccaattccgatgaccaaaaacatgacgaagaaaaaaatgggtttgatgtcaccaaatatcgctgcatttgtgttaccaatgcttcttgtacttttcactatttcctctcaagttgaagttgtggaatctacaggccgaaaactttgtaagtgtcgttacaacttgcaaacacataagcatatacagtattaaaagtttgcaagtaaaattactaaaaaaatataaatttgaatgcatttctctcttttttttttgaatttaaagtaaaattatattcaacaaaaaaacttttttacaacgtatacatctgtttttgaattacgtttttgaaagaatgttgaagtgagaaacacttgatgactacctcacggaatgaggctgagggtgagctagccatacatcagtctattttagtagtttctgtctcccgtgtcgcacgtatttaactcagtcgatgaattcgtttatcaattgcagcgtgggcgtttaacggagcacctatcgtatttactccaccctcaagttcatgtggaggttctccggcagcagtaatggcttccgagtggatgccacgccgaccatgcagacgtactcgtcctcccggaactaacatccctgtttctcaatctccttaatactcacctgaacttcgagtttgtgtcaggattttcaagttatatccttaataaactggctgtgttgttttcttttagtttcttgtagtaagaaagggataattaaatcagtcgttacaacattatctagtatgtgttgtcatgttttagactttcaaaaacgattagtgacaaattctaattgtcaacagaaggctttcatcgggtggcataaaagaaaatgtgttagaacaaggctgaaggggacttagatttttgggctatgatgcgtttaataaagctttactagcaagaacaaacaaacaatattaactactaataaaaactggatttgaagctaacggaaatcctataatttcactttttattccaaagtttgtttacataaataagttggagttttaaactgaaaaaaaaactaaaagttagaggtttaaattagaaaatgtgaaaaatttgaagttcttagtggtctattcctatctatatatagatagatgcaacgttatgtggtaagccttatacataaataaagaaaagaaaagaaaaaaacgttacctgatagaagaaaaatgaatttgaagaagtcaactggtgctcttcgtctattgtttttttgggtaaactgcgcagtagccgttgacccacttttaattttagattttgacactgtgggctggcctttcatttcttagccattcagccaataattgaccaaaatgctcttgacgaaactgaacccggtttgtacgtacggaccgcgtccttggaatccaagagaaccgggtttgtacgtacactgttcatcgacgagaaatgcattaaatgttttctgggtttcggcgaatttgacacttgaaattggaattaaaaatttttaaaattggttgggctcagaagtttttaatgctaaaaagttttgacaagactaaaactcatgattacctattataatagaaattatattgtaagatatttacataattgagattagaattctagggaaaaaacgaaaatcaaaaatgtgttacggtgaagaatctgaagttttcagttgatgtttttcaaagtttaaaggattgaaggggagacaatatgtgttctgggtaagaaattcgtgttaatcctattaattacacttgagaacgtgatatgaaagtaatgatatgtttttaaaaatttctggattcataaattgttttgttggatattctttttgtatttgtaaacccaaaattatccaaagcaaattgagaaccgaatggatattcaaaatatagttatatacttaacataaattatatttagacttttatattccaattacccaaattacaattataaaatcgaagttaacgtacactcgtacatttatcaaagaatatgtacgtacactactaattatgtatctggtgaattatgtaaagatgaatgttttacgtacatgaatacatataggcatggtagatgtgaaatgaattgtaatggtgtgcaatttagtattggaagatcggttttacatgaatgagaatacgattcgttgaaatattatatatgcataatctatattaaaatatacaacatacatataacttacataataacttaatctggatgtcaaaaaaataaaattaaaattttttcgtagacaatggttagaaaatttttaaactcattttaatgttgtaccatgtacgttccaataaatatttttgtgtatgtacatagtattatatttatgtgatttagacatttttatgatgtaacttattagagcggtcgtatacgtgtacgtatatctcaatattatcgtgtatgtttaagggtttagtttaaaatcttgtttattctcaacaattttaactcaccaacaaagatgtacgtacattattatacatgagaacataacatttttcaaaagtatgaggaacaactatactttgaccatatatttttatttaattattatctatgaatagatttatgatgaaaaccccaaaagatattttatctaatcaaaataaccaaaggtttctaatgtacaaactcaataaatattttgtatgccgcctttacaataaaacaaaatctaacatgttgatttctattttaaataatattttatttattatcatttgaagacaattcacgattagcaatatcatataaacatatgtgcgtaacggtaataatatatacgtacacggtagtaatatgtacgtacacggtagtaatgtgtacatacacggtagtaatgtgtacgtacacggtagtaatgtgtacgtacgtataccgtaaattacatatacgtacaatttttttttaatgaagggtataattgtaattttgcactcgtcttcaacctctgcaaccctaattttgcagccgcttgttaactcattaacatccgaaactcctcgtcgccgactactcttcttcatctccgccatttgactatgaacaataattcaagaaaccagaaaatcctctttttgttatcctttatcacgagctcgatcgaaatttcctcaacttaagcaacgactagaactcgcacagagcctcaattgaaatttcactttcgatcagagtttgtgtttgtcggaattgttctttgtcttcgacaaacagttcttgatttcctttggttgtcagaaagttaataacgtgtttttgatttaattttaaatttaaattttggtaacaagaaaaataaagaaacgaaactgaaccgcctcctttcatttctcgttccagggcaaatttatccatttttggctgaatggctaaaatctggttgggccagcccactttgtctttttgtgaaagaaaaagtcagaaaggtgtccatggtgaaaatttcttttgtttcttctacttctttggctcttcatactctatatctgtttttattctcttgtttctatgttccgctatagctcaagcatgttgagtagcttgaagaaatcttcaagtcctgatatctttaaactaggaaaggattatttattttagatatttgataatagagtttagtaaaaaatgatatagttaaaaaaataaaaaaaataaaaaaataaaatgatatagttaattttgtttgttaacaaacatgcaacatgctgatttaaatctggataataagttaataacacattgataccacagttaccgcttaatatcgtatgattagtattaaaaatcttctccagaatttcaacgttgtttttgctactcacgcattgtaccttaaatgatcttattcatcatttctaacaaaacaatttatgcattcttcgccagtagaagaacctagtagagtgctatcggcaacaactccgtcttgttcatgcggatgcaaaagaagacgtccatgcccacgtccacgtccatgtccacctccacgtccacactattcaagaaattatacagacccttgaaaaagaagaatgaagaagagaaaacaaggatcaattatgggattggtacaatatagttgagggtattgtctaatgtagtacttttgaatatgcttatagatttagacatattaaagactattttctccttttaaatcaatgaagaaaatacttgagttcaatccttcttttgcctttgcataaccgtctctcatccacaccaacaaaacaaatcccagaaccttcttttgcagaattttaaagacacacaaagcaatgaataagaacacttggtttacaataacgatcgaaactggtttacaataatgaccgaatatggtttgcaaatatagatgaattggaatttaattgattcgatctatatctaaaattaaatttcttgggttccctaaatactatcctcttagggtttagatttctattatcaaaactctcgtttaatttgagcaaattggttaatcggagaggttagggaaaacaacgttttctggtataaagagacgagagaaacggtattgatggagttaaaagtgatgatgttgatgaaatactgagtcaacgttaataaggcaagagccgactgtgagaagcaaggtttcatggttgggaattttgttgcgcaacggagaagatgaagtgaattttgttgcgcaacggatttccgcaagcttttcccgagaaaacaaagatatcatctacattctatttttgtgctgtaacttttctgaattttttgtaaacaattttttgtgatatatatatatatataaacaattttatatcattaagtatggtactctttaatgtttttaacggaacatgaccaaaactgctagtgaaagcattttgtcttaactttacaaaagaagttatcttttttttaacacaaactggttttcttcggtaaataaaaagactaagtttgtaaatttattcttagacaattatttactattattgccgactaatatgaaaatgcaaagaagtcgtatttggcattatccaaaagaagggacaaaacacttatctcttaaaacttaaattttaagccattcgtttaccaacaatgaatcttgtggctgatgtagaaaccgcgttcacttgtcaacatttagaaataatgttggctttcaaagaattaaatagaaacaaccaaaatgtatgaggttgagcgtcttctatatatttattacaagacttgcgatgaccaaaaacgcaacgaagaacgaaatgggttcaaagtcaccaaatattgtcgcacttgtgttaccactacttcttatactttacactctttcctctcaagttgaagtcgtggaatctacagggcgcaaacttggtaagtgtctttataacaaattcccaaatttatacatttagtactataaagttttgaaaagactaacgaacttgaaatcaaacatctcattaaattagtttaacgttaatactgcagcgttttggggaaatcctatcgtgtggactccacactcaaattcatgtggaggttctccagcatcagtatttgcttcttccaagtggacgacaggccgaccatgcagacgtagtcgtcctccaggaactaatattcctgtttctgatcaatctccatagtactttgagtttgagttactctgtgttcgaattttaaagtatatgtggttttctgttttagtttcgtgtctcaactctcaagtgtagaggaatgttataaactactatgcaatgaaggaactaatacttatgatggtattttactaattatgttattattcataattccatgcattagagccaattgtcgcattttttttctttcagaattcttcaaacttgtcaaatcgaaatctcttctttagaagcgactagattagtttttttcttcaaaagaaattctctactgaatttataatttaaagagttcacgagctgcctactaaaatatgaaaaatatttatgaatccagcaatacaaattgtagctttgcaatacaagaaagaacaacttttcatagagatcaaaaacgctagataaaaaaaaaacggggaagactaactagtaagtaccacgagtataacacattttttggatttagtttctatgattgctttcgcaacggacgtctatgagttttgagagctccaagaactgttgtcttctttagcgtttgttttatcccacgttagcataactttcagacttgttaaagtgtgggcttagttctaggttttggatttgtgaacttcaacggatagattggtcttacctttttagcctgttattgttgggttgtaacaagaaaaaaaaaggggataagcaaaagagagcatgacaggcacagtacactaatagtctagtcatcacgtagtaatcaataccaaaatgtcacctagtaagcaaaaactccatgcaatgtctatatcgaagaaaaaaaaaaaaaaaaaaaaaaagcatgatgaatttaacgatcattgatagtaacacagtgctagtctttgttagcatgagtcaaagtcatcagtcggttcatccagaatccaacgatctcataatctactgacccggagaataaggctttcaagtcaacataagtcaaccaacattatattaggcagctcaactttaatatcattcttgactaatatgaattcgtatttgccttttaccaaaagaaaggatagaacatgtatatctcttaaaattcagattttgtggtcattcgtttattcaccaatgaatcttgcagcaaatgttgaaaccacgtcaacttacggaaatttggaaataatgtttcatttaaaagaaaagaaactagtaaaagcaaaaaaaaagaaatacgtgaaatctagaggtcattgattcgattggtacttgatagaaaaccatatcaaatacttcagtctccgatttaagagaatgtacgggtttaagaacaaaaccttttcatagtttaaaaaaaaaaattaacaaaaaaataaataaaaattcaaatgtcttctatatattcatcacaagacttgagatgaccaaaaacacgacgacaaaaaaagatgacttcgaagtcaccaaatacttgtgttactattgcttcttaattagaacacattcattgatgagagactcttttgagtttcttaaaattacaatatttaatattttaatattaaaaaaaaattaagcagaaaaagatatatcgggccaaagtctctcaaacatgtttttttttaatataatgttaaactttttttttttttaaaataacgtttttacaattagtgcatcttgtgtttgaaaatcgaatctaaaaaaaacagaatatatgaattgaacacacaactctaattattaagaccgactccgaaaccagctttggaagcaagcttcataacgtcgatcgtttcttctctcaaataggttttaaagtctcctaaacaagacacgtctatcattttctctcatgcttttctattattttataaatttttaaccttcagatactctctcacataccacaattgaagatgcccttatacttatcactttttcctctcgacttgggatcgtggaatctgcttgccgctttcattaagtgtagaggagtagaagagattaaaggagagcatagatattgggttttgagctttagagagctctacttttctattttttttgtttgtttgttaggaaatccattgaacaccatcaaggattagaagagatttttttttagtataattctactaatacaaaattaagcactaaagtctaaaccgcactcgcaatattttatattcacagtaactataagaagcgaagctaaaaagaaaaacagaaaaaagcttgatgaccaattcaacgatcattgatagtggcaaagtgcgagctgagtctttgttatttgctttcaacataagtcaaagtcatctgcggttcatctaaaatcaaacgatatcaagtgacactgaaaataaagtgtcaagtcgttgttactttcttctttctaagtcaacctacactaatagtcaactccacttaatatattcttcttcgactaatatgaaatggcaaagaagtcgtatttgaatttttccaaaaaaccaacggacaatgcacttatctcttaaaattcaaatttgtaaatcaataaaaaggaatcttgtaggcttgtaggtaatttagaaaccgcattcacacgtgaaactttgaaataaaactaaaagctggtttacaagaaaactaatagggaaaccaaaaatatgaggttaggcgtcttctatatatatatcacaaacttgcaatgaaaaaaaaacgcaactaaggagaaaatgggtatgaagtctccaaatattgctgcatttatgttaccactgcttcttatacttttcacgctttcctctcagcttaaagtcgtggaatctacaggccgcaaacttggtaagtttctttacaacaaatacactatgtcttgccctatctctttctgttttcttgtgtatatcatttttaattagaaaatagaaagagtgtaggaaagatatatattcatccttgcatcaacaatttctaaaataaagttgtgaaaagaacgagctggaaatctatttttccaccaaagtaaattaaaaatctcccttattttagttttgaactttaatatggcagcgtgggggttttcgggaacacctatcgtgtacacaccaccttcaaggtcatgtggaacttctccagcagtattcacttcgaagtggaggagaccccgaccatgcaggcttcctccaggcagttatattcctgcttctgaccaatctccttaactacgtacttctgtgtctttgtgtcagagttttgaagttctatgcaataataaagtgtatgtggttttaagatttggtttacacatctaaaaacatgtgctcctttcaaatgatgtaaacaaaaagtattgtgtttaattaaaactaaaaataatattgttgatcataaatcataatatcgaaatagttgttgaatccttttgatgatcagtggttgaataatctctagcgtttttacctcagattttggatttgacttttatggaatgtattagttttaagtatctgggtgcaatcttatcgcatattccgacgttctgtaaccattttgtgtgctacgtttaaatgtcaaagaacaaaacaaaaaacaaaatgtctttcgtgacggtaatattaatagaaccaccaatcgtgaacgtatgtgtttcagaagaagtagtgtatcgtggaatcatatgtggaacacataaatcatacttgatatgtgttggatgtggtaatttatcgatatatttatttgttcgaaaacttgttgagaccgaataaattaattaatttatcaagtattaaaaagttcgtttgaggaaaactattatttgcaataggaaaagctcaaaagtatttattgtgaaggtaagaattacaaaacgaattgagatagtgaaagtaaaaagaaaaaaaaaaaaatagttatgctgacatatactatgatcgtggatagtgagactaatataaaggtactaaagtcaggtcaagcatatgaaatattttcacacttcagtcgtttgatcatgatgactgttgttatattagagtaatagataatggcaagaaagtcgtatgtttctaatagattagttaaaaaaaaaaaaaaaaaatcttctggagcaatcaaacgtgtaatcatataattatttaaaagaatcttatagataacgtacgtacgtagaaaccgcgttatgttcttaaaatatggtttttatgtaaatagcataaagaaacaaaattaaaataggccatggtctatatatgttggtcaatagagatcagatcagatcaaaccgtgacgagaaaaaaaaaatgggttcgaagacatcaacaaatatggttgctcttctcttatctcttcttattctgattttcactctttcctctcaagttaaagtcgtcgaggctacaagtcgcaaacttggtaagtacttatccttagacgcttataatttaatcacctcgcaatcatcggatcgcataagctaatatgttaattaaaccaaaaatgattaagaaattcacttgaattttatttgttcacctatgcgatttgtgcacttgatgtcgtagcaaacggaaggcccatcgtgtggactccggcatctagatcatgtggagcttcccatgcatcgtggaagaagaataatggaccttgtaaacgtcctccgagaacagctcctgcttcttacaactctccttaaaaccataaaacacatttttctgttttttttttttttttttttttggaatctttggctgatttgaaacaaacaaattgtatggtttttgtatgaattagcgtgtactcaaattatgaactatgcaactccatataacctatttccgattgtgtagatcgtcaaaatatgtaccaattttgtatttttgttatgagatatatgtagcaaatttcagaaaacaaacttcttactactaatatctcaatggagttgagctgagcatagttccgaattatgaagtaaatcgccgtgttttgcttgatcaatatgtcttgggagtggtcaaaatcttggatgaatttgttttagatgagacgaagactcaactccatcgagatattccttcatcaaatcgaaatcagaattgattacagtgagcaattggagaacgtgggagatcaatggatctgcaatctgcatgttccacggctaaggaaagggtggtgggtttctatctcttggaagatggaaaaacgaaagtatatccttaatttcgtctgcaatatgttgcacaacaacacaaatgcgtttcattgcggcggaggagctctctggatatcgctgagaatgagattatttcgctcagtttccgaacggcgtaagaaaaatgcctaaaattagctattaaagatgatgaccaatgaagcaaacctagagattgttgttgacaagacttctgatagcatgtaagtcaagattgcacaaataccatacacccatctttttcttcgccaatccaaagagatgacatagctcaatcgtccaaggtttaaatctagcgatgggaagagaatcaaattttcgtccgaaaagtccctttttcccttagccgaagccaataattccccctctcaaatagaagtgaataaatgtttaatttttaatcgaaaaatttggatattactatcatatctccatcctaacctaacaattacacccaaaaccatggttcgtagccgaacctcttcatccgaaccacctttactctcttttgaaaatcaaatccctaatatttcgtgatatttgttattcagattcttcttcttgtaattgttaagctttacgatctataatttcgaactctctttataacttactatgtacctttgtaacagttagagactttcaaattatgtaatactaaatttttttcttaagaaatatagaatgtcatgcatatgaaaaaagactataaattcacttggtgaaaagatacatcatcaatgtataaagaacaattgcttgaaaagaactgacaagtagcccaagaagtacaaacatgttctaaagtttagatccagtgctacgcaccacacttgaaccactctcatattcaccaatcgtatggataagaacctctcttaaaagactctctctcatcttaccatacacgtgtccatcaccacctctctgaacaatctcctcacctaacttaatggcggcttcaaccgtctccgccgcactaccatacgccgaatcaacaatccccatcttaacacccacatccgccgtcactttcgccgccgtcaacatcacatcccttctggccgccggagaaccaatcttacccctaataacagccataaaccacgccggaactatcaactcaatatccaattcactcatatacaaaaaacctctatcacgacgcatcaatacataatcatgactcatcgctaaaatacatcccgcggcggaagcgtgacctgtgacggcggcgattgttggcataggaagagagattagatcggcgactaaggatctaagttttgcgtccattacaacagagagagaaggatttgactcggctaaagcgagatcgtagccgttggagaagaatttaccatctgatgttgtgatgagtactgattgtgaaaatgatggatctgatcggatttggttgatggtggagcggagagagtcgagtaaggttgggtttagacggtgttcgccgtcgccggtgagttttagtatgaaaagacgatcacgtttctctaatgaacacatttctcttcctctttgtgactgattattaaatgatttggctagtagtaaaagaaatcgtcatgtcaactaatacatcatatcttagcacatatcaaatctaattttgttgatatattcaaacacaaaaatgtaagaatttcaaaccatattgggaaacgaaaatctatatataagtaaaaaataaatcaataaaagaaaatatttattcagaatactgcatcataagttgtattgggcttggaatttacgttattcggtaattgcaagcccaatacaacatatgatgcaaaaaaataccaaaagcccttctaaaggagaccaagcttcatgaagaaaccagtaatgttgaaaacaaaaaatgtgtcaagagacttattatgatatatttcctctgaatatgaatgttcttctcttttctttactagtagacaaaaacatgaaccatgaaaaaagaaggtttcgtctatatgacacaaaaacaaacaatctcaagacttggttgtaggctcgtctgtttcttcagcttcagcatcttcaatctcgctcgctaacttcactaagtcttccaccagtattttgccatctaaaaaccacaaaaacttccatcagaaaaccgaaaaatctaagtagagaagttggaaatggagagtgtgacctttatctttagacagattttggataagctcttggataccctctttgcccaatgtgtccttcaggtacatcgcagccaatgcaacttcatctgggcttaccttaccatcataatctctgtacagacaaaattgaattgattgattgcgaaataattctaaggcgagaaaacaatctaaaggatggttacacagacctgtccaggagtcgccagcggttgccaatcttgttatcgacatcatcaatttccttttcaagtttctggagcattgtctccacctaacgatagaagatattgaagttagagattaaaaagactagagagtttgtgactgaagaatactatataaaaattgttgttaccctatctagcagtgcagaggaagttttatcagcaatagctttctgagcacttcggtcactatcttctcgagcagctaaataagctttcctagcgtcttcctcatcatctgtaccacctttctctaccatgctgttgtatagatctacctgcgcataaataagacaagtttactcagaaaaatccaagaaagcaagataaaaactagaggatagtggagagaaaactacagcgaacttgcctcttttttaactagtttcaggaactcttcacgctccatgctaacagactggagtcaaaatcaaaagaaacgagaagcattaaccagatttcacactcttagaactcctattggtaaaataaatgagagcgtggttaaaagtctccatacagatgcggaagccaaaacagctaatgcacggctgagctcacaaagctgctcatgtttctcaagagttttcgctttcgcttgctcattagcatctttagctgtagatgccatcatctcatccaaagctacatctttttggcttgaagcagactctttcatctttgccatttcctcttcttcttcttcttcctcctcctacattcaatgaatcataactaagaaaatagtttcctgatacaatctcagtaaattcaagatccatgatacgcggaaaagagaaacatagttcctcaatcctcttccttcctgatacagaatggtaggaaaacatagagacaaaccttgattaattcttcttgcatttctaggtattctaacttcctcttcctttctgatacagaatcctctgatgacagagctgtaaccccaactgtgtccacaacctcatctggcagagaggagagagtagcttgaacagcctcttctggcttgagtttcccagccattgagaatgatctgtcaatacgtacaggaagaaaaatgtcgcaatgtcattcttaattctttgtatataatatatatattgactgagttgcaagaaaagcttacctagaaagaattaagagggatgatggtaccgaatggttgagagataaatccagccagtcaactagctgtaatgagagatatgcagatcagaaatcacctatatctctagttaaactactagaacaacacaaacacaaatcacgagatcattcttcttattcacaaagagtacaattttgttgataccaactccactaaagatggaatgctgaatgatatttataaagcaataacctgctctctcatttcttcaactgaacccaattgaagcattcctctctctctgcaagcttggcgaagttcagcttctgagagagactccacaccttcagccttgatcaacttatcatcctttttaatcctatgaagtccaaggaatggaattgcccaatgattatgtgagaaagaagacattaatttagatatatatataatctgaaatgcgtgtcttgtagagtagtaggactcaatgtcagccattggagacaagaaaaatagcaatatgagtaatgtagaactaactcctgtaatcttttccgaagcatataacgtaaatatgcatcagttccgaatgggctaatacccatgtatttgcacatatttaccaatcgggacctgcaataaggaagataagattaacaaaacaaaccaagacagaagcaatatcgcattaccaatagatacagttttgactagttcataacctgttaatgttatccaatgtaagctcatcattgaagagctttgcaaagcccaaaatttcatcattcgaaacaccgactcctcttctaacctgtacaattgataatgacgctataagtccatcttgaagtttatagaaggacgtcaattgcgttagataacaaggaaagcgaaccttggtcataaatccatctagatcttctgcagtcttctttatctctccactgcgagaggtttggacttcctttgccatttctttgacagtatcttggagaaacttagcatattccattcttgcattcaaccttctttttagagcctcctgcaaaataaacgtgaattttagattcatacttgagaaacaggcaagagtgacagcgcgagaatgaaagatcaaaccaattcatacttcccagatcaatgtaaaaataaaaataaatgacgtataaggaatagagaagcaataaaataggttttttaacagtacctcttctttcatcttatcctggaaagttgacggcagcatgtttgggaacaacttaagaaacaccggtagcaaaaactccatgaatggaacaataatgaaaactgcaaccgggactaatctaaaaatgtcggcagttgttcgagtgagttgttgtcgttccctcctagatagaccttttccattagcaagtttaacaagcagccttacactgatcctgacatcagcccaaagcaactttgtccccagccagtaatgttgcagagtagacttaaattcatctttccagtgacgaagcttcttagcccaatcttccctgcataaataaagcatatgttacataacaataaatggcatgaaatcgctcaaacgctaaaacaacaaaaactacagcctaacctgctcattgatgcaatagctctcaaagcaggacctatccccagaagaaacaaccgcacacgttgcataatggatatatcagatttctgtgattcttccaatttcatagctttagctttagccttagctaaacttaacccctcaacagcctcatcacactcctcaggagaagcttctttagtttgcgaggtaaccttttctccctttttatcatggtcaggcttattagccgttgccaaagacgagtacatagattgaaaaaccaatctatatcccaaaggataaggcaattctaatattccaactccattactaaaacttggagactgaagtaatctacttctatagaacccctccattaacacgctcgactctttcttcttcacatctttaaaatcacggtatcctcgttgtccttgccgctcaatacttgaaaaacattgaaccgtaggcaaatgttcacttagagatttcactacgtcgtaacttctccttcgaagaagcgctcgtgaagccatattgcagtaattgtgtagctatatacagtatatatataccagctacataccaatctgcacagtgattgtatgaaaaatctgatagatcatttcacaaaagacaaaagaaaacatgaatgattcagatttttcaaatggattagttcgttgtagaagatcactaagctctctcaagtcctaaattcaatttctaaacctgaattacaaaatttgcagtcgattcaatgaatctgaaacacgattgagattgattgcgacgaaattgagatgataacagaaacgagagacttaaatttggatgacgaaaatggagaagacttacatctacagagaagaggaggagtggagaggaaaggatcgatcaaaacgtggaagacaatccaaaatactttgagaaaaagaccgtcaaaagaatcgtcgtcgtcactgagccgaagaagaagaagaagaagaagaagattcaacgtgtttctgctgattttgaccgttttgtttcgggtcgggtcgaatcgggtcgggtccggatatacaaatactgcttcggattctctaccgtagaactattacagtattacccaattacttttgttttttgaataatgctttttaccatttactttgcagcaaaagaacttctaacgctaaacattaacaagacttcttcatttccatgaaattaatcgttttactaatcaactaatcatcatcattttccaaaagcattcaaatgatcaataagcaatattaaaaagtcagtctagccactaatcatcatagtcaacaatttccaaaggtaggtaatgaaaagcacttagtaattttttgtttgagaattttatcaagaaaatgcaggaacaaacttcaactttgtagaatgaaaatcaaatgcttcgacatgtcacatgtatatgtctctctcaccattcttttttgttaaatcactcatcaatgatttgcttcagtttgagattcattaagatcatcgtgatttaagagactgtcacagtgtagttttaacggttatgattacgaatctgtcgaaatgttcaagtttttgtttatttctgcagattcttaagaacataatggctaataagaaggtaggtggtgctggttctaatcctgagtcttgacacaagtgtttgatcttctattctgttttattcgtggatgatatttagagaaaaatgtgtatatctatgggaacattttaccaattttgatggaattctgactttttagtagctccaaagcggttttgttaaatggaatttgattttgtttctaagaaagattttacttgatataatatgttaagattcgtcttcagtaattacattatgaaaaaccatctatgcatctttggatataagcagttggttaaattaactatataaatatataaaattgaaaaaacattaggaattacagtttaaataattcaaacaatttaagctccatgcaatactaaaacttctaaatagcgtttaataactttcttatttagaaattatcgaacaaaatatgaaagtttcttaagaaaccatttgaagacatatatgtaacaagataagtaaattgtaataaaatatattagcactctaaacttctagatagacataaataaagaagaaagaaaacattcaaaaagacaaaagaatagaaagaaatttgtgaaagtttcaatgagaagggaagaatttgttgaggcggcaaggtagaccgtaaaactcatcgtttcgcacgtcaagattgtaaagtcgaaacttatcccaccatttcattccgcaatctttcttggcttcatcgctgtcacgacacaatgtgcaatcaagcactatcgcaattattgccgcaaccgttgtatgtgacatgaatatcactcttatcatatcttccaactgttttgtgcacacacataaaaggaatctcaatttgataagttgcaaaaaaggcgtttgcgatttaaacaatttgtctcaaagtatagaataagatgtgcttacccaatttgagtgatgatcagaccgccaccctccattgtagtattctctgaagtattgtgggattgaaatagccatgaaaaaggaaaatccgagaatgaatttgatgttgaagctattgaggttgcagaattgtagatagctaagtcccacagaagctgcattatatattgaatttgattttattttagtgaaaaaaataaaacatatatttatcgaaaatgctatactacaaatgtgatgtgatgaaaaagacttacacacaaaacacaagacgatgcaataaagagatgccatgattggtaatggtatggacgcaaaaaacgctccaaattttcctgtattttgatcaaaataaataagttacaaaaccagtaaaagatattcaacgaaatcatttagacattgtaaataggaagatgtagattattagtaaaaacaaaacaagaaaattaccaaaaatggagaaaaaaatcatgaatgcagctgatatttgtatcactcttcgactcccaatcttagtcattgccaaaagtccaacattttctctgaatattaagtcacacccatatcaaaactatatcattagcctttaattactacaatttatatatacaagagaaacttaagataaatgctcgaaaaattaaaaatttgtaatttagagatgagtttatttacgttgatgttgtgatccctgtgatgcctccaagcatgccattgagtaatactccaactccctacaagatatttatataaatgttcatatagatgatgaaataaatagttaataaacggtcaaaaaatatgttttaagtgacgattaaattgttgctagactaaccagccaacaagtaccacgactaacaactgatggtggaattggcgtcgcgcttccatatcttgcggatgcatagaacaaaccagtcgactacaatagtacataaaatttatcactttcaactttaatcacagtatgctaagtattattttccatgattttaatatcagtttcatgtaaaagattaaagtttaacctcaaatagagtgacgaaagacgcagccatcatcgcaaaagaatcagtgatgtcgaaagttggacttccccattggaaaggatatggtatgtatatcctattattcacataaagagaataaacataacatttgaatatcaaaatattaaaatctacacacgaaaaaaaattaaattcatttcgaatagaagaactgaccaaggagtgttggtgatgagaccagtacgatctgtacgacaactggtttgagtagtatgagacttgtggtcataaacaccactggatgtgagaagttgagcaaacaaccataccaatggaatgcataaaatcatcccataacggtcacatctgcttccatccaaaatcatcactccttttttcatcttcagaaaacgcggtaagtactgcacccgaaagttaaaaattaaaaagtgacatgtaaatgtacacgtaaccaaaattatataattcgcgttggctaaattaatgtttttagatgatctatattctatttttttttttataatcatgtgtatggatttaaaacaaaagaaagctaagaaacaaaggttagaactttacctgagtgacaaaaataagtaggatcaatccgggaagtcccacttcaacgcatcttgctagctgaaaaatgaaagatgtttgcatcatattataaatctatataattattcaatattcaataatctatttataaaagatatctcattgttaatggccaaattttagtgtatatacacataccaaagggaaaccgatgtggtagagtcccaatccggtaaatgttgccaaaggagcaatggagagtggacttagaaatctaatgagcacaaaccaaaaatacattcatgtttaacgttagagacataataaggtatgcctcctttggcaaaatgataatgaagtaatttacctaacaatatttctccatacgcctagaatacagataagaacttggaaacatccggttataatcaaagctccttgtatgcttctcattgttcgcacaaacctctgattaattatattatatcaaacaatttattattagtacaatgtagtttgtaaaattcatgataagaataatgttaagacgacttacttcaaaaggatcagtgtagtaagtgaatcgggtcgaataaatgatggaagtgataggtatgatataggcataagaagctacagctatcacaggcaatcgagttccaaagaatgactggaacaatgttgttaatccagacacaaacagtaatgtttgtatgactttaaccttttctgcctgaaattgtcgaaacaaatatagaaaaaaaaaaatcaaaatgtatacataaaaaattaaaatactttcacgatttaaaaaaaaaaaaaaaaaaaaaaaaaatgtttccaacatctcaagaaataatcatatacttacatagccacctcccatgagtggaactaatacacttggaatcagaactgtgatgccaagactcaacaagtaatgctggaaacccaacactacggcttcaactgcaaacaccaaacatattacatttacacacacacacacatagaaataataatatataacataaataaccaaaattttataaaacaaaacatacgccaaggaggaggactgttgacgcagtactggattccggggagttgttctttcaccgggtggggttgtaactcttccgtccggtttgctgctccgttgtttccgccaccaccgtttgtcatggttgccaccaccactattacaaaggttagaaaaaaaaaagaaaaaaaacaattctcgattataaagtatatagagtaaacgaaatgaatgaatatattaaaaaaacaaaaggaggctgcatgttttgcataagtcatcctcaccaataccaatacaaaacaaactctgtagagatctcaaaacaaagcgctagcaaaaaaaaaagaggagatagaggcggttgagatataaaacttacttttgaatcaaagaagcttcgttagatacaagtcaagtgagaggttatgaaagactttcgaaagaagtgaatgattggagagtgaagatgaagaagaagtcaaagagacttggggattataagttgtaaccttttcaacttttgttatttgaatgattaaatgacattttctacaattaatgtagtcataaaagtctaaatattgtcagtttttgatatatgaaatttgaaatagaaatcttttgacatcatgagatttctgtattttgagatcaaatttttttaaaagaatattgttgtgaaataaattgtaggttgtgaaatcaaaatgaatgtgtcgaatatatatggcaacatgaattcattatctttgcgtaatcgacttactaattcttaatttaatctagttctagttatgaagacttttaaaacattgttgcttaactaacgtttttccataagagacttatacatacattgacttcgacaagaagatgttatacataacgtggctttatttcatccaatgtatgttcttaaatcacttgcaatatactttcagaaacaatcactctttagcaacccgaacaacctgtttaccgatatttttcccggaaaacagcccaacaagtgcagcgggagcgaggtcgaggccttcagatatatcttcgacgtagacaatcttgccttctttgtaatatctcttgacattttcaagaaactgtgggaagatatgaaggtaatcgctctgcaagaacccttctaaccttaaacgtttgtagatagcgctgtataggttcttgattccttgtgatgaagttgagaggctttgcaaagacaccattccacagagcgcgattcttccacgtaccttcatgttgaggagcgctgcatcaagcatggatccacccacgttatcgaagtagatatctatcccctccgggaagtacctgttttagtaaagatattgaaacagttcagcttcacgtttttgtatagactcacattatgcaccatacctttctcattccctagagctagccacaagaaatcagtttaagtgacatagtcagagtatcttactattacctttatggatttatcttgtaattgcattgcgtctcatttgttctaactagagtgacagtgttgataaaatgtgtaaatatagttgaatgatggtgaactttaaaagacttatggaacattcaaaagcctagagacaagccatattaacctcaagacaagcactactctgtaattgattctttaggttgaatcttgacatatatttacctcttcaaagcagtatcaagatcagcctcttccttgtagttaaaggcttcatcatatccaagctcgtttttaaggatctcaacctaaaatatgtccacaaaaagttacttcacaacgacaagtgagtaacaagagttgctaaaattagtttagagactaaccttttgcttactaccggcgctaccaacaacatagcagccgtgcaacttagctagctgaccaacaagttgtccaactgctccacatgctgcagagacaaaaacactgtcccctttcttaggacaacatatctcattaaaccctgcatatgctgtaaatccagccatccctgtaaaaaaggtgaattcagactgtttagatcaaacaaataattgctaccttcctcttatgctaaacaaaagacgggccgtaccgagaagtccgagatgataagaaagcggaatgtcgtcgtctaactgaatatttctcaactgtaggttatctgaactacgtagcaaactgtattcttcccaaccaatgataccagagactatatcgccgggcttataattagtatcatcagaatctatcactcttgctaaaccaaacccttcgatacgctgcatcaagattacaaaactatcagtcgcttaatacagagcatataacaaaggaaacgtcaaccaaagaaacatattaaagagtcattgaagaatatgaacaatttcaccaataaaatataacaaatctcaagtttcctcagcatataatatatccattcgtcaaaacatcgaaaacttggtgtgcatgatctctctaaagcatatatacagcatctacacatctctctctcttcaaatatgaacaattcaccaataaacaagacaaatctcaagacttcgcaacatttctagatacatacacaactaacacaagttccatcaaaacgtcgaacacttggtgtgcaaaaatctctctatcacacaaaaactctacttacctatccctcttcaaaatttgattttccaatgagcaaaaaccgatacccaaaagaccaattacagaaccaatcgacaaaaaaaaacaaaaaagctgaaaacttgaaaatgtgggaataatctatacttggccaggaacaaaaggcgggagataggaaccgtgaaaatcacgcatacgacctctcatgtaaggatcacaagacaagtatagatttttgacgaggaaacaagaagatccttttggtgcttttagctcaattgtttctccgagtttcacttccatgtctgtttctgtaggaataccatctacataattctttagtatcactttcttgttctccaccactgaaacttctcccatttgttatgagtctgtgatggagaagaagaagaagaagatgagttacaacaagttttgttgcaaagagatggttttggttgtgtaggagagagtttggtaagacgagtgtttctcgtttatgtgacgcgtaggttttttaaattttggttgaagtcatttaatgcgtatggttttttttggttcacccacttgattgggtttcctccggtttagattattgtcttcttgcgtgaaattgttggccctttaacttttattcaattacacataccagtacaatattatgttctacacaaatatttattcacaatggttacgaagtatataaccatataataaattttaatagatacacaaatatttttatgtacaaccaatgtcatgtttaatattacaaatcttggtctgaacaaacgtatagaggtcatagacatccactaggtgtaaccaatccaagttgcttaccagaaacattggtgcaagaagtctttgctgcttcaccgtaagaagttagattaattgcctgcattcgaatcccagtgcatgggactttctcactgcaatccatttttatagcaatctctgtggccgatgttcccatgattccactatatattacatcgtttattttgattcctgactcctgaaaatttataatttcatatctaattaactttttgtactgctaattttttcgcttttgtgaccggtaacaatcatatatatggtatatatactgttgaggtaaatggttaccaatcaaactcattatttcaatcaaatatttggttagattctaaagtaattatttgactaacatacaaaaacaagataaaggtatatgaaacggacctgagaagggcaagaagaatcgccagggcaatagttctgatcaatgaggataggatatgagacattaaccataatagctcctaagaaccggaccctctccacgaacccgttgctatgtcgcggccacgacttgatcctaagcccattgtccgtccgtacaaacacagcattcttcacagttacgttttccacgccttgctcctctatggactttgctaagctcccaatgctgattccatgtccaggaccacaagtgatcccatcgaccataaggttctttgtacctggtccgattgagatacaatcgtctccggttttgatggaagcatttcggacttcgatatcggtagatagctgaatgtgaatgccatcagtgttaggactctcatcgggtgctatgattcggacatcttcaatctttatgtttctgcaacggtttattgctatgtggaacaattggctattcaacgataatactcctttgatcttcacgttgtttgagtccatgaatctcaatgtctacattaaataacctttgttaaatcttgactgtttatttgcgtttttattcttttgtgattcatattgtaaatttaggatatagtattcttttccaagtaattaatacgtaatatatgttacgaaacaaatgcggtccataataaaatatatattctgaagttacattttgtttttctgttattgcaaccaaacgcaatcgcatttttttttctgttattgcaaccaaacgcaatcgcataaattattaggagtttagaacatgcaagtgtagttgtgttcatgttgttgacaaaaaagaaaaacacaaatgcataaattggtaattgaagacttaaacacataccgttgcaccttcagggcagttgtaaccattagccttgcaactccacaaggttgatcccttagcatcaaaagaacctccaagaaccgtaacattgtgaacaccactaaaactaaaccagttttcttttttcccaagcaaactgtagtcttgaggaccaattaaagttccgtcaatccttagggttatctcacggcttttgcaactttctccttcgaacctaacctccccactaaccaaataccttccctttgggacgtaaataacaactgagtcttccactccacacgcagcatcccatgcatccgaaaaggcttttgccgactctacgatcccgtttgggtttgcaccgaaactcagaacgttaagacttgttcttgcgtcaaactgaccaaagtgggacataatgattgttataacgatgctaaagacctgaacaaagcttagaaacaatgccatttgttgtgtgttttttttaattggaaggatttaaagtttaagattattgtatttttcgatgaaagatagaagtatgcacgtgtgtatatatataagttagttaggatcttggataaagagaagagggtttctttgtggtttaagaatcaaagtattaagcaaacggcgcgcggcgccattgatttctctacgatatttgaaaacgagttgctttgtttaaaagtaatttgggagcctccgtaggtaacgttgaaaaatcactctatcttttttaataagttgagtaactatcaagtgatccttcaactttatcctttttataccgtttactattacaaagatgatcgttagttaatgtggttatcatatcgctaaaattcaaaaacgcctttagtccgatttacaattcaagatttagttttcaagctaaaccatctccagctccaaaccaaaatttgacattaaactacttatcttataatgcaagccatgttccaacgtatggttggtagaaccaaataaaatagtcgtccttgtcgaaaaggttaaactaatttaacatgtggcataacatgagttatatgaaaatatttgcagttattggagaagaaaatgactgctactatataagtatgacgggtagttagaaaaaccaagtcaaaataaaaaaagatataccttgcttcgacttaataggttgaaaccatgcatgtgagcctcaagattatttttatttctttgtgtatgtattgattgtcttgttgttgttccgtttgtgtgcctggtctcgggtgagttattatacaagataagatgacgatgagggagtctttgatcaaaaaaggtcattggtttttctccgactgacggtacgtacagttttctcgggcagacactaaaaggcttccaatctgtggagtttttgaaagcacatcgttttcaagttgcacatatatccgctcttctctgcctcggggaatcatattctaggaacttcaagattgtttatcacttcatctgacatcacgaggttcattgcttttatcgatggactgaattttagagttttactttgccatggaaccaaatccatattttacacaaattttgtaaaagattaaacgatttccttttcaatgaatatttacattcttagcaaaaagatggtcttccttcgtttttggttatttatttaagccttactttaagagatctatcatccatgcctagttgaaagttaaagcatcacattgcttataaagaagtgtacaatcaatatcaatgaaatcaatctcaacttgttatatatgtcaaaactaatcaagttatgtgttcacattaagaatataaattagtattcaaatttaactgatgattgtgttaagtcttttataatttttcacagccacaaaagtaagaaaacataaagcactgaagttaaataccaaattcaaaagagcttcgtttacaagtacatacacataaaatcagaatgatcattagatacaatagtgttacacataactcatacggacatataaaataaaataacacttgtagaacatatcccattcataagaaacgtaattagcctcttaaacaaaaaacgtaagaagctaatcttcatttttttttttctcattccacacaaattttcccattaaacacacaaaaacgagttacaattacttaacacggcaacgaggttgctttctccttctgttcgtctcactgtacagttaaaaatggctctatggactgtgcaagttctttagctgctcaaccacatcaagagtattgcttagctgatgataatcggagcgatgaagagcgtttatttgtcccgaggttttggttccatcattgaaatggttctttgcaggtccaccacgagggcagtgacgcacacggattctatgctttcttgtctcagtcgagaaccttccgtggaccacgaggaccaatatgacttccttgtctcttgtgtcttcacaccaagagttctgagcaacaccgtccacaaactcttctactgttgggaagtcttccagatgcactgaaacctcggctatttggtttggtttgattgtgccagttcctggagacacctgtttgcaaatataagagcatttagtaaaattgattccaaagaaattctcaagacacacgacatgatttcagtgtctaggacatgctagttaagtgttgtattttaggaaacagaacagtgagactctaatgaaaagccaaactgcaagtatgagagaacaactaactaacctccagccactggggaaacccgaaagagcctcttgctcggtggtcgtgtgcctgaccgtcctcctcgattttagattgaccttcacaaattattttgaagaaagcgatgttcttctcactcttatttgtgatacgcaggatagttgaatcctgattttggagaataatattattggtgctgacaattgtttctggaaccttgcttaactctccaagcaagaccttgattttcttattcgagtttatgatgttcccatattcttgtctcctgactgactcatcaacccgggcaatcttgacactaaatacacagcgtacgggcttgtggtcactgtctgtcacttccatgcaggcatcataccttacaaaaagaaaaacgagaattttaagtcttaatcctttgacaattcaagagtagtaaccatatacgttataagggtcacaaaaaaaaaatgatttactcaaatctgcataccactgactctataactaaagtctctgaaattataaagtaagctaaatgtccgcacaaagaagcattgaaactgataagaatgaacatctgcaaaagccatgattcttggttctagagactcatgtaggatataagtcatatacagcctgtaacaaacttttaaaacccagaaatgcggacacagtttcctattctctaaaccaaattaattccacaaagaaaaagtgtaagtgcagatatttctattaggagtcatcaagactaagcccctaagagaatatgtgaatgattggtgaatattgcaatccaagtaccagaactgaaggagttgaaaagaaaatagcaggctgatattttgttattgtaggcaattagtttaagaagctaagtagatgaataagttgaggaatgacacgatcttcaaaaactgttactgtcttgatctaataaaacgtatggactagtaaggtaagcctgtctccagtatctttatatagtgaacttaaaggaaacttactgtgatatagaagacaccactggacaatccaaactgcactcagctcccaaatgtttcttattatcgcgatatagaatcctgtcacaccaggcaggaatccgcttcttttccccagaatcatatcctgcagaaacacagtttcgattgtcaaatatggtttcaacaactaaatgcccttaaaatcccaaaagccctgaatgttgggatattatcacagatatagcctcttcccactggcaagaaccccaagacacaggagccagcagaaatttggctcacatcagatgaaagaaatagtgtgaacaaattctcgaatgctcgctcttaggtagatgcaaggctaacttcatattatttagtattctctgggatatatccacattcttaacttttaaattatatgaacttttggttttagctacctacctagcagagaaaacttggacagttggacgtttacaattcacaatgttgtcaattttactctactttttggaggggttcggaacagcagcttataatcctccagggaaatggtataatttaaaagctacaaagtggaagcaagtcactgacctgctagaccagcttggtgcctttcaaatttgtatgttggagggaacctgataattgcttcacgcatcccttgaaaaacattcccagcttccatttcagtatgtagctgatccttttctcttagccaatcaaaacatctttgagatatgaaatcccttgtttcatcatacgttatatcatccaaacggtaattaaaatctccaagaaatatgaccatgtctgcctcagatagttcaggccttgcttcgattgtattgacacccaaagcctgtgaaaggacagttattagactttttgaaaaattatacattgcattctctgaaagtaagtgatagcaactatgcaatcaaaagaaatacatacattgccaccacgaggcattgtaacaccaaatgacgcaccagctgcaatggaggagaccaataacaagagtgaccaacgaataggtaaaaagtaataagctgagcaagcaacacagcatgatagaaataaatttcgtagcataccaactcctgcattgagtgaactagactgccgtgagaaggtcattgttcgataaacatggtcgaagtcagcatttcgccgattaacagcttctagatgtgcagcaaaatgacaatttacaaagcacagtactcgatcatacattctgagtcgcacacctacagcaccctaatgagacaagaaatggctctatcataatatagataagatgacaacaatggaaaagggaaaagaaccatttaagcaaacatctgacaatgttaagagataatccattgtttcccttttatgagatctttttattgttgataaatgtgagcaactttcctaatatggcaccataccttgttaccaattgctcgtccaaaaccacaaggaaccgcagcagcgtcaacatcccccacgtgaggtttaaggtcatgtctaaccctgaaagaattattttctctgtaagactttaacttatcaagttaatcctgtactaacaaaagaaattgggaaaacaaattccccagagggataagtaaaacgaatatctttactctcctttcatagcttaaggaccaaattttttgaagatatgaaaaaacaatcaaagaaatctccggaagaaaaattcatactaacaagttgttcctatgctgttatgtaaaatttttgctctgtggagaaactattcaaagcaggattgaaatagaacattggcatctgaaagataagcaatccaaatgagtacaaataatgtggagtatgcttcaacaataaagataagttgtcacaataggaatagtaggtgacccttgcaaaaaatgagcagaaaaagttacattaaaactaagcactaaccatacacaaatgagcaaccctgccagttgcctagagccaacacgaacaaacgatgaaccctcatccaaagttttcccgatcatatccagccaccactgaccaagcggactaccctcaagtcccacctgcattcagggaaacagagtgcgtaatttccagatcattcaaagattacttataaacttagccccctacaaaaactgtaaccagaaagagaatacaaaaaaggacgggtctgtgtgtgtgtatgtgagcctgcatgtttgagagaatggaaaatttctttttttgagaaggcctagaggattacacaaaaaaaagaccaattcactttcacttttcattttaatcattccattgtagaacttaaatagtgtcggtggtgaccagaagagcggcatacgccaaatgaaatacatcttttctgcttaacagtaggtaaagaaagcttaccgtttcttttgctgcggacattgcaagaactcctgctcccatttcaacttcttgcagtccaacaactacaatctcaactccagttgcagcacagcctagccaagatacaagtgagtcggttgatgctctcccctctccaacattccacgtaccagctaatattttcagattctctatccttgaatataaaaattctttcccagccaactcggcccgcagtacattgtcaaggggcccaggagaagtaacattccatccacgaatacctccatgatttgcaagggtaaataaataaccagccccgatagccatttttattacaggtccactatgagctacccatccaccaagcagctttccctcaaggtcccatacttgaacagtgccgttggaataaccaacccacagtcgagaacaaaaagtgaacatgcagagaataccagaggactcgtatgcgaactcttgcaagcaattaccatttccgtcccatcgcataagtataccatttgaacttcctgtccaaatcattccatcaactgatatgacaatagcctcagttttcctactatcatcacaaaaccctcctttcgttgcagcacgacgaacagcatcagctgctcccataatggcattacgagaccgctgaaagaaaccaagagaagattgagctttctcttttttggaagcagttaccttcatcttcccctcttcctcactcccaaaatcaggatatacagaattttcaggtcgattctcgagctgcccatcaatattgaatactttgatcaaatccctagtgcgagcatccctgcataaagaaacataaaatttaaaaagtactgagctatacacatgaacttaatggttcctgctagcaattgaaaaactacagatccaagtgacaagagatattgtagacaaaagtaattaattcccattaagtttattgcagtaatgctggtatattctggatgatcaattagaaaaagaaaggatgatgcataagaaaagcagaaatatgactctccattttaccatatagcaaacgtcaggggactagcactccatactcttgcccttgtatgatcagatactaggaatgtaacatctgacgttaatgtattagcaaatccattggccgaaaccatgttcctagggtcaatatacgatctttcaactgctaacgcagccatgtgcctttcttccatcttcaaagaaagcgacttcccaagagcaccgtcccagggccaaactttaagagcacctccctcagaccctgaccatatatctcctacacaattgataaccaaagttgtgtcatccgcaagggtgtcatcatttattcacattttgaaattgtacaaactgtactaacttcgatcatacactactgaaggcagtgaaactctaactcaacaacacaattacaagacggactctataagctatttataatgtaccagctactacatgactaaaccagcttgtccggtggaactagaggagccaatatacgtgttagccagtataacaatctgattcaggccgaccaaatatcatcaagatcactaattttgttcctcaaccaaatttccacaataagaaactcgatgtaaccattcaaaatccttcttctttcatcttaaaaagctacttaatctaacaacaaatctattcccaaactatgtaaacaaggaaaacagaaacttacaatagaacaacactcaccataagccgaaatggcaatggagagaaccggaccacgatgagcttgccatgacaaagcttcttcaataccatgatcacctctcaatctccaacacctaatcctcccatctctatgtccactccaaacaactctactaccttcatcaccaatcatacaaacaacagcagcagacccaaactcattccctaaactctccttatacggcgccgtatcctctacctctaatcccctcccacttccatacaattcactaaactcccaaactctcaacgcaccatcctcaccaccagtccataactgtctctcagtactagtcattgtcctcaaaaacctcccaatttgagtttctctcaatggatgaggtctcacatcaagactaggtggtcgattcggatgaaccgctgacctaatcggaactttgaagatcccagattcaccacacttaccaacaaattccggtaacgaatcggagccgtttccatcaccgatcccgtcgtgattaccgtcttcgcttagtctccggtcgagaaattggatcatgtaatcgatacgtttgttgctgtcgtcgacggaaggctgagattcatcgtcgccggaggaagatgaagaggagtaagctgaacggttgaaaagcgtggacggagttgcggcggagaaggaaggagagaagaaggagaaaacgtcatcgttttgatcgttttgacgatcttccatgagtattggacttgaagcttttacttggagcagagagagacgacgagtttttcggtacaaagcctctcgagatatttctctctcaagctaaatcgcagaaatgcttgaaacgtgttgtttcggatctctcgttttctttgtttttttcagacattcgaaattatttattttataacaacaaaatttgtacttgtaaattggtaaaaacaaacctttataacaaaaaaaaaagtagattggtaaaaagtaaaacttactgatgtcaaattctcttttttggattaacagtccagaaatctgtcacaaattctctgttttggattaatttttttagttcttaaaatcgtatgttaatatatgtcatttgattctctgttttatattactgttttggtctaattcttcttttccgttgttccctttcgattgttcaatgtgttggtttgattttggtttatgataacttacctcaaaaccaagagaatttggaagacaatttcaacaagctgtttgaacttcataaggtacaaaatatccctctcagcaatcgattactacctttttggatgatgtggaggatatggaaatcaaggaatgctttcctctttcaaaagaaaaactatgatcctgcaagtgaagcaagaaaaggtttctatgaagtttaggaatggatagatacgactgggataggttctgaagtaaatcatgattctctctcgccgtttggtcactcacatgagcatttccgtagtcggcaatggataccccctctcccagaatgggttaaatgtaattttgatagcggctatgtgcagggacgttcatttacaaatactggatggatagtcagagacaatagtggttaagttattcgatttggttgggcaaaacttcaggcagcaaattcggcgatacacgcggaggcactgtgatttctccacgctttacagatgatttggactcatggtttccggtgtattgtgtttgaaggagataacttggaactaataaagttggtaaatacaatgggagatcacaacgaaatagatacccttctctttgacattcggttttggatggataaactgccacagatatctttgcgacatgttaattgagaacggaatgcagcagcggatactatcgctaataaggcttgttctttaaatggtttgtatcaaactttcacaacaccaccacaatggttggttaactatctgtatcatccctttacaatctaatgaaagtctagatgttaaaaaaaaaaaacaagagaataaaaataaaatattggctattttaaaaatatttttaaatatacataaaactaatgtttatttttaaatatacataaaattagtgtttatgtagtatttcatatttttcttaaaataaaccgtaaattcaactaatattctaataccatattatataatattgatattttaatgaaatatacaattaaattaaattttaattaaattttcattgattttatgtttatgcatagagacatgttgtcaacacttgagagagtccctttatcaattaaagtttaacacaaatagcatagtcccctatatcaagatcacctgcaactaaccaaattctcaccaaaatcactaacaaatgaaacaaaaaggaaaaaaaaaaaaaacagcatcaatgttcatcttttcccctacatacatatatataaaatctaaaataaacacaattttattacataacatattaagattatatttattggatttcttcctctcttttttaagtgtgatttactgttgtctctaattctttcatcagcaaacaccgattacgtacaaaataatacattattaataacatttcttactcaaaaaaatgcgccaattcaaaggcttgtctaacgtgtgtatataatagtgttacttgcttgcctatactatatataaagagagagagacttctaagattctcctccatttttgctacatttttttttctttgattaaaaacatttttactatttttcgctttttgctatttccttgtaacttaaaagaagaaaaaatgagaggtagcggagcaaagatcgccggcgttttgccgttgtttatgctattcatcgccggaacaatctccgcctttgaagacatagagaggttgaggatttggccgttaccggcacaagttagccacggtggccggagaatgtatctaagtggagatttcaagcttgttacggagggaagcaaatatggagacgcctcagggattttgaaagaaggatttgatagaatgcttggtgttgtgaggctgagccacgtcatctccggtgaccggaattcttcaggcaccggtggatctgctttgcttcagggacttcacgtcatcatctcctcctctaccgatgaggttagtttcatctatcaatctacaacaacaatttttcttaatgatatatcttcaagttgatgaaaaaagctttacgtttaatgtcattataagttacaatcatctcattattaccacaatcaaagacaaatcaattgtctttatctttaacaaaaaaaaaatcaattgtctctattggttataaattgtatcctctttttttggatatgtcattttcacaaatgttgcaacatattatttttttcttttattttattttcttttctttttcctaaaacactttctatccactagtccacttatatattatttatgaaaaaaagagaaagaaataatatttctatattatcctaaaaaatatttaatgaatttcatcgatattttggatataatcatttctttaaatattaaaattttgttaatattacagcatgaaaattgtactaacgtttagttcagagtctgtctggttaaagcaaatttttctatatttttatttagaaaatttagaaactaaattagacgaattgacaaaaacaaatatatataattttatgaagtttagagtttataattattttcattatacgtagaactaatctgagcagttttcattatttagtgcattcccttttgattttggttaaattcataccaaaactaaaagagattgaatataatgggtgtatatttttcctgaaatcataagaatttgactaaaatttttagtaaattcacaagtaaaaaaagaagaagtagaaattcttctattgatacgtttattttgtgttctggagaaaaatatttctcattttttttttttccacttttccatcaaagttatgctgaaaactttttcattttttttaatcctggttggtattaagaaaaattgagacatatatttcaattgttttcctctaacatgtttaccattcaccaattggtattatttgttttattgtcttcatttataactatttttcttttgtcaactcttgataaacaatttttctctttcttaacagaagttattttagaatatattttacaaattggatcctagtttacgcaactttgtccatgagaattgagatgtgcgtagatgtatcgattatccaacttcttatcttttttttatttttttgggttgcttggctttgttgattggtgtctggcgacttggttgtgtggtggtccaccaactcacggacatcctcgttatcttcaatcagatcattgaatatatatttgttctattttaagatcattgagaatattttattccgagatccagattttaatcagatcatttcaagatttcacgtaatataaatcacaaataagtggaaaaaaactctataaaattatagtcacaagtggtagctagtaatgaaactttcatattggttgaaatacgtatcaattatattaattaagtcttttgacaaccatacgatatagctggtgcaagtgtgcaagattattctagattctggtcctaaataaaaaaatatttatctatttataaagatatgaaagtttaatagtacaaccatatatcattgagaaaatatgataatgtctaaattttcatactaaaatagtatacatcatggcctaatcttaaatcttaaatatgaaactaatttcattgtatatacattatttcatgttcttgttatgaaattaatcatctgaacattgacgtaaatttaataatatttaaaatgggaaacccccccagtaaaaaaaaaaaagatgattgaataatatagaaaatattgtttgtactaaaaatccaacaaaggtcgttaaaatttgtgtaattttcgtgttgcagttggaatatggagcagacgagtcgtacaaattagtggttccatctccagagaagccgtcttatgcacaacttgaggttagttggtaccattgaacacctaaccccagcttttgtcactttctctaactacttatatccataaagatttaaatgtaaattcagctttataaccataaaagaacctaactttgaagattttgttttctttaatagttgagttcgacatgcaatcaaattttcaccgtaaaatacatgtttcagaaaagaaaagaaaaaaaatgaaacacttctgttgtgttttgttttatgatctagtacttttgcagcttccttttaaatgtaatttttttttcacccactatagagacccatgtaacataggtagggacatgaaatggtgtactccacgtgagctgtattaaacatgatgggataattagtgtggtcatattttgttttttcctctataagaatacaaatgcttaagcacaagtcgttagctatttattatgtcaatatagagaaaggtacaaaattattgtgaaagataagtgtgattcccactagtgttggactgttgtgtttaatcaaatattatatgaaaagaaaaataatacaatctccattgatatttatgttaccacgcgtgcaggccaagagtgtttatggtgcattgcacggtctacaggtttgtgtttgctatttttccaatttggttatcattatagttaattaaagatttgagttactgaagaaaatgaaattattgtaaatgcagacatttagccagttatgtcattttaatttgaagaaaaaggtcatagagattctaatgactccatggaatatcatagaccagcctagattctcttaccgtggccttttaatcggtaaacgattattcatttcaacttcttctctaatcacttaataacacatcacttctgatcgactgtttttgttactacacagatacatcccgacattatttgccacttccggttataaagaacgtgattgattccatgacatatgccaaacttgtaagttcttataagatgagtcaatttggtttagtttatgaatctcatcttataaatgaccaagagtgatatactttagttggttgattgcagaatgtgttacattggcacattgtggatacacaatcatttcctttagagataccttcttacccaaagctatggaacggcgcttactcttcctctcagcgatacaccttcgaagacgctgctgaaatcgtcaagtatatatgtctagatcctaatattcatgcaaataaatgaatcatactacaatcataggattgatgttaaccacttatgtatgtgtatatatagttatgctcggcgacgagggatccatgtcttggctgagattgatgttccaggacatgctctctcatggtaatttcttcatcttcaacttttttttatcttctctaatatatttcgcattttcgacgatagtaactatgataatattcattgttataaataaaggggaaagggatatcctgccttgtggccctccaagaattgtcaagaaccacttgacgtgagcagtgacttcacattcaaagtcattgatggcattctctctggtaaaaagctttaaaacactttttgctttatgtatgcatcaccaaatgttgcctaacttcttatggatatatttcattcagatttcagcaagatctttaagtttaaatttgtccacttgggtggtgatgaagtaaatacaagtaatgatcaatatctcttttgtttatcatatatcctatctatggtgttggttttgattacatgtacttcgttgcagcttgttggtctgcaacaccgcgaatagcccaatggtaatgatactcagacacttgcatagttctttaaaacgtttttcctcatgttactccaactttctaactttgaaggcttaaaaaacatcggatgagtgaaaaagaagcctatcaatatttcgtgttgcgggcgcaaaaaatcgccttgtctcacggatatgaaattatcaactggtaattaaattacactttccttacaaaatgaaaacgacaagtaatcaaaattttcatatgacttactacatttttgtctaatgttatactgtagggaagagaccttcatcaattttggaagcaaattaaaccggaaaaccgtggttcacaactggtaattgcatctgtacgtagaaaagaagtacaaattgtgactcgacgttgaatttaatataacgttttcctttgatgaatcaggcttaacacaggacttgttgagaatgtgactgcgtccggtttaaggtgtatagttagtaaccaagaattttggtatttggatcatatagacgcaccttggcaaggcttttacgcaaacgagccatttcaaaacataacggataaaaagcaacaaagtctagtacttggtggcgaggtttgcatgtggggtgaacatattgatgcttctgacattgaacaaaccatttggcctcgcgctgccgcagctgcaggtacataaacgtttccttataactcttgcaaaaagtttataagtttaaaacatactttacactaattgctaaacattaaaaaatattttgtgtttgggaagagcggttgtggacaccctatgcaaaattggctaaaaatcccaacaatgtaacgacgaggttggctcacttcagatgtctattgaatcaaagaggagttgcagctgcacctttggttggtggcggacgagttgtgccttttgaaccaggttcttgtctcgctcagtgattcgaaagattagcattgtagaatatattacagtcagcaacaccttggtcaattcaggttgaaatgaacccctacaaaaaagggatactttgaatttttttcttggttgattttttagtggtagaaatattccttcttatttgggaataattgttgcaacattcatgtataaaaggccttaccaatttcaggcttgaataagaatacatagtttgcacataccacattcaaaaatcataatatttggtatctaaacgagaaagagaaacaaaatatgaaaagatagagagggaaccatcactaccaagaaagagagtggtcatgtttgttttccaatcgctcgctagtgactaaatcatgtttgttttgttgaccccagcaacaacgctaaaatttcagccatcgacattttttagtagctagttgaccaaaactgtcacaaaattagcgactatgaaacaaacaagaatcaatgcaaggccagcgactacaaaatgaataaaaatatatcactggtcgcttattgaagtcaccaatgaccaaatcatgctcgtatcgtagtcgtctaagactgaatcatgttcgtttaatagttactaggacaaaagactaacaactgagtgatccaaaatcatctatttttaaatgtttgttttgtattttcatgtggaatataatagaatttttttcaagaaaaatactgcattgattttattatgtttacatatataaaggaaaaataaaattgatatagttatgtaaccaagtaataaaaaaaaaagattgaatataacaagtataatttaaactcagtgacgtagatgcaatatttttcaaggcttccaggctttaggaggtggtggagtcggagagtagagaggaggaacactattgaacatcgtgttcttatcaatttgttggccaccactgctggttaaggaaacgagagcagctacgaggcctgcgttaccagagagagtaggctcgcttgcgttataattgtttcgcaagtcatggaactcatcgaatttgtttggtccaccaaccatagctcctgtgatgttgtttggatttggattctttgtgtctctatacttcaatccttctctacagcttctcctctttttgtcgtttgggatcgtggcgcctcggtgatgaacacgtcttggaaacttcttgccgaatccaaccacatagctcatttttaaggggttgtctccaagaatgtaatcaatctgatcaaacatacaacataatcatgatttgttctaaataagtcataatttgtttttaaaggctccattcttacctgagactgagcaaaatccttgagaacatggttctctacaaatgtaggtccacagtaccatccaggaactccagtagaattaagataatccgcgaacaaggaagctaagaaggaagcatgagccacatattcaagtggtcttggtttccccaagttgagttgcataagccctcctgaaaattttctccacaaaacggttcaagtcattttcaagaccatacacaaacgaaaaacagagtaaagcagagtaattaatcacctgaagttcggttaaagacattgtactgcttgagataagcacacatggtgataccagtagcgttatggtacctattgagcatgttttcgtaagggaaaccagggttcaagaacaatctataccgagtcatcaacaacattgctccaggtaatttgttattccagctcggtaccattaactcgggtcgattagcaaaagctttagcagtttgaggtacactcggtgtggtggcgaattgtatgtaagtcttgtttccagtggcgtagtaaagccatgcaccagcccacatgaactcgtcgaacatacttgttgaattgtagaaagcttgagccgttggttgtccgtccgagtagcgcttgcgtctggacttgcttctgaagaagggatatagagtttctgcgccttttttgagctttttggcgtagtccggtttgtcagtgaatacgattgaagcagcagctaaggctgcagaaacttctgcgccaaggtcagcggccgaagtggaagagaggacgggacggtcgtaggacatgtcttctggtttttgccaacagtagatatcatctggtgattctgagtctcttagtcccccaccaacctaagagccatagaaacagggctttcatcaaaaaggtttaggcttaggtttcttgttgcgcaagaaagtaattaaacagagttttctaagaaccataacggtttttgtaatattgcatcgatcatagcaattcttcgtaacattctctcatagaagtaacaactaataatacattacctgagtgtagatatgatcaaggcgagtagcagaattgttgaaagtgagaagaagataatcagtgccccatttgagaacatctctcatgtgatcatactcatcgatggctttgtatttgtggctatactcaatgagactccaacttagcattgtcattgagaatgccatcggaaaatgaaacttgacgttgcttcctccgtcgtagtatcccccgaccaatcctcctaccacgtccggcagcccatccttcgtccctgaatcacctctccatgaaaccttattcttcttcggcagcttaccagctacaatatcacattttcattattcatcattcatctttttttccatatcatcaatatttttcactcagttttaattcctctaatgcttaccatttagattctaatatttttatagacatgaatgatacacgatagaattcttgaataatttcttaggtcaaatatgaaaatgtggctcgacatattggtgttagtttagtgttttggtttaactcgatttcatttgtatgagtgtcttgaaccgattccatatttcttctatttattaattaattaagaaaatctaaactaatactatcaagaattaatttgtccttctcaacttaaaataatacaaaatgcatatattggatatataaaaagaaaattttgattttaaatttattttctaatcttgatatagagaagaatatttgaaaaaatgtatttagtgtagaaaaaaacataattccaaacaagctagcacttagatattcatacaaaatttaagtttatatattttggtttattacgaaattatactgctcaaatatcgaaaccgcgttagtccttggaaagccaaatgaatttgtgagcattaccagaagccagctcacaagaacaaaatgagaaaatgcgaggttgaaagttagtcggatatacgtgcttgaaattgattttggtattttattagaatgtcaacacttgcgtgttattcttgaagtctactacctaaagaatgtttatttttgaattattaaacgttttctaatactaataagttattgcgcttgctaacgcggaattattcaaatttgcctcacaagtcacaataaaatgactttttaatcacttcattagaaaactacatcagcaattgttccactttttcgttaatcttttaagagtttgtttccttatatttacaaataatcacattttccacaaaatttctaaaaaactctctattaagtcatcaacttttatagttaagtcttctaatttaaagggtgtagatatttttaattttttttttctatagaaattggatgaaaattggactccataaaagtaagaaatgaaaatttgataactcagaaaatctagtcgtctttttttttcttgtcatctttttaagtttctagttaaatattttaaaatttaactatcatcattatactatgcacaatgtaaatatataaataagaaaaaatagtcggcaaaaaataaagaataataaggaagacttacatttttgagcatcgaaaaattgaagtgctttgtgaagggcaagagtgtaattatcaggcggaggaggtgcagacttatgacgaggcaacgacttgacgataatgatcggaagagcaacgacgagaaacaagacggcaatagatccaacggtccacaagaaaaccgtgcggctcacggaaacacaacctaggtttacatatttcttcttcttctttctccaattatcttgcggtgcaagcaaccagccttgttgcgtttcgtctaattcacttctctgtgagtgaatagctcctctgtcccactccgtcgtgttcctcagccgttcttcctcctctgccgcaatacggtcgctgtctacggcgtctagcgacccaccccatacattcccgggatgcatttcgaaagagcttggatgattaaggttttttttggagaagaaatatagaaaggatataaagagttctttttttctatggaaaaaataagaagtctacttaattttggttaatgatcggtgagagggattttattaaagagtgagttgaccaaaattgggtcttaggaaatgggaacgatgtgtctatattgtatattctagtagaattgtaatcgaatttttttatatttattagtttgaagacttgtttcaaataattttaatgtttttttttggcaaccaaacattaattaaaaagcaaataattttagtttattgatttttttttttgcaataagcctacatcagattttaatttgaatcgaatataactatatgtcctatgtatttttttggggcctaaaagaaaaaaatatcaatgttttggtaaatgacatggttatagcttggtttctacgttcaacaaaactcgggctacttgttgtataccttgacaagattctactaaatcttttttcagacttccagtcaagtcttctagggttcttaagtcgggtttttatttcgggttctgattgtctgattctaaagtctctttagagtttgtcatttgtttttgttggtgtgattgacgtcctcattcctaagtccgaacactatgactctgatatgttattgacagagacagagagtgataatatagtttctgatagggaggatttgataaaacagagtgattacataatgtttgtgttgatccttcttagttcttaccgtctatagtttccctatttttttaacacgaaatttcatagtttgtgtaacttgcggcagaaaatatagatagctcacatagctatgatctaaatatgagcattcgtgtatatgattttatggtagctagcgttgttgacaggctgcggtaaattggtcttcgctagatgttgtgaagcgtatggaaaatactataatgagctaatatctattgggctttcatttagctttcgctatttattaattgggcttgggccacccttcacaaactgtttattttgttccaaggatttttcagttgagagattatgtaagcaaattttgttttcttcacgtaacagaaattcgatctaacttatgtcgagatgaattgctaaaagaaccattatcccaagtaaaatgtattagaaacctcatacttgaatgaggaaccctaaaatatgtatagaggattgtgataatgtactcactatcaatatagtcagttataagttagaattctgttaaaagtgttaaaataatgttttgtttcaaatacttagtttatcaaataaacttttttaatctttttatgtcaccatgagttatctgaataaagatgtttatatatccgcaagactagtcaaaagtggatagctccattaactgttatagtgtaactattctagtgtaacaattcttagaagtatttggttttactattttagtcttactttctatacttgattgttcaggtaacattttcaaaattggagatgattttacttaatcgtaaacttattacttatatactaaaaagcttgtaagtagggcccgaaatgtggaaaacattgtaatttaaatccaaactagttttagaagaagacgcaatgtatatataataatggaaaaatatgaaaacgatatcagccaaacatacttattatgaatattaattggagagaaggagtgtaaccatccatatggtgtgaattctatgatttttggacccattgttataaacgaaggaagaagacaaagaacatgaagacatgaatagttttatttcaaaagtaatgaataaatatataaataaaaggaatggttgtcgtttgaaaatgggtacgagtaaatagtgttgcagactctgctccaacagtaattacaacaatgcaatatgcaaccacgacccacttgcttctattcatttcccattcttgttctctctccaaattgactaatgttttaaatgttatatgatcatgataaccattcttttttctctttgcacgcttcttcgttaggttaggtcgtacgtaaaaagtgatgacctaatcgtagagaccaactaaatttcggttctgattacttaatcgagtgtttaaatttgcttaacttgacatttgttaccaagaaaggagaactagtagtgaaaaaagagagtttaaaaccttgacaatcgcttaacccaaagttttagaatatttctgctagtacataaggtaaatgtacacatttattgtagttgttgtattggttgaatttggctctgttggttgaggtttcagattcataaaaaaaagtactgtagttactagtaaaaatgaacttgaattatggttgtattgttgttatacaaaaatggcacactttatgaaaccaactaaaaacaagtatccatttctgataataacattttcgaggatttttaagatatacaacaaaatgcagaactatatacaaagtcttgtgtcttgagaatgtaacttcaattattaacaccaaaatgtctaaaaacctaaagcatctaagaaacggtgccactgtctctaacccctttctcaacagttcgatacaaaacttccattaatgtttttctattcccttcacatttggaaattcaaactaaaaatgcataaacaaaaaatactataacctcatcttaaaaattactaatgtcccagtaacattaatctcatagggttactaatcatgggttatcttttaaactccaaaaacaaagtaggtatcattatataaacaagtttcatggtatatctcctaattttcccgtagaggaaagtatgaagatatatatagagaagaaagacagagtccgtgatcactcactctctctctatctctatatatcgacacaccataaaagttgttctttctctccgtttccttagcctctgcatctgggcgattttctctttctatctccctacaccttagggagtactgatcctaaactcatcatctttctatgccttcctcttttctttcacttattttcttttctattttttttctttcttactttgcgtaaaactagcgagtcaaaaataaagacacttgcatgatcctaatataatattatatattgtaattagagaaagagagagaagagaagaaagaaagtggcagtagattcttatggattttggtataaagaaacatgaaaaaatgggtttgaccgaagaaactttgaggacggtaacttcattatcaacttttcgactgtatttatattttagcttttgtcaaaccgtatcatataatattaatgcgaattactagtagagagtataataatagtaataacaaaatgcttggttactgtatgtaaatccctagacaaaaagaataagaataaaaagagcaaaattcttcatcccaagatccatcaggagagtcagagtcagaccccatctctcatttcccatctctccttttcacatttatttccttttttttctttctagatacttttttattttgaaatttaatactaataactatacatttattgttattattgttgttagagtctatgctagggtccaagggttcatcccaatatcccttcttctccttagaaactcgcaacttcttcacatggaaatcaattccctctagtaccaaatcctattactattgaaggtatactctatagttatttatttagttaagtatatatattaaaaataaataacattaattagtactagtcttatcatatttattagctcattttcttataaaatactaatataataggaaatttaagcacaagatgagctttgcccatcgagagcctcaaaacccaaaagtctcttcttcttcacgagatccaatcttttgctttttagtaattaattacatcttcttccttctcttctctcttcttcttccctctctcatacctacctataagcaacacaaagaacaccattgatcccatctgttttgttccctatatttcgttaatccatccatacgcattccaactacacggtacaaatttccatctctttttaatttgtttttataatgattttaaatctctcaggttgtctctagactcttaggtctagttaccaaaatttgactagcaatcatatagctacaagttcctctatatcatatagctacacatatctctaggtctgaaatgatcttttatctcccaagcatatattatatatttggatgcatacctttatgtttgactttcgaaaagcaccttcatgttactcattttttcctctatttgctttcaacagttgacaagaaggttggatcagtatatataagtatacatatacacttatgtgtgtgtgtagtgtatgtgcatatatagctcaccaaatatctttaatactactaattgcaaagtttctcttattttacagctttttgtatgcaaccccaaatagcagcttaaagaaagcagagaggatcttcttttatttcccctctgagcaacagaagccattattcaaagaaaggcttctttaatttactcgcaggtaaaagctttcttattctatagagattgaacaacttttttttttttttaattgacaacaataaagattgagcaacttctctacattatttctttctttattttctcacttaatttcatatttgattacaaaaacagataatgtaatatctccaaaatcacaattgatttcataatatctttttttgtttccttataccttctacctccaaaaactaaattcaaaaacccttatttctctcaattttcaatggcggctttgtgtagggagagggaaaagagaaaaaattgaaaaactccattttcaagtcattaaaatggcatcttcttcaacaaactcaccatgcgccgcttgcaaattcctccggcgaaaatgtcaaccggaatgtgtattcgcgccctatttcccaccggaccagccacaaaaattcgcaaacgttcacaaagtgtttggagcaagtaacgtgacaaagctcctcaacgagcttcacccttcacaacgtgaagacgcagtgaactctttggcctatgaagccgacatgcgcctccgtgaccctgtctacggctgcgtcggcgtcatctctctcctccaacatcagcttcgtcagcttcagatagatctcagctgtgctaaatctgagctctctaagtaccaaagcctcggtatcctcgccgccactcatcagagtcttggcatcaacttactcgccggagcagcagatggaacagccaccgccgtgagagaccactatcaccaccaccagttttttcctagagaacaaatgtttggtggcttggatgttccggccggtaacaactacgacggtgggattcttgccattggacagatcactcagtttcagcagccgagagccgccgctggagatgatggtcgccgtactgttgatccgtcttgagattttagggttttggtggtgttcatcttcgtcgatcgcttggtgatgagaaaactataattttaagaaaatatttgatgtggaaaaccaaaatattttaaacgtatggtacgtctctcttaatgacattaatttcggtttttattattattattacttagatatattatgatagtcacttttgtatttctttcaaattttatggacttgctctcttaattgatatcacatacttgcattatagagtatattatttccaaatatgtcgagtctattgatccgcatatgtacctccagcaagaatatagacctaaattcagttaatcattgagtgattttaatggttaatgttagacttcttaagtatttaaaaaacattattagtaaaaattatgaatatgaaatatagtgtataccatgtagataaatgtattatagtgttttccttttattttttttgtagttcaaattttaaaattaaataataaaggaaaactattaaaaacatttaaaattgacatatttatataaatgatatttgcaagaaaagaggtttgatgtggaacactgtcagcgtcaaggataagatttgatgtaagaagaggcttaacggaatataacatgaacatgaaacatcttatctccgggcgaattatacccactagctctttctaggctttctctctaattaaaaagtctccttcatctatttatgatgactctatttattgttgttgtaaatactaattgtcacatcaactaatttagttttttttgataaagttactagttccttattttactatttgggtatagtaatatgcaaaatctcaattaaattactggtgctattactctatatgcaagttgaaaattcacagaaaaagttagtgatatagagggcgcctttcacaaaacctacaaacatatattagtgaaaagaattttaataaacagatatgatcagttattttcaaaaactaaaaaattacaaaaaaaaattacaaagacctctgaatatatacccatcaacgaagattttcagaagataaaactaaattagtatcttgtaaatacaaaaaataataattttcagcatactttgtaaaatactagctatgattggtaacatttcgtaatcccccagatgctataaataaaactaacttatgtggtgggatgaaactttgtgagttaaacgtttcttaatgaattatggaaaatgaactaataagctgattgaaatcaaagtaaaaaccttgtttaaagatagtttctttctttttctctgattgctttaaaaagaaggaaacttgtttagttaaagacgcgtttttttttcttcgtcttgcgtttcacaatgcaactgtatctagtcaattcaattgcattattattgtcaactagtcaatcgcatttaagatacataacaatgatgattatagtatctatatttacacttttattgatttattcattaattaaagatatttaatgacaagtatcgacacaattcccagtgttgaccaaaatcccccaaattttcagagtacttttgaagaaaccctaaagtaaaggattgtcaatatggtttgctcgctttgcatctgtcgcccgcacggttgcatcatctattttctttttactttattacaccataaataaatgtaataaaattaaccttttttttaatctttcattccctaaaaggtctaccaaagcagtccattgacatcggaattcctattagatattcgattaattaaaacccctgagagcttctaacaagaattacatctaagtacttacaaaattttacattatttcttgattttttttctttcacataatctcattctagttaaatattatattaaatatattatatttaaaccattcattcataataacacatatttttgattatatcattataatacatatataagtaataaccatttaaataatgcttttaacaattgatcattgttgaaagttgaaacgaataagtaactggatcagactttgatcggtgcaaaacattttagagtatggataggtataaaattaacaacttaaagaactaaaaaatatattttgagttagtttgcctgaatcacttaatgtaatatgtaatttagataaggctgataacttgtatacatttttttttacatttttttatcattgatttttaactgaatcaagtttaaccctataatatagttatatcaagctacttaatgacgagactaatttgattcagttaacaaaagctggtgattaaaagataaaatcaataaactttgtggatttattgctttcattggagagttgatattttgtctttcattttaagagttgaagatttctaatagtttttttcgctaaactaatagggtttaaaaaggaaattttgttttagaagatatttaatttgaaaaaattattttctaaaacgagacctaataagaacaaaaatgttattatggaatacatatttcattttgctaatgaaaactaaagttggtatataacatagggaaaagtcgtgagaactgtacttatctaatagtgtgattgcagaaacaggtactagttcgtgggaaaattttacttcatgaatccatccaaaaccttcttttgtgatcttctcaattctttacaaactgttgtcattttaatacattatctaaaaagctgtttttttctactccctctttattctctgtctcaacaaacaaagcgacccccacataatatgagagacaatgttcatccatgggacatgtttcttatgtatatatatactattatttgaaatttggaataatacaaaattgggtgcagtgttttcagaaaacaattgaaatatttattcaaatatatacagtacatttcatgttgcatatatgctttgggtttaggagtccagaatttacagcaaacaattggcgagcctttgtgactcaatttttggaattagattttttcgaaaagagtattagaattcggcctgcacaaattacatgccacctgtttgatatgtggcttagtccataattaataagtcatgttaattattagtatgtcattgcatttatgtttggattatagttttcttttgtacatgaagtcctcttccatctcgtttcagccagagatctgagttattgtccacaagccgttgttatcagccggagatctgagtccgtctcttttcctaagcactacatatatggaagtgttttgagctgaatcaattaaaagttgttgcctaaaaaaaactatacatatatggaagagcctaatcttacattgccacagaaaaaatggtgttttcattattgattgcataacttattcacctaaaaatcttatgaatcacaattttttatcactatgatccccgggttaatttatgacaatagtaatatatatactccaaaagtacatgtaaaaattttcatagtgataattttttttgggtgagctaattaaagagcaatggcagggcttaagagagagttactaagcactaagcaaaaccgtgatattatgattagttggcctaacgagaccgaaaaagttctccttggtgtgatttttggcgtcggaattgaatgtgaatgaatataatgagtatattacacgagtgtaaagcaatgaatgtgttagttttgagaagagtgagaaagagagagaatgaataaatgcaaaagctctaaaatagttaggagagggaggagaggagactgttaagcaagaagggtttcccaaaagaagaaagccaaagagacgaaatagaaaatgacaaaaatagagacaaaaaggcaaatgaatagtggtggttgcgatatgagcctattccatttattatttaaatcctttttaaaataagaaatataccagttttttttttttttttttttataaaaattcatggctaaggatatgtcatttgggatggagagatcatcatctctcatttattaccttctcttgcttttctatttctccatcgatgttctcaatttcaaatattttctttgaattttgaattttgcacttactgttgagacaaaaaaataatagtacttctaattttctatatttataattgcaaatgcaatattttcaaaaaaaaatgcaatagtttcaattttcaaaccatcagaaaacgtagtaaatatatagatatagactatagtttcacatttgcaatgaattgatgttaacgtaaacaataatatgcatttttgtagtatgattcatttttctgtttcttatccaaaacatgaataaaatgtaaaatacattcattcttatatagttatattgatatgactatatgagattacatattaaaaaggaacatatatacgtttaaagaactagacataattatgcagattttttttttttaaaaatgtgagttgtggcactaaattaaaagttataatggagagagatcaataatgaagaaagaacacagcagagaagctgctttgcttttcgctcatatcacatcatgcacagaattatcagatgtctactgatttgaaagacgtagtcaatttttatttttattttcttattttatgatttttatttgactacaaaatcattaaaatttaatataaaaaagacagaggttaggatgacaatgatgacgtactttcgcaatgatgctctttgtcttaaatgcatcgccactattttactctctccctctactttccttcgtaatgtaattgtaccgctgacgcaacgcacattcaatctttgagttcttatagttccttttgtctatgtgaagatcaaatgcgtgtaattaagttccatttgtaactatagaatgtttattcttaagttccagttttaaagattgtaattagaatttttattcttaagttccaattttagataactttaggtgctaattgtacggtaaactaaacatttttaaaaaattgtttactcgggtattcagatgctacttatgaaaaaaaaatcagttaacacatacgtgatacgcccagatatatttgtaataattcttttttttttttttttttttttttggtaagaatttaagttagtgtatgtatatatgaaggtcaattggtaaaatgagaccgtttaaacatgactatcgaaatatgggagtttttagttatttttggtttacacaaaagttttatttgttcccctcttcagctatatatatatacatatatatatatatatatttaatattttaaaagtgatttatcatcgttttttcaagactagtgtaatttagaataatttagttgagacttgagagtaaaaagtaggcctgagagtatggtatattaggccagttctgtttggtaatttgttcttttaagtattaccaaattttgaacggttgggattggtttgattatcagatattttaggttaatcgttcggttcggacaaatcgaaccaaagtccacattttaacctaagaaacattaaaaatcatgtcgatcagtttaaacgatagaaccgaaaccaatccgaaaacaaaaaatctcttttcaatttggtccggttcaatttttgggtttgattatttatccttagactagatgaggaaaagcagtaaactagatcagaatttggacttcccgaagcatttatctcgaatacgagtacgtaaaataagttattacaattggtaactataattaaattcaattagtaattgctttaaatttaaatcctatattccatgggaacatcaagctgtagcatgaagctgatgactcaatgttctttactctttggaggaactttgctgcgcttattctgttgtttaggctgaagatcctcagacacggccgatggtattttgagacttttcaagatcttagaagtgactttcttcgcagacttataatcgagggtaataaccttatctttctccaagtccatcctcacagtttctgtgcagcattcctctacaagcttatatagatgtttgagattatgcacttgcactccattcactttcttcacctgtttccgttattaataaaataaactttacagtgtcagatttatattctccttttgtaatttctgttttcaaattaaaaaacaaaagagtaagcaataaatacattacctggaaatcttcgaaaatactgtatcctgtattgatgtcatcctctagaatctgtatcaggaaacaaaactttaaatccatgcacaaattaattatcaagtttgaaaggtggaaaaaaaaaaagaagcacaaacctgagaaattattacaacttgttcaccggcttttttgggcatctttcctagagcagattcggaaacacaagaactatcaatgtatggtttagttagaggtaaaaaaacaagacccccgaatatataataacttgcagacttgtcatattgacgctttggaactagtggtggtacctgcgtacaatagatataaccataaagatcgttattcgttaaattgtttgttctaacaaaacatgaatcaacatatacagttttagtttatttgcgaaggacgacttacggattttagactactattaaactcatactcttttccctctcttaagactttaagtaatgctgtctcacatggtttcttcatagaaaccaaatgcttgaaagttattcgttccttcttacgaaaatggactgtacacaaaagaaagatttagtaaaagtgtgaaaatggggacaattatatatatattgacagttacctgaactatcgtttcctataggaacaccatcaatcgcgagaatgatgtcatcttttttcagaactttgtgaacatccgaaagcgggtttattttgtttataagaatgcctgtcattttatcgctcattttgaagtccttacggagttgatcattgtccattttctgatatgttagatttattgagccgaaactaacatcttcaccactttcttcaatagcatttaaaaaatgcctaatgaccggagttggaattatgtagctgcagatgaatagaaaaataaaaatataaggttatctatcatgtccacagagatagaaatttcatatcaatataggtattttaatttgaattcatttaaccgaacgtattcaggatttatgatttataacttaccctatactatcggaataacatagactttcaaatgctacaccagcgactttgtttcccatgattaccggaccaccactatttccattattgatagctgcatctatttgtattgccagtagttcagtgccgctgtgactgtattttatgggtccaactctcgacacaacacctttcgaaacggatatggtatcaccacctgcattaatatgggctcatacgtaactaattaactagccatttttaacgagtatccataacacaaattgttgtcacaacctatatgcacatattcttataatagctataatttctacgtgatgcaagatagcattcaagacgattcatacttgaaagtttagatatatgaaacatagcttcttggtttgttactatatttaacaagtacttaaaattataaaaatcatttaaaatttaccttttggatagccaacaacatacacggtgtcctgcatagagggtatatccccgagttccaaggggttcattccctcccaaaacttatcattatcaatctccaagatggccaaatcacattcatgaccaaccgcttgaacttttgctttgtactttgtggttgaaccatgctttcggactttaacggatgtttgattagccactacatgagcattcgtaagaattttctttcccgagattacaaaacctacaaccattccaagctaagtatgtaagccaaaccaaaattcctactcttttatggtaaagaaaaatttcctaaattactatatgaataaaattatcaataccagagccggtgctttcactctgcatagtaatctgccaaggttgaaaaagtctaggcttgctagagacggtgaataccttcaccaccgagttgagggccaaatcaatggcagaagtagtaatcttttctttagcatccttactagatacttctttccctggcggcaacttattcttcagcgccgacttggagttattctcttcaacacccgatggtgcagtataagaagaaaataaacgagtattagaagattgctgtctaaagaaaactgctgtcttcgggactgcattgccgtgaagaagaaggaaaccaggagcaagagctctcgataagctgcgaaaccgggacacggtacgaacacagaggaatgacatttgaaggatttgagcgttgagagtagttacaccaataggtatataaatatgttacataatttaggttatatatgttacataatttacccaaaaaggaaaggaaaaattcggtatatataagatatgctttgtttccgtttcttaaatgtaaagttttcaaattccaaaaccataacttcctaattaatgatgcactctgtatgagatatgttttgtttccaaatgaaaagctatgagcttccttattatttgtaggacataaaatttagtatacattttttttttataacggttatgaattactgccaaaaaaaaacctgccgaaatattttacccaattaacagcctcaagttaacataatgttaagtagatgtccattgacgtgttaatcttaacaaaattaacatctaaatttttctttctctaaaagattttatttaacgttgcaaccttgacataaagccagcagggatccacattcttcccaaaacaacaccaaacgagttgaaagacgacatccctcgaaaccaaaagccggaggaacaaatatattttcgtgaaaactaaaacaaactaaaccaaaacatcaaaatagatcataaattaaccttaacatcaaaacaccactacaagtggaggtgctaagttcgacttccgtgatgggttcgacgttcgttggaagaaatcttttcccaaactatgttaaattaatctttattggagaagagatttcttccaacggatttcgaaaaaaaatttatggtaaaaaatataagtctgaaagccctacatctcctagaaatggaacccatatcattccaaccttatcattaattgatttggtcattttatgtagtaatagaggtcagatgatcgagtggcaattagattaacagacctaaagagatgtataagtctcgatccagaacctcctaattatcagtgtactgtatatctagaattgatttaattggtatagcatattaatagccgcataacatcataactaaattatggaatagcggaattcatagaacggccacactcttaagcttgaataaaaatgatatacatatttttagacaccaaaaatttattatttagtagatcagtagatgaacgaagtttctctagcttagttagcggtagaaaaaaaaaaaccatgtgttaatttcatgtattcaacgaaaccacgttttaaaaacattaaaaaaagtcgcatgaaaaacaagtctcttcattaaaatcacagctcattattacactatttgtatatcagtatatgaatctaatagagataatgtggccggaacggaactgcatgcataatcatgagtttgtgccggaattgtaaattttaccaattgttcaatcaagatttattactgaattgtggaaaaaaactttttatgcaaaatggcgtaatgagttttttcagagtaaagtttcgtaatctcattcagacagtagagtaaaacctctagaatcaagatttcacttcaagaacacataatgaagttcccaatttcttagagctagtagccattatctaaatgttctctttgaaactatatacagtatacttaaacaagtcatgctagtagtcatcagtggcggagctaactcataaccaaggaggtcagttgacccccataacatttaaaaatacttacttacatctttatgtaattggtatataatgacataatttggcttggttcttctcaactgacccctatgactcaccttaaactaataattgatcctcataataattttttctagctctgccactggtagtcatactcattggccgacggtattctatgcagttctaagatcaaagaagtagcttctttagcatttgcatagttgaggaccacaaccttctcgttttctaagtccagtcttaaatcctcggtccagcatgtctctaccaattcagttagatgttttagattttccacttgaactccattcacttttattacctaaattcaccataaatatatatttttggtcattttagtaaaccatagacctcattctcgagacactcacgagtgcaacactatgattctcttttgttttcatttccggtcataatactttataatcaaagctggaatgaactttgatacgaatacttcttatttcttgatttaggaaattatttaggatttccattttcataattatttttctcatagagttttgtttttacgtttcattataagtaagcatgaggtttcttttgtgagactcatccaagctagagagtgctttggaggtttcaagcgggttaggccgagggaagagaacatagttctattttgggaagtttatactcttatatatccttattttcagtttaaataaagagtgttttgggtttaattctggttccagattcttttctctaagaaaactcatggtgcttttgggcagcctctattaaagagttgttcaatgaaatgcattaattaccttcaaattcttgaaatcagtgtatcctgcattgatgtcgtcagctaacacctacaccaagaagacaaatccagtaagtctaatgccttcatgacaaccaaacatccaaatatttttatcttagttcaaataacgaacctaagaaattatgacaagctgttcaccagccttttcaggcatatatttaattgcacaattgcaaatcaaagtactgtcaatgtatggctgtgtaagaggtacaaaaacaaagcctgcgaagatgtaataacttggaagcttatcatactgatgccctggaacaaggggtggcacctggatccaatagttcaccacaaaacgagttttgaagtcgttcagaaaaaatgtgaaccaaaaattaaaccgatatatataaaattattatactaaataataagaaatgacttacgggttttaccataatgtggaactcatgctctttcccatctctcaaaacttgaagtaaaactgtttcatctaatttcttcatcgaaacaaaatgattgaaattgattcgttccttattccgaaaagtaactgcatgcaacaaatacaatctcaattatccatcacacatggagaaactttaacaatggttttacaatatatataaacgtaggattacctttagcatcatttcctataagaacatcatcaattgcgagaatgatgtcatcttttcttaaccttttgtaagcatccgacagagggtttatttcgtttataagaatccctgtcatttcaggacccatcttaaagtgattacggagttgagaattctccataagttgataggaaatgtctaacgtgcagaaaccaccatattgtccattttcttcaacagcagttaaaaaatgttttattactggagtcgggattatgtatctgcaagtgaagttaaaccacaaaaatatattatttcgaagccaaaacccttttccacgttttcttcctacttcctagaccattatgcttttaatattgcaaatttaagcagatgaattatccaagatttgtggtttaaacgtaacttaccctatattatctgcagatggatctttttgaaaagctacacctgccattttatttcctatgattgctggaccaccactatttccagggtttatagccgcatctgtttgtatagcgagtagtgtagtgcctccgtgagcatatcttgtatattcgactctcgaaacataacctttagtaatagaaacgctatcaccacctgcataacataagtcattattagtccatgcaagttttaacctatttattcgacccgtttattttttgtaagcattttaccagtaggatagccaaatacggccacagattcatccagagatggtatctctccgagttccaaaggtatcatatcctcccaaaactcttcattatcgatctccaaaatggccaaatcacattcatgtccaatcgctcgaacttgtgctttgtattttgtgggtgagccatgttttctaacttgcaaaaatatgtgatcagcaactacatgagcgttcgtaagaatcttttttcccgagattacaaatcctacatcagttccaaggatcagttaggaaaatacttatgcgcgcgactcttaaaagagttgataagaattatggataaacatcaaataccagagccgccggattcttgctgcggccaattccgccaaggttgcaaaacgctaggcatgctatagacggtgaagaccttcaccactgaatttaccgcaaaatcaatggaagaagatgtcacgttttctgccgcttctggttgttttgcgtcagtccctgatgcaagtgctgactcgctgttgtgcttattttcgtcttgcagttttacgtaaccaagaagaagcaaaggagaaaaacggaacccaagaaccgaaatgagcaagaagcggcagaaccgagccagtgtttgaagaaatcggaacaacatgttgagcgactacgaataggtttgagatttaaaacatacatgattaggagttatttatattgatattaactttcttattatcaattgtttgtggatacactcataatgtaaatatctcacatcattttcttgatttgtaatgagaaatacatgctaacatattatattgcacttaaggaaaatattaactaaagttaatattaaatctttaaacatcagtatatagttaatgaatcttatataatacaatatattaaagtttcttataaacaaaaagttttgagaagcttacacgtaatttctctcctttagatatgtatcattttttagatgggtccaatcttataatcataaaacaattttattttaagaatatctacaaaaaaaaaatttctttctgattctataaaaattgatctaacaattagaaaatttgttataagaataagaatatataaatatataatgtgttataataatttgatcattgcatacacatactattaatagacaaggaagaaatagacacgtggatttcactaaaccatattgtatcttagagtgtttcaatctcaaacaatggatatgtggtgccacaatctgctttagtcccggattatctatatcaaatctctttaaccgtagcgatagggtcagatcaatagacttaagtttatgacagtgtgcaatgtcaagctctcgagcagtggagaacaagaaagaatctgagcaaatgatttatcagtgagtttgcaagaactcaaggacaagtttcttaaggaggaaatcgaccatgagttccctgatgtgcaagtaataaaaaaaatcataatcaagaaactcaagagatagcttctccatgttgcgagacctggcgaaatcgatcaagatatcaatcttgtgttccctggtgcggatacagagatggaaactcatgattttgggagctgagtatctagctagggttttgtttatcgagttagtgtctgcactacggcaatcaatgtagagagaaggtgtttcggaccatacatgcctccatcgcttggacaagacagaggttctgattgcgaacttagtcggaataaaggaggagattagttggagaatctcgtcgggtaaagagctgataatgtccacaccgtcgatttcatctcggtcattctgttttggtggtgatcgccaccggatctttaataaatggttattttatatatttatagtggactatgcctaggcccgtcccaagaactatgcatctagttcttcatttctgaatatggtgaaaacagccgattatgcacccaacgatagcctgcggtttcagtccagatatgtactatatagagcaggcaaaattaggtagacgtacgataccccagacaaaaaccgcaatcacaaagcagagcggactaaatgggatgggttagggatagtccgcattgacacccttaaaaaccaaccttcagctagagaaatttggatgtaaaaccagacagtaatcgaatcattggtacttaaactagagaatctattagtcgtgtaacaaaaattagaatacaagacttaaaggaagagagagtgtattgatttggtgagagaagacaaaacaagttcctgaaacatagagaagtgtctacattctcaagtggaactttctgttttctgtttcttggccttctcaatcagaggtttcaactgtttcttctcagcaagaagtttgaggaagttgaacagaaacggaatgtagttatgcttcctcctaatgttctctgttctccatttcatgaacttctcttcctccattacaatcttatcactcgcagcctcgatcccactgcctacctcagcaatcaacgcattaactgcttctgcttcgcttttgtccacacaagtattagcctgctgcaacagctgttccctctgcctttgaagctccttgagttccgcagtgtagatatccttcctgtttttaatgacagccaaaagattgaacctgatctcgctctgtgagtacctctcaatccgttcttggatcactggttgaaccatttgcagccactcgataccagtttggtctccggggcatgggccaagactgataggtccctccttgagcccatcaagctcgtacaagactccatccacaggtatgtagcttatgaaatggtatacgtcatcgtcttttgtagcagctttctgttcctctgggacaaatggctcaggccttgcgaaactgttgtgcgcagcccggattgaatcactgttattgatagccaaacccttgaggtcggatggaaagttcttggtgaattctttcagcgctgatagttcaggcccgatgtcaacctctggagagttcaagaggatagcaaggatcgcttgggttgcacaagcattgttaatgacctataaaattggaattttgagaacacgaattaaaagacaatactattagtcaaaatcttatgcttatgttatcgacacaaacctgatttgcgaaaaataagttcgaaacttgatcttggatcgttggacgctcatctttttccccagcttgccatttgaaaagaaagatcagaccgtatacgggtctacaaggaagccacacggttgaaaagcatttatcaagaaaggcatagataagtaagaaatctaactcaaagacttcgaggtctggctcaaaagaatatcatttctgctccattcaaaaaagagtccagaaacatcacaaggaaataaataaccatggatgcaactactcacctgaggttattgagagaatcagaatccagggaatacaattcttcaacctacaggaaacacaatcaaaatcaaaagggatatccaagtggtggaaactgatgctagaaataattgcaatagccaatttcatctattgagaatgcatttggacaacgtaaagagacgagtagggatatcactatcagtatacgacagaacaaggcatgaaacaacaaagacacttacttgagaaggtaaataaaggacgagtaagaaaaatattaaaaaagttccgattttttttttgctgcagagtacttaaatttagacaaaaacataacaacttacagcaaggagcacaatacctattctcaacattcatttcatcaccattcctatacgtctattccttagattcttaagagacagacatgacttgataaagttttcactcatcatgaatatatttctccgacaacatgtctcatgcaaggctatgcattgctctatatcccaaaaaaaagttaagaggataaattataacagttaattacctgcactcctttgacttgcatttgttgaataagctctgtaaatacacctgcacttgcataaatatttacatagatataatcagaacacaaaagattgatatacatgtaatgcggcaaatcatacatagagatattcccattgtaattgactacaccagagaatctcaataaaacagactacagacagttaaagtgtgcagaaaaccactcaagagatctataccaaataccaacacttttgtttactatataaactcaaatatcattcaagccggatatgaactatctacaggttactatgaactcttcaacagatgcagctaaaataaccttagacccctaaaaaatactccccaactttgagataatcttcaatgtttaaaatagtaccaaacccacacacacagatcacttcagatattctcacatcactattcactaggagcataaatttcacaacttttcatcaaacaaacaaaaaacatggacttaacatctaaagcatcgagtttaagttctaataaaccattcaatgcagtgagaaatcaattaaagcacaaacccaaaccccattaagagacattaaacactaagaagagaccaacgtaccaggatccgactcaatcgtgcaccaagacatgacgaaactacctgaaaatcacgaagggatcacgttataagcaccgcaacaatacaccaaaagagtagaagcctgacggaaattgtggaggcgaaagatgaaaacgatgaattactagttagctaaagcaaaggaatcgcctttgaagcttcttcgaaccgaatgagatagatttggagattgctttcgtgactccaatttgggaattagggtttaactttgccagagctcgattatatttttatttttgttttaaatagtcgctttgtcgtgttgcttttcctggtttagtctctggttcgtgggttcgttcgtaatcttatcgttggacccttaattcatatatgtgaaaaaaaacatacgataacaaaactgaatccaaattcatattcgtaagttggttaattggctaatttgcaaaataatcactacgttgatccatagtttagttttgattgagtggttcttaatttcatatgcactagtaaattttttggtttggctaatatactcgaccctatacgccacaggcgggcaagccagtgtactcagcgatggaacatcttacttgagtgcagtacctacatatgtgattaaactgtcgtatagagtaacgaatgaagaagcgaatcagataaagttcagtcaagaagagacgatgttggacattatgccttctttaagacagtaacaaaaagcttttagtaccagtagtagcaaaacttccacaaagctttaatgtcaacatactaacactactactacaagtaacattataagcttgtttcttcaggttacatggtaaaagggaatgaaagccaacttctttcagaggaaatctttcattggatcctcatggtgaactctcttcattctgtaagcttccatctcttccggagtcacctgcgatgaaatgagagattttgattaatcaacactaaatcaagaatatgatacaaaatgttattagagtgttaagattggtttagatgatcattacatcgttgttgtatttgacattgtatttgcgtttcctctcatctttctcttccctcctactgagatcctcctgtgcaaaacaaaaaaacacaagtgcttaagataaaactgcaggacaaagaaacgtctgtgcaagagaatgaatgagactctttacctttttaagagcattagcaagtgcctcctcgttcaactccaaatcttcaggaatatcagttccccatgacgccattctcttctcttcaaccttctttgggctctctgatcaccaaaatacaaaaccaatgttacatggtgtaaaacaacattacatatgcagaaatacgtttctttagacattcctcaggagcattttttccattaaatgcaaccaaaaatacataaggaatagagcttacacagaccttcagttgcttctttgcgagcaatattagccttcatcagatcaagggcagcctctgcagcttcaattccagcagaacctgtgcagtaactattgcgaatgatctgctggcaacatttatatccccattgatgatctttccaatatgatccccacacactagtgtgattgttagcatgaacatcttcttcatatttactctttggcaatatcacctcctgtacacaacaaacacgttaagaatgaaacagatccacacaaaataaacgtatcatagctgttcatatcacaataagaatgctacaggcaactgactcaagaaggaaaccatcagaaaccatacctgtccttttataatcctccctgctcggtcatactcaacttgcctttcgctttgcccaagtaaaagctccattggaatttcatcttctgtagctgcattcccgtacttgtccatgattgtgtcctttgtctgagatttcagtttctcctttgcaacctgaaagctcttatagagcaattcagcttgggaaggagccgcttgcatatgcatgtcctgtcccttgtcaaatgcttcccatgaatggatgtttagctgtttgaactccaaagcttggccactatttctatattgattatctccctgcatacatgatacaagtaaaacagatggttggtattttataccatcaaaagatatgatacaaccacatgatccatgatgatcatcaactgaccagataaaacttgtcatttggatctgcatctggaagtgggtcttcacgcatagaacgagttttagggtcataatgagctgagttgacatcgaggttcaacaggtattttgcagtgtcttctctgatacgcagattcctgaattaagagaggatgacaccattagtgcatcaagttaaagcaaacagccaatatgtgaaaagagataagatatcttgtagatgaagaatgatgagtagtccatacctaaccgttcctgtgctaccaccaccagttgttctaacacgcttttcaacctttgcaaaatccatctgcctgctctcatcaaccttggcttcatcaacccttaagtcatcttcgtcttcttccccatcactatttgcatcatcacctttttcattattgtttttctcctcaagtttcttaagttgctgctccttcaagtacttctttcgtgcatcctcttttgcttcataaagatctatcacacgatggtaggtcgaaggatcataaccattccatctgtccctcttgccatcgtagtcaagttcaaaactttcaattttctcatcaggtgcaatgttcatgtttgtgtacttcgccccaatcttacgaggcctatccatacaagctttagcagtatgcgtcattgcaccacagcttcaaaaagaagatcgcccaagttagataatggaactaacgaaaatcgtttttccactttcaatatagccaaggtttctccaaaatatacaaacattcaagggaatggatagtaaaacaaaaaactgaaggtaaagcatccagccaaggacatacttttgacacgctcccttgcggtatttttcagcttgaaagatctttgcacctctatcataccacgacttagtgtaattgggatcactcttccatttcctttgatgcttcaaactctgttaaaaccaaccaataaaaagagtattcagtgtgcatgtaaacatggcagttcagagaagcaggtgaaccaaagaaggattttagcttaccggtttttcagaattaagataccatggagcagatgacatatactgcggaatatgaggattaatttcctttccatcctcatcaacctcagctggagcaagcccggctttacgagcttcctctaattcaatttgcttcctatggtcttccctagacttaaaagcaactgcaaaaaagtccaaaaacatatgtcagaaagataaaaggatagaactttaagaaaattgattgctaacaaagaaccaaatcaataagaatagtgaactttgaatcagactcttaagaatcacaatttgaatctaaccaaaaccataacagagagagaaccaccaatcacagaaagtctcaaatcaataagaatagcaaaaatttgaatcagactcgtaagtaaaacaaaatggatgtaaaaccaaaatagagaaaatcaatgataatacaacttccaaaacagtaagaaccttaaaattaatgatacaaaattacgagagtatgattcgaaatcgagatttttttaccaccaaaagggaaatttaaagctaaattgaaaaccagtttcaaatgaattagaagaaatgttgaaggaaatgggtacctgaagccgtcgccattattatacgatcgtgaagcttcgacttctctctctgttgcgaaaaatctgaaggaacgaagaagaagaaatggctacggctttattatggttaaaatcatgtgatagattgaaatgtgatcaaatatgggctgttaaaaggcgtagaggcccattcattagcaaacaccactcatttaacccaaaaccaaagcaaaagcgacgccgttttcgccactaattattatccccaagaccaaacaaggaccagatttaaaaccggatatagtatagtagaatcaattttctaagtaagagatttcagtttacttttcttttttttgattgggttgaaaaatgtccatagaaagagaaaaccatggtataaagttctccaattaattgaatataatgtaaatgggcatatatgaaccaacctaagcttgcaagcttaaaaatgtaaacaggtctaaaactaaacaggcctaaacggctacttgttaaattgccagagcctaaagaggtcaagaaagcatgttttaggtgaggatttgtttgcttttaatctccatttttataggtaacaatgtattttcaatttgttcaacataggaaaaatatgcatgttatccttcattattacaagcataattcttataagtccagtaaatttttcataaaacttaaatcctcatatgactcgtttgataaatcatctttaccaactagtcttttaagtatttaacatttgcaataatcgttcaagaacaagatcgatggtttttatccattgcagcaatcgggattcgaaccactcgagttatccacttcagtgtcttttaagaattgaacctcacatccatttggaaacatgagtacaaagtttcgaagtattgtggttcctatcttcattgaccaccttcaaaccatatataaggtatattacatgtaagtaaaaactttggctgcaagcaaaaataaaatctaatcacaatcattagttaatgaaaatgaacctgtctctagacaaatgatggataaaaatggccatttgcagcttagcaaactcagctcctacacattgtctagagccagcaccaaagggaatgtaagtccgagagacgatcgcgcccaagtcttttccctaaacatttagtttaaaatttctatgaatttgtttactaaatttgtagtaaataagtaaaagatcatatgacattcacctcccaacgccatggattgaatactaaagggtcatcgtaagtttttggattgaaatgattgtttggatagcccatgaagatccaaccagctggaattttataagaaccaacttggaactcatgatcaaatattctaaatactgttggcgccgtgcttgtgatcctaagggactcattgatcacctaaaacaaacaaccatatttctatgagctacttactatgtattagccaatcttatattgatttaaactcaccatttgggtaaatgtcatagatttgtactcttcccatgttatgctggtctccttctcagtcttaccccggacaattccctcatgctctctatgcaactccttcatgactttagggttgtcacttatgagctttattgtagctgcaagaatacgtggtgttgtttcgttagcaagcagaaataaggtgtatatgtactcgatcgcattgtctacgctcattgtttccgctccttcaaagatgatcttgaagaactcccctaactcctctcctgatgctctcttcttcagtattgtctcctttagtaagtgaagcatcctctttcttgcctgcaacgaaacatcatcctcacggcttggatcattaattttgtagaaaaattactacaattaaggttactaaaaacacctactttcatcattttataaacaccagtcccaggaagattgagagggaatctaaaccagccactcggaaaacatctccaacagagtgcgagttctttcgccgcctctggttccatgtcgccggtaactttctttgcaaggcattcaattaaaatctgtaacgtttaaatatacaaagatttgagatcatccaatatctagtggattgcaatatcaacaagagtacgaaatggataacttttctttaccttgcttgatatttccttgacgtcaagacaacctctcctagctccttcttccatgtgtgtgcgagtcaagagatcgatgtcttgcatcacactcaatttcaaaccttgtgaacctaacaactggaatgtcaagtttcggacatgtttatgagactccttgctctgaaaaaacaagttgttttctccaaagagttgtgctatgctctttgtgagaccaggagcatggtttgtctttgctatctccatatttaattcaatatccgtcgagattataactttggctccaaataaacttgtccgaaaaattggtccatatctattattttttccatatcgaaaaaaaagacaacgttacttaagtaagttatgagttactgcatgctagagaaaattaccaaatgaacctgatgattctctccttgatgaatgttggaaactgaaaagcgtcatgaggcttcatgaactcaaaagtctctccaatgatcggaaaacccatcgaccctggaggtagtttttcattaggtttcggattcttcgactgatatatccaatgaaatagcttcaccacaatgagtgaaaccatcacagttaataactcataaacttctaccatatcaacttatttctttcttcaatttcaactatttcgaagatgtaagtggtttatggtttaggggtgcatgattagagggagtagtactctccttatacttgtgatctctcgtcgattggtaaagtatgtttatttcagatggtaaattgtttatataagaaaaaacattgttgccttgtgtttaattaaaagaggtaatacgtaaaactgcaagatagcttgtaatttgattttgtcaactcacacacgatgttttaaatttaattaaaactggattgtgacaaaatagcagctttagtacacgcaagtagataaaataaaaaataaaacaacccatgaagacaagtattgcccagatttccaaaagagaacaaaatcatccatgcaaagctaagttcaattttttttaatgaattgatgctcatctctagattatatattcgctacagcttctctctagattaatccgtcaatatcatcaccatcagcaatttcatcgtttgcccgcatactgtttggtatttttgaaagtaaaaagtaaacttggtcttagattaatttttaactaaagttttaaacaagtgaaatgaatttaagtaggacaaagcaaaccaaattaagtatcgctctaattaggtgccaatttcactaagtaacttttttaatttaaatttgttaacaatgatttttaactgaagtatgatacaaaccaaaattcaaattgtacactctatccacaccgatagcgttcaagaaacatatgtatcgattaccttctaatccaaatatctgaaaaagataagtagtctagatagtcatttatgattctttcaacattagttattgaaaatgtaattcgaaatacgacaataagaatgtgccaaaaaaagaaagatgagactggtgttttccataaagatgtagttatcgaaatttgttgtacttatagttttaactatatgtcgactttgaaaaaacggagtctgatttcaacttagcaatgattttttaacaaaaaaaaaaaaaaaaacttgcttcactcgatgtgtatataaattccatcagttttcggatgataaaaactctaagactgtttccataggcttctagatccatagacagtatcccaaaagctttgttttgctaagagaacaaaaagtttaatgcaaactttatcttgtgtaaatggacgttacgaatgtatcaaatacatatctttcaaggtatgatatttatttattttttggtcagaaaggtattgtatgatattaaacacaggattttgaactgaaatacacaatacttatcaatatatatacttatcaagttagtcttttttactcccaatttgaaaaacacgaaagagtaattgagacctatatatgtcttaatgaagccaacttgcccaaatttatttcactataaatttgaattatgctatatatccaatgattacaaagtttgctgttggtatatcctactccttgaaaacatactttgaaataagcattataaattataaccaagcctatttcagttccagttggtatcttaacgaaactggattgttaaagttgaaacatgtcaaaaccaaagagtggtttcagcatttgatcttaagctagaagagatcagaaagatgagattgcctccaacgatgctgagggatccatatgttcttggctattattgggtctatttgggcttttgtatatatcgacagagtcgtttattgtattaggttaacacaatactcttgtctaaaaaggattttgccgtcacataaaataaaaaagtaaaatactttttcaataaaccgactcatatatgtcgatacaaacaaagacccaatatgttaagaacaaacacttaagtagttgtaaaaggttttcataaaagtggtctcgacaatcgttgagattcattcctttaacgaaaatggttgaattggttccaagaagcttctcattggactgtatgagaaaccccactgagacaactaagattggtattcctcatacatccatatcctaactatccttctgattccaattgtgcaaatcccttggcttgaagcatttgatgcaattgcacattggcaaggttagttgatcacaatttctactagctactatataatactcaacgttgtcgcatcaacgatattttggtcctcatactcgaccttgttgcattaacgcttgatagaatttcaatagaatagtttctaattccaaaaactatatataagttattacttaagtcaaatctaaaaattagatttttagcgcatttcataatagagtatttcttctagttggtaattaataatcatttgaaatctcgagtttaacctacaactttttgtcaattgttttactaatttgcatatattttgcttgaattttgcttatgtttgttaaaaaaagtcttttattttagttttttatatgatgataattttgttttgatagagttatgaacttgtagtaaacaaaatcatcattaaatgcacgaaaaattaagtatcatgtataaccaaaaaccaagagtcaaacggatgatgatttgagaagttttaaagaattcaaacggttgtttgtgctctattatgctttgatttgcaactcttcttcaatgggcttatgggcacagagcagatatatatcattgatatattactatacatatacagtatcgtgtgggccggatgtgcatcatcatgaatctaataaaaattaagtttatagtataacctttttctaaatgatatttgaactcttcaactcatatacaaaattaattaattcatgggaccttccttcacgttttaagtttgttataaaataagtaaaattgattcagtaaatcgtcatgacaaacctgatttacgccaagttttacgttcatgcgattattttcagaactttatgcatgttttcaaccgtgcgattaaatttcaacgaccaagtaatccaccattaacggttacattagcgtacaaatttcgccatcaatctaattccaaattaccttgatttagggaaaaataagaattaatatgctatacgacaccgtatgatgcaaccagatataaactatggctctaacggttaaccgtaattaggattcacttcgaaataaaactaaacaaaaaacgaaagacttcaagtgtcttatagtatttttttagacaaagtaacacgtggattaatacagttgggcgtattagagtctttcacgggatttgatcaatctataaactactataagtagcccatcttaccttacttaatattatcatttatcacaatgacaattcttgtcgtagatcgatactacatgctcatgaacttactctttgctctaacttgtctcctcttgaacttaactcattgctttagccccaagaaattcaacatttcagccgccacgaccagcgattctgattggtctatcgccggatctacgtggtatggtaaccccaccggatacggaagcgacggtatatatatattcgtgttatgtcaattacagctctagataaacaagcaagaaactaactatatatttaaattaattactaaccacaatatattgattaattataatgaaggtggagcttgtggttatggaaatgctgttgcacaacctccgttttcgaaaatggtatcagccggaggtccgtcgttgttcaagtcaggaaaaggatgtggtgcatgttaccaggttactaatataattacaatattaagcggaagagattaagaataaatgaaagattagcttatatactgatttatttacgttcaggtaaaatgcacttcgaaatcggcatgttcgaaaaatcctgttacggtggtcattacagatgaatgtcctggatgcgttaaggagtcggtccatttcgatttgagtggtacagcgtttggtgccatggcaatttctggtcaagatagtcagcttcgcaatgtcggagaattgcagattctttataaaaagtatgtatctaaggatttggcattagtatattactacaaagttattctatactaatttagtaaggttatatttacttgttatgtaattgtgtttcattggtatgtgtgtgtgtttagggttgagtgcaactatataggcaaaacggtgacatttcaagtggataaaggttcaaacgctaactccttcgcggttttggttgcgtatgtaaacggagacggcgaaattggccgaattgaactcaaacaagctctagattctgacaagtggttgtctatgagccaatcatggggcgccgtgtggaagctcgacgtgtcgtcacctttgcgtgccccgctctctctccgagtgacttcgttggaatccggcaagactgttgtggcttccaatgtcattcccgcaaactggcaacccggtgcgatatacaaatccaacgtcaacttttaagactagctagaactaaactaatcataaagtataaataatatctcttacttaaatgttcaatcccgtgtggtggcaataatataaattaggtctagtgtgctcaaatgtttgttcatttgagttgtggtttatacatatgtcatatatatgtggtaagtttacgcctttacacagaaaacttgtatccagggtgatatactttataaaaggaaaggatttttaagctaaaaaaaagaaaagctaatgtatttgtccatataggcaagtatacattaatgaatatggtatcaaatattttgacttacataaatgaaatgatgttatttatttacaatttttttttatagcaagttaatacatgattttgaaatcaattaccaaaatttatttaacataaatcacattttgttttcctttcttgaatgcatttatcgtttagacttaagttttaccttaaatttacctttcgtacgtgatgattggagagcttgattttccatttgtaagaagtgactcagattttagttttcgggtctaagtgtgggagaaactcggtgaaagagagggttcgaagtctgttgtgactaaagtcataacacgtgaggcgagctgactaaagtcataacacgtgaggcgagctgactaaggtcataacaagcttgagggcgttttggtcttttcgcatgagctctgtaactatatcttcttcttcttctctgtaattctgttagatcggagatagagaaagagagagaattgtaatcaagttctagagagaactagagagagaaaacttgtaaagatacattgtaaagaaaggttctagtggatttccggagagattctccggcgagacgtagcgattccggttgaggaacgtgaactcgttaaatcgtgtgtgtctttgtttctttaagttaggcgccggtagcaccggtactaacaaaattacatatttgtaacaatatatatatatatacacacatacattttagaatagtaaattctttatatgaatatatatgatgcttaaatgtgtatatatatatggttatatataggaggagcttgtggtttcgcagtggctaatccaccattatacgggatggtttcagctggaggtccttcagtgttcaacaatggaataggatgtggaacatgttttcaggtttgtatgaatgtatatagggcaagactcaagagcatagtgttacgtatgtaacacagaatttatgcccttttggtcagctttgttaatgctttttaggtaatatattagttagaatagtattttcagaaaagatgatacaattttatatatatgtagctaagattgttcataaaacgtaaaaaaaaattgtgtaattatattcaataaaatgaccagttcatatgtcttttttaattaatcagaatgaacattaaaaatttgggttggaaaaaaaattgacatagcatgcaagatctgaatgtatgttatatggttacaacaagattttactttcatcaactatatagtatatgttaacatttttatttatcagattctatgcaatgggcatccagcatgctcgaggagaccaataacggtgacgataaccgacgaatgccctggtggtccttgtgcctctgaaccagcccactttgatcttagcggcaaagccatgggtgccttagccagacctggccaaggcgatcgacttcgatcggctggtgttctacgtgtttactacagacggtacttatatacttacataatttttgttttaaaatttttccttttagtatgtatatctaggttttgagttgaattttttttttttgataaatcaaagaaatcaatgttttcatttttgttattatctttacagaaatattatttaattaaaattcaactattttctatgatatacgaatcaaaatattgactattgttttttgatcagcgtggaatgtttatatcgaagaactaacatagctttccgtatggaccctggagcaaatccgtactacatttcatttgttgtcgagtatgaaaacggtgatggagatttggcctatatagaaattcaaccagccgacggagaattc

SEQ ID NO: 119 - DNA, 92356 bp, Arabidopsis thaliana
gaattcctattagatattcgattaattaaaacccctgagagcttctaacaagaattacatctaagtacttacaaaattttacattatttcttgattttttttctttcacataatctcattctagttaaatattatattaaatatattatatttaaaccattcattcataataacacatatttttgattatatcattataatacatatataagtaataaccatttaaataatgcttttaacaattgatcattgttgaaagttgaaacgaataagtaactggatcagactttgatcggtgcaaaacattttagagtatggataggtataaaattaacaacttaaagaactaaaaaatatattttgagttagtttgcctgaatcacttaatgtaatatgtaatttagataaggctgataacttgtatacatttttttttacatttttttatcattgatttttaactgaatcaagtttaaccctataatatagttatatcaagctacttaatgacgagactaatttgattcagttaacaaaagctggtgattaaaagataaaatcaataaactttgtggatttattgctttcattggagagttgatattttgtctttcattttaagagttgaagatttctaatagtttttttcgctaaactaatagggtttaaaaaggaaattttgttttagaagatatttaatttgaaaaaattattttctaaaacgagacctaataagaacaaaaatgttattatggaatacatatttcattttgctaatgaaaactaaagttggtatataacatagggaaaagtcgtgagaactgtacttatctaatagtgtgattgcagaaacaggtactagttcgtgggaaaattttacttcatgaatccatccaaaaccttcttttgtgatcttctcaattctttacaaactgttgtcattttaatacattatctaaaaagctgtttttttctactccctctttattctctgtctcaacaaacaaagcgacccccacataatatgagagacaatgttcatccatgggacatgtttcttatgtatatatatactattatttgaaatttggaataatacaaaattgggtgcagtgttttcagaaaacaattgaaatatttattcaaatatatacagtacatttcatgttgcatatatgctttgggtttaggagtccagaatttacagcaaacaattggcgagcctttgtgactcaatttttggaattagattttttcgaaaagagtattagaattcggcctgcacaaattacatgccacctgtttgatatgtggcttagtccataattaataagtcatgttaattattagtatgtcattgcatttatgtttggattatagttttcttttgtacatgaagtcctcttccatctcgtttcagccagagatctgagttattgtccacaagccgttgttatcagccggagatctgagtccgtctcttttcctaagcactacatatatggaagtgttttgagctgaatcaattaaaagttgttgcctaaaaaaaactatacatatatggaagagcctaatcttacattgccacagaaaaaatggtgttttcattattgattgcataacttattcacctaaaaatcttatgaatcacaattttttatcactatgatccccgggttaatttatgacaatagtaatatatatactccaaaagtacatgtaaaaattttcatagtgataattttttttgggtgagctaattaaagagcaatggcagggcttaagagagagttactaagcactaagcaaaaccgtgatattatgattagttggcctaacgagaccgaaaaagttctccttggtgtgatttttggcgtcggaattgaatgtgaatgaatataatgagtatattacacgagtgtaaagcaatgaatgtgttagttttgagaagagtgagaaagagagagaatgaataaatgcaaaagctctaaaatagttaggagagggaggagaggagactgttaagcaagaagggtttcccaaaagaagaaagccaaagagacgaaatagaaaatgacaaaaatagagacaaaaaggcaaatgaatagtggtggttgcgatatgagcctattccatttattatttaaatcctttttaaaataagaaatataccagtttttttttttttttttttataaaaattcatggctaaggatatgtcatttgggatggagagatcatcatctctcatttattaccttctcttgcttttctatttctccatcgatgttctcaatttcaaatattttctttgaattttgaattttgcacttactgttgagacaaaaaaataatagtacttctaattttctatatttataattgcaaatgcaatattttcaaaaaaaaatgcaatagtttcaattttcaaaccatcagaaaacgtagtaaatatatagatatagactatagtttcacatttgcaatgaattgatgttaacgtaaacaataatatgcatttttgtagtatgattcatttttctgtttcttatccaaaacatgaataaaatgtaaaatacattcattcttatatagttatattgatatgactatatgagattacatattaaaaaggaacatatatacgtttaaagaactagacataattatgcagattttttttttttaaaaatgtgagttgtggcactaaattaaaagttataatggagagagatcaataatgaagaaagaacacagcagagaagctgctttgcttttcgctcatatcacatcatgcacagaattatcagatgtctactgatttgaaagacgtagtcaatttttatttttattttcttattttatgatttttatttgactacaaaatcattaaaatttaatataaaaaagacagaggttaggatgacaatgatgacgtactttcgcaatgatgctctttgtcttaaatgcatcgccactattttactctctccctctactttccttcgtaatgtaattgtaccgctgacgcaacgcacattcaatctttgagttcttatagttccttttgtctatgtgaagatcaaatgcgtgtaattaagttccatttgtaactatagaatgtttattcttaagttccagttttaaagattgtaattagaatttttattcttaagttccaattttagataactttaggtgctaattgtacggtaaactaaacatttttaaaaaattgtttactcgggtattcagatgctacttatgaaaaaaaaatcagttaacacatacgtgatacgcccagatatatttgtaataattcttttttttttttttttttttttttggtaagaatttaagttagtgtatgtatatatgaaggtcaattggtaaaatgagaccgtttaaacatgactatcgaaatatgggagtttttagttatttttggtttacacaaaagttttatttgttcccctcttcagctatatatatatacatatatatatatatatatttaatattttaaaagtgatttatcatcgttttttcaagactagtgtaatttagaataatttagttgagacttgagagtaaaaagtaggcctgagagtatggtatattaggccagttctgtttggtaatttgttcttttaagtattaccaaattttgaacggttgggattggtttgattatcagatattttaggttaatcgttcggttcggacaaatcgaaccaaagtccacattttaacctaagaaacattaaaaatcatgtcgatcagtttaaacgatagaaccgaaaccaatccgaaaacaaaaaatctcttttcaatttggtccggttcaatttttgggtttgattatttatccttagactagatgaggaaaagcagtaaactagatcagaatttggacttcccgaagcatttatctcgaatacgagtacgtaaaataagttattacaattggtaactataattaaattcaattagtaattgctttaaatttaaatcctatattccatgggaacatcaagctgtagcatgaagctgatgactcaatgttctttactctttggaggaactttgctgcgcttattctgttgtttaggctgaagatcctcagacacggccgatggtattttgagacttttcaagatcttagaagtgactttcttcgcagacttataatcgagggtaataaccttatctttctccaagtccatcctcacagtttctgtgcagcattcctctacaagcttatatagatgtttgagattatgcacttgcactccattcactttcttcacctgtttccgttattaataaaataaactttacagtgtcagatttatattctccttttgtaatttctgttttcaaattaaaaaacaaaagagtaagcaataaatacattacctggaaatcttcgaaaatactgtatcctgtattgatgtcatcctctagaatctgtatcaggaaacaaaactttaaatccatgcacaaattaattatcaagtttgaaaggtggaaaaaaaaaaagaagcacaaacctgagaaattattacaacttgttcaccggcttttttgggcatctttcctagagcagattcggaaacacaagaactatcaatgtatggtttagttagaggtaaaaaaacaagacccccgaatatataataacttgcagacttgtcatattgacgctttggaactagtggtggtacctgcgtacaatagatataaccataaagatcgttattcgttaaattgtttgttctaacaaaacatgaatcaacatatacagttttagtttatttgcgaaggacgacttacggattttagactactattaaactcatactcttttccctctcttaagactttaagtaatgctgtctcacatggtttcttcatagaaaccaaatgcttgaaagttattcgttccttcttacgaaaatggactgtacacaaaagaaagatttagtaaaagtgtgaaaatggggacaattatatatatattgacagttacctgaactatcgtttcctataggaacaccatcaatcgcgagaatgatgtcatcttttttcagaactttgtgaacatccgaaagcgggtttattttgtttataagaatgcctgtcattttatcgctcattttgaagtccttacggagttgatcattgtccattttctgatatgttagatttattgagccgaaactaacatcttcaccactttcttcaatagcatttaaaaaatgcctaatgaccggagttggaattatgtagctgcagatgaatagaaaaataaaaatataaggttatctatcatgtccacagagatagaaatttcatatcaatataggtattttaatttgaattcatttaaccgaacgtattcaggatttatgatttataacttaccctatactatcggaataacatagactttcaaatgctacaccagcgactttgtttcccatgattaccggaccaccactatttccattattgatagctgcatctatttgtattgccagtagttcagtgccgctgtgactgtattttatgggtccaactctcgacacaacacctttcgaaacggatatggtatcaccacctgcattaatatgggctcatacgtaactaattaactagccatttttaacgagtatccataacacaaattgttgtcacaacctatatgcacatattcttataatagctataatttctacgtgatgcaagatagcattcaagacgattcatacttgaaagtttagatatatgaaacatagcttcttggtttgttactatatttaacaagtacttaaaattataaaaatcatttaaaatttaccttttggatagccaacaacatacacggtgtcctgcatagagggtatatccccgagttccaaggggttcattccctcccaaaacttatcattatcaatctccaagatggccaaatcacattcatgaccaaccgcttgaacttttgctttgtactttgtggttgaaccatgctttcggactttaacggatgtttgattagccactacatgagcattcgtaagaattttctttcccgagattacaaaacctacaaccattccaagctaagtatgtaagccaaaccaaaattcctactcttttatggtaaagaaaaatttcctaaattactatatgaataaaattatcaataccagagccggtgctttcactctgcatagtaatctgccaaggttgaaaaagtctaggcttgctagagacggtgaataccttcaccaccgagttgagggccaaatcaatggcagaagtagtaatcttttctttagcatccttactagatacttctttccctggcggcaacttattcttcagcgccgacttggagttattctcttcaacacccgatggtgcagtataagaagaaaataaacgagtattagaagattgctgtctaaagaaaactgctgtcttcgggactgcattgccgtgaagaagaaggaaaccaggagcaagagctctcgataagctgcgaaaccgggacacggtacgaacacagaggaatgacatttgaaggatttgagcgttgagagtagttacaccaataggtatataaatatgttacataatttaggttatatatgttacataatttacccaaaaaggaaaggaaaaattcggtatatataagatatgctttgtttccgtttcttaaatgtaaagttttcaaattccaaaaccataacttcctaattaatgatgcactctgtatgagatatgttttgtttccaaatgaaaagctatgagcttccttattatttgtaggacataaaatttagtatacattttttttttataacggttatgaattactgccaaaaaaaaacctgccgaaatattttacccaattaacagcctcaagttaacataatgttaagtagatgtccattgacgtgttaatcttaacaaaattaacatctaaatttttctttctctaaaagattttatttaacgttgcaaccttgacataaagccagcagggatccacattcttcccaaaacaacaccaaacgagttgaaagacgacatccctcgaaaccaaaagccggaggaacaaatatattttcgtgaaaactaaaacaaactaaaccaaaacatcaaaatagatcataaattaaccttaacatcaaaacaccactacaagtggaggtgctaagttcgacttccgtgatgggttcgacgttcgttggaagaaatcttttcccaaactatgttaaattaatctttattggagaagagatttcttccaacggatttcgaaaaaaaatttatggtaaaaaatataagtctgaaagccctacatctcctagaaatggaacccatatcattccaaccttatcattaattgatttggtcattttatgtagtaatagaggtcagatgatcgagtggcaattagattaacagacctaaagagatgtataagtctcgatccagaacctcctaattatcagtgtactgtatatctagaattgatttaattggtatagcatattaatagccgcataacatcataactaaattatggaatagcggaattcatagaacggccacactcttaagcttgaataaaaatgatatacatatttttagacaccaaaaatttattatttagtagatcagtagatgaacgaagtttctctagcttagttagcggtagaaaaaaaaaaaccatgtgttaatttcatgtattcaacgaaaccacgttttaaaaacattaaaaaaagtcgcatgaaaaacaagtctcttcattaaaatcacagctcattattacactatttgtatatcagtatatgaatctaatagagataatgtggccggaacggaactgcatgcataatcatgagtttgtgccggaattgtaaattttaccaattgttcaatcaagatttattactgaattgtggaaaaaaactttttatgcaaaatggcgtaatgagttttttcagagtaaagtttcgtaatctcattcagacagtagagtaaaacctctagaatcaagatttcacttcaagaacacataatgaagttcccaatttcttagagctagtagccattatctaaatgttctctttgaaactatatacagtatacttaaacaagtcatgctagtagtcatcagtggcggagctaactcataaccaaggaggtcagttgacccccataacatttaaaaatacttacttacatctttatgtaattggtatataatgacataatttggcttggttcttctcaactgacccctatgactcaccttaaactaataattgatcctcataataattttttctagctctgccactggtagtcatactcattggccgacggtattctatgcagttctaagatcaaagaagtagcttctttagcatttgcatagttgaggaccacaaccttctcgttttctaagtccagtcttaaatcctcggtccagcatgtctctaccaattcagttagatgttttagattttccacttgaactccattcacttttattacctaaattcaccataaatatatatttttggtcattttagtaaaccatagacctcattctcgagacactcacgagtgcaacactatgattctcttttgttttcatttccggtcataatactttataatcaaagctggaatgaactttgatacgaatacttcttatttcttgatttaggaaattatttaggatttccattttcataattatttttctcatagagttttgtttttacgtttcattataagtaagcatgaggtttcttttgtgagactcatccaagctagagagtgctttggaggtttcaagcgggttaggccgagggaagagaacatagttctattttgggaagtttatactcttatatatccttattttcagtttaaataaagagtgttttgggtttaattctggttccagattcttttctctaagaaaactcatggtgcttttgggcagcctctattaaagagttgttcaatgaaatgcattaattaccttcaaattcttgaaatcagtgtatcctgcattgatgtcgtcagctaacacctacaccaagaagacaaatccagtaagtctaatgccttcatgacaaccaaacatccaaatatttttatcttagttcaaataacgaacctaagaaattatgacaagctgttcaccagccttttcaggcatatatttaattgcacaattgcaaatcaaagtactgtcaatgtatggctgtgtaagaggtacaaaaacaaagcctgcgaagatgtaataacttggaagcttatcatactgatgccctggaacaaggggtggcacctggatccaatagttcaccacaaaacgagttttgaagtcgttcagaaaaaatgtgaaccaaaaattaaaccgatatatataaaattattatactaaataataagaaatgacttacgggttttaccataatgtggaactcatgctctttcccatctctcaaaacttgaagtaaaactgtttcatctaatttcttcatcgaaacaaaatgattgaaattgattcgttccttattccgaaaagtaactgcatgcaacaaatacaatctcaattatccatcacacatggagaaactttaacaatggttttacaatatatataaacgtaggattacctttagcatcatttcctataagaacatcatcaattgcgagaatgatgtcatcttttcttaaccttttgtaagcatccgacagagggtttatttcgtttataagaatccctgtcatttcaggacccatcttaaagtgattacggagttgagaattctccataagttgataggaaatgtctaacgtgcagaaaccaccatattgtccattttcttcaacagcagttaaaaaatgttttattactggagtcgggattatgtatctgcaagtgaagttaaaccacaaaaatatattatttcgaagccaaaacccttttccacgttttcttcctacttcctagaccattatgcttttaatattgcaaatttaagcagatgaattatccaagatttgtggtttaaacgtaacttaccctatattatctgcagatggatctttttgaaaagctacacctgccattttatttcctatgattgctggaccaccactatttccagggtttatagccgcatctgtttgtatagcgagtagtgtagtgcctccgtgagcatatcttgtatattcgactctcgaaacataacctttagtaatagaaacgctatcaccacctgcataacataagtcattattagtccatgcaagttttaacctatttattcgacccgtttattttttgtaagcattttaccagtaggatagccaaatacggccacagattcatccagagatggtatctctccgagttccaaaggtatcatatcctcccaaaactcttcattatcgatctccaaaatggccaaatcacattcatgtccaatcgctcgaacttgtgctttgtattttgtgggtgagccatgttttctaacttgcaaaaatatgtgatcagcaactacatgagcgttcgtaagaatcttttttcccgagattacaaatcctacatcagttccaaggatcagttaggaaaatacttatgcgcgcgactcttaaaagagttgataagaattatggataaacatcaaataccagagccgccggattcttgctgcggccaattccgccaaggttgcaaaacgctaggcatgctatagacggtgaagaccttcaccactgaatttaccgcaaaatcaatggaagaagatgtcacgttttctgccgcttctggttgttttgcgtcagtccctgatgcaagtgctgactcgctgttgtgcttattttcgtcttgcagttttacgtaaccaagaagaagcaaaggagaaaaacggaacccaagaaccgaaatgagcaagaagcggcagaaccgagccagtgtttgaagaaatcggaacaacatgttgagcgactacgaataggtttgagatttaaaacatacatgattaggagttatttatattgatattaactttcttattatcaattgtttgtggatacactcataatgtaaatatctcacatcattttcttgatttgtaatgagaaatacatgctaacatattatattgcacttaaggaaaatattaactaaagttaatattaaatctttaaacatcagtatatagttaatgaatcttatataatacaatatattaaagtttcttataaacaaaaagttttgagaagcttacacgtaatttctctcctttagatatgtatcattttttagatgggtccaatcttataatcataaaacaattttattttaagaatatctacaaaaaaaaaatttctttctgattctataaaaattgatctaacaattagaaaatttgttataagaataagaatatataaatatataatgtgttataataatttgatcattgcatacacatactattaatagacaaggaagaaatagacacgtggatttcactaaaccatattgtatcttagagtgtttcaatctcaaacaatggatatgtggtgccacaatctgctttagtcccggattatctatatcaaatctctttaaccgtagcgatagggtcagatcaatagacttaagtttatgacagtgtgcaatgtcaagctctcgagcagtggagaacaagaaagaatctgagcaaatgatttatcagtgagtttgcaagaactcaaggacaagtttcttaaggaggaaatcgaccatgagttccctgatgtgcaagtaataaaaaaaatcataatcaagaaactcaagagatagcttctccatgttgcgagacctggcgaaatcgatcaagatatcaatcttgtgttccctggtgcggatacagagatggaaactcatgattttgggagctgagtatctagctagggttttgtttatcgagttagtgtctgcactacggcaatcaatgtagagagaaggtgtttcggaccatacatgcctccatcgcttggacaagacagaggttctgattgcgaacttagtcggaataaaggaggagattagttggagaatctcgtcgggtaaagagctgataatgtccacaccgtcgatttcatctcggtcattctgttttggtggtgatcgccaccggatctttaataaatggttattttatatatttatagtggactatgcctaggcccgtcccaagaactatgcatctagttcttcatttctgaatatggtgaaaacagccgattatgcacccaacgatagcctgcggtttcagtccagatatgtactatatagagcaggcaaaattaggtagacgtacgataccccagacaaaaaccgcaatcacaaagcagagcggactaaatgggatgggttagggatagtccgcattgacacccttaaaaaccaaccttcagctagagaaatttggatgtaaaaccagacagtaatcgaatcattggtacttaaactagagaatctattagtcgtgtaacaaaaattagaatacaagacttaaaggaagagagagtgtattgatttggtgagagaagacaaaacaagttcctgaaacatagagaagtgtctacattctcaagtggaactttctgttttctgtttcttggccttctcaatcagaggtttcaactgtttcttctcagcaagaagtttgaggaagttgaacagaaacggaatgtagttatgcttcctcctaatgttctctgttctccatttcatgaacttctcttcctccattacaatcttatcactcgcagcctcgatcccactgcctacctcagcaatcaacgcattaactgcttctgcttcgcttttgtccacacaagtattagcctgctgcaacagctgttccctctgcctttgaagctccttgagttccgcagtgtagatatccttcctgtttttaatgacagccaaaagattgaacctgatctcgctctgtgagtacctctcaatccgttcttggatcactggttgaaccatttgcagccactcgataccagtttggtctccggggcatgggccaagactgataggtccctccttgagcccatcaagctcgtacaagactccatccacaggtatgtagcttatgaaatggtatacgtcatcgtcttttgtagcagctttctgttcctctgggacaaatggctcaggccttgcgaaactgttgtgcgcagcccggattgaatcactgttattgatagccaaacccttgaggtcggatggaaagttcttggtgaattctttcagcgctgatagttcaggcccgatgtcaacctctggagagttcaagaggatagcaaggatcgcttgggttgcacaagcattgttaatgacctataaaattggaattttgagaacacgaattaaaagacaatactattagtcaaaatcttatgcttatgttatcgacacaaacctgatttgcgaaaaataagttcgaaacttgatcttggatcgttggacgctcatctttttccccagcttgccatttgaaaagaaagatcagaccgtatacgggtctacaaggaagccacacggttgaaaagcatttatcaagaaaggcatagataagtaagaaatctaactcaaagacttcgaggtctggctcaaaagaatatcatttctgctccattcaaaaaagagtccagaaacatcacaaggaaataaataaccatggatgcaactactcacctgaggttattgagagaatcagaatccagggaatacaattcttcaacctacaggaaacacaatcaaaatcaaaagggatatccaagtggtggaaactgatgctagaaataattgcaatagccaatttcatctattgagaatgcatttggacaacgtaaagagacgagtagggatatcactatcagtatacgacagaacaaggcatgaaacaacaaagacacttacttgagaaggtaaataaaggacgagtaagaaaaatattaaaaaagttccgattttttttttgctgcagagtacttaaatttagacaaaaacataacaacttacagcaaggagcacaatacctattctcaacattcatttcatcaccattcctatacgtctattccttagattcttaagagacagacatgacttgataaagttttcactcatcatgaatatatttctccgacaacatgtctcatgcaaggctatgcattgctctatatcccaaaaaaaagttaagaggataaattataacagttaattacctgcactcctttgacttgcatttgttgaataagctctgtaaatacacctgcacttgcataaatatttacatagatataatcagaacacaaaagattgatatacatgtaatgcggcaaatcatacatagagatattcccattgtaattgactacaccagagaatctcaataaaacagactacagacagttaaagtgtgcagaaaaccactcaagagatctataccaaataccaacacttttgtttactatataaactcaaatatcattcaagccggatatgaactatctacaggttactatgaactcttcaacagatgcagctaaaataaccttagacccctaaaaaatactccccaactttgagataatcttcaatgtttaaaatagtaccaaacccacacacacagatcacttcagatattctcacatcactattcactaggagcataaatttcacaacttttcatcaaacaaacaaaaaacatggacttaacatctaaagcatcgagtttaagttctaataaaccattcaatgcagtgagaaatcaattaaagcacaaacccaaaccccattaagagacattaaacactaagaagagaccaacgtaccaggatccgactcaatcgtgcaccaagacatgacgaaactacctgaaaatcacgaagggatcacgttataagcaccgcaacaatacaccaaaagagtagaagcctgacggaaattgtggaggcgaaagatgaaaacgatgaattactagttagctaaagcaaaggaatcgcctttgaagcttcttcgaaccgaatgagatagatttggagattgctttcgtgactccaatttgggaattagggtttaactttgccagagctcgattatatttttatttttgttttaaatagtcgctttgtcgtgttgcttttcctggtttagtctctggttcgtgggttcgttcgtaatcttatcgttggacccttaattcatatatgtgaaaaaaaacatacgataacaaaactgaatccaaattcatattcgtaagttggttaattggctaatttgcaaaataatcactacgttgatccatagtttagttttgattgagtggttcttaatttcatatgcactagtaaattttttggtttggctaatatactcgaccctatacgccacaggcgggcaagccagtgtactcagcgatggaacatcttacttgagtgcagtacctacatatgtgattaaactgtcgtatagagtaacgaatgaagaagcgaatcagataaagttcagtcaagaagagacgatgttggacattatgccttctttaagacagtaacaaaaagcttttagtaccagtagtagcaaaacttccacaaagctttaatgtcaacatactaacactactactacaagtaacattataagcttgtttcttcaggttacatggtaaaagggaatgaaagccaacttctttcagaggaaatctttcattggatcctcatggtgaactctcttcattctgtaagcttccatctcttccggagtcacctgcgatgaaatgagagattttgattaatcaacactaaatcaagaatatgatacaaaatgttattagagtgttaagattggtttagatgatcattacatcgttgttgtatttgacattgtatttgcgtttcctctcatctttctcttccctcctactgagatcctcctgtgcaaaacaaaaaaacacaagtgcttaagataaaactgcaggacaaagaaacgtctgtgcaagagaatgaatgagactctttacctttttaagagcattagcaagtgcctcctcgttcaactccaaatcttcaggaatatcagttccccatgacgccattctcttctcttcaaccttctttgggctctctgatcaccaaaatacaaaaccaatgttacatggtgtaaaacaacattacatatgcagaaatacgtttctttagacattcctcaggagcattttttccattaaatgcaaccaaaaatacataaggaatagagcttacacagaccttcagttgcttctttgcgagcaatattagccttcatcagatcaagggcagcctctgcagcttcaattccagcagaacctgtgcagtaactattgcgaatgatctgctggcaacatttatatccccattgatgatctttccaatatgatccccacacactagtgtgattgttagcatgaacatcttcttcatatttactctttggcaatatcacctcctgtacacaacaaacacgttaagaatgaaacagatccacacaaaataaacgtatcatagctgttcatatcacaataagaatgctacaggcaactgactcaagaaggaaaccatcagaaaccatacctgtccttttataatcctccctgctcggtcatactcaacttgcctttcgctttgcccaagtaaaagctccattggaatttcatcttctgtagctgcattcccgtacttgtccatgattgtgtcctttgtctgagatttcagtttctcctttgcaacctgaaagctcttatagagcaattcagcttgggaaggagccgcttgcatatgcatgtcctgtcccttgtcaaatgcttcccatgaatggatgtttagctgtttgaactccaaagcttggccactatttctatattgattatctccctgcatacatgatacaagtaaaacagatggttggtattttataccatcaaaagatatgatacaaccacatgatccatgatgatcatcaactgaccagataaaacttgtcatttggatctgcatctggaagtgggtcttcacgcatagaacgagttttagggtcataatgagctgagttgacatcgaggttcaacaggtattttgcagtgtcttctctgatacgcagattcctgaattaagagaggatgacaccattagtgcatcaagttaaagcaaacagccaatatgtgaaaagagataagatatcttgtagatgaagaatgatgagtagtccatacctaaccgttcctgtgctaccaccaccagttgttctaacacgcttttcaacctttgcaaaatccatctgcctgctctcatcaaccttggcttcatcaacccttaagtcatcttcgtcttcttccccatcactatttgcatcatcacctttttcattattgtttttctcctcaagtttcttaagttgctgctccttcaagtacttctttcgtgcatcctcttttgcttcataaagatctatcacacgatggtaggtcgaaggatcataaccattccatctgtccctcttgccatcgtagtcaagttcaaaactttcaattttctcatcaggtgcaatgttcatgtttgtgtacttcgccccaatcttacgaggcctatccatacaagctttagcagtatgcgtcattgtaccacagcttcaaaaagaagatcgcccaagttagataatggaactaacgaaaatcgtttttccactttcaatatagccaaggtttctccaaaatatacaaacattcaagggaatggatagtaaaacaaaaaactgaaggtaaagcatccagccaaggacatacttttgacacgctcccttgcggtatttttcagcttgaaagatctttgcacctctatcataccacgacttagtgtaattgggatcactcttccatttcctttgatgcttcaaactctgttaaaaccaaccaataaaaagagtattcagtgtgcatgtaaacatggcagttcagagaagcaggtgaaccaaagaaggattttagcttaccggtttttcagaattaagataccatggagcagatgacatatactgcggaatatgaggattaatttcctttccatcctcatcaacctcagctggagcaagcccggctttacgagcttcctctaattcaatttgcttcctatggtcttccctagacttaaaagcaactgcaaaaaagtccaaaaacatatgtcagaaagataaaaggatagaactttaagaaaattgattgctaacaaagaaccaaatcaataagaatagtgaactttgaatcagactcttaagaatcacaatttgaatctaaccaaaaccataacagagagagaaccaccaatcacagaaagtctcaaatcaataagaatagcaaaaatttgaatcagactcgtaagtaaaacaaaatggatgtaaaaccaaaatagagaaaatcaatgataatacaacttccaaaacagtaagaaccttaaaattaatgatacaaaattacgagagtatgattcgaaatcgagatttttttaccaccaaaagggaaatttaaagctaaattgaaaaccagtttcaaatgaattagaagaaatgttgaaggaaatgggtacctgaagccgtcgccattattatacgatcgtgaagcttcgacttctctctctgttgcgaaaaatctgaaggaacgaagaagaagaaatggctacggctttattatggttaaaatcatgtgatagattgaaatgtgatcaaatatgggctgttaaaaggcgtagaggcccattcattagcaaacaccactcatttaacccaaaaccaaagcaaaagcgacgccgttttcgccactaattattatccccaagaccaaacaaggaccagatttaaaaccggatatagtatagtagaatcaattttctaagtaagagatttcagtttacttttcttttttttgattgggttgaaaaatgtccatagaaagagaaaaccatggtataaagttctccaattaattgaatataatgtaaatgggcatatatgaaccaacctaagcttgcaagcttaaaaatgtaaacaggtctaaaactaaacaggcctaaacggctacttgttaaattgccagagcctaaagaggtcaagaaagcatgttttaggtgaggatttgtttgcttttaatctccatttttataggtaacaatgtattttcaatttgttcaacataggaaaaatatgcatgttatccttcattattacaagcataattcttataagtccagtaaatttttcataaaacttaaatcctcatatgactcgtttgataaatcatctttaccaactagtcttttaagtatttaacatttgcaataatcgttcaagaacaagatcgatggtttttatccattgcagcaatcgggattcgaaccactcgagttatccacttcagtgtcttttaagaattgaacctcacatccatttggaaacatgagtacaaagtttcgaagtattgtggttcctatcttcattgaccaccttcaaaccatatataaggtatattacatgtaagtaaaaactttggctgcaagcaaaaataaaatctaatcacaatcattagttaatgaaaatgaacctgtctctagacaaatgatggataaaaatggccatttgcagcttagcaaactcagctcctacacattgtctagagccagcaccaaagggaatgtaagtccgagagacgatcgcgcccaagtcttttccctaaacatttagtttaaaatttctatgaatttgtttactaaatttgtagtaaataagtaaaagatcatatgacattcacctcccaacgccatggattgaatactaaagggtcatcgtaagtttttggattgaaatgattgtttggatagcccatgaagatccaaccagctggaattttataagaaccaacttggaactcatgatcaaatattctaaatactgttggcgccgtgcttgtgatcctaagggactcattgatcacctaaaacaaacaaccatatttctatgagctacttactatgtattagccaatcttatattgatttaaactcaccatttgggtaaatgtcatagatttgtactcttcccatgttatgctggtctccttctcagtcttaccccggacaattccctcatgctctctatgcaactccttcatgactttagggttgtcacttatgagctttattgtagctgcaagaatacgtggtgttgtttcgttagcaagcagaaataaggtgtatatgtactcgatcgcattgtctacgctcattgtttccgctccttcaaagatgatcttgaagaactcccctaactcctctcctgatgctctcttcttcagtattgtctcctttagtaagtgaagcatcctctttcttgcctgcaacgaaacatcatcctcacggcttggatcattaattttgtagaaaaattactacaattaaggttactaaaaacacctactttcatcattttataaacaccagtcccaggaagattgagagggaatctaaaccagccactcggaaaacatctccaacagagtgcgagttctttcgccgcctctggttccatgtcgccggtaactttctttgcaaggcattcaattaaaatctgtaacgtttaaatatacaaagatttgagatcatccaatatctagtggattgcaatatcaacaagagtacgaaatggataacttttctttaccttgcttgatatttccttgacgtcaagacaacctctcctagctccttcttccatgtgtgtgcgagtcaagagatcgatgtcttgcatcacactcaatttcaaaccttgtgaacctaacaactggaatgtcaagtttcggacatgtttatgagactccttgctctgaaaaaacaagttgttttctccaaagagttgtgctatgctctttgtgagaccaggagcatggtttgtctttgctatctccatatttaattcaatatccgtcgagattataactttggctccaaataaacttgtccgaaaaattggtccatatctattattttttccatatcgaaaaaaaagacaacgttacttaagtaagttatgagttactgcatgctagagaaaattaccaaatgaacctgatgattctctccttgatgaatgttggaaactgaaaagcgtcatgaggcttcatgaactcaaaagtctctccaatgatcggaaaacccatcgaccctggaggtagtttttcattaggtttcggattcttcgactgatatatccaatgaaatagcttcaccacaatgagtgaaaccatcacagttaataactcataaacttctaccatatcaacttatttctttcttcaatttcaactatttcgaagatgtaagtggtttatggtttaggggtgcatgattagagggagtagtactctccttatacttgtgatctctcgtcgattggtaaagtatgtttatttcagatggtaaattgtttatataagaaaaaacattgttgccttgtgtttaattaaaagaggtaatacgtaaaactgcaagatagcttgtaatttgattttgtcaactcacacacgatgttttaaatttaattaaaactggattgtgacaaaatagcagctttagtacacgcaagtagataaaataaaaaataaaacaacccatgaagacaagtattgcccagatttccaaaagagaacaaaatcatccatgcaaagctaagttcaattttttttaatgaattgatgctcatctctagattatatattcgctacagcttctctctagattaatccgtcaatatcatcaccatcagcaatttcatcgtttgcccgcatactgtttggtatttttgaaagtaaaaagtaaacttggtcttagattaatttttaactaaagttttaaacaagtgaaatgaatttaagtaggacaaagcaaaccaaattaagtatcgctctaattaggtgccaatttcactaagtaacttttttaatttaaatttgttaacaatgatttttaactgaagtatgatacaaaccaaaattcaaattgtacactctatccacaccgatagcgttcaagaaacatatgtatcgattaccttctaatccaaatatctgaaaaagataagtagtctagatagtcatttatgattctttcaacattagttattgaaaatgtaattcgaaatacgacaataagaatgtgccaaaaaaagaaagatgagactggtgttttccataaagatgtagttatcgaaatttgttgtacttatagttttaactatatgtcgactttgaaaaaacggagtctgatttcaacttagcaatgattttttaacaaaaaaaaaaaaaaaaacttgcttcactcgatgtgtatataaattccatcagttttcggatgataaaaactctaagactgtttccataggcttctagatccatagacagtatcccaaaagctttgttttgctaagagaacaaaaagtttaatgcaaactttatcttgtgtaaatggacgttacgaatgtatcaaatacatatctttcaaggtatgatatttatttattttttggtcagaaaggtattgtatgatattaaacacaggattttgaactgaaatacacaatacttatcaatatatatacttatcaagttagtcttttttactcccaatttgaaaaacacgaaagagtaattgagacctatatatgtcttaatgaagccaacttgcccaaatttatttcactataaatttgaattatgctatatatccaatgattacaaagtttgctgttggtatatcctactccttgaaaacatactttgaaataagcattataaattataaccaagcctatttcagttccagttggtatcttaacgaaactggattgttaaagttgaaacatgtcaaaaccaaagagtggtttcagcatttgatcttaagctagaagagatcagaaagatgagattgcctccaacgatgctgagggatccatatgttcttggctattattgggtctatttgggcttttgtatatatcgacagagtcgtttattgtattaggttaacacaatactcttgtctaaaaaggattttgccgtcacataaaataaaaaagtaaaatactttttcaataaaccgactcatatatgtcgatacaaacaaagacccaatatgttaagaacaaacacttaagtagttgtaaaaggttttcataaaagtggtctcgacaatcgttgagattcattcctttaacgaaaatggttgaattggttccaagaagcttctcattggactgtatgagaaaccccactgagacaactaagattggtattcctcatacatccatatcctaactatccttctgattccaattgtgcaaatcccttggcttgaagcatttgatgcaattgcacattggcaaggttagttgatcacaatttctactagctactatataatactcaacgttgtcgcatcaacgatattttggtcctcatactcgaccttgttgcattaacgcttgatagaatttcaatagaatagtttctaattccaaaaactatatataagttattacttaagtcaaatctaaaaattagatttttagcgcatttcataatagagtatttcttctagttggtaattaataatcatttgaaatctcgagtttaacctacaactttttgtcaattgttttactaatttgcatatattttgcttgaattttgcttatgtttgttaaaaaaagtcttttattttagttttttatatgatgataattttgttttgatagagttatgaacttgtagtaaacaaaatcatcattaaatgcacgaaaaattaagtatcatgtataaccaaaaaccaagagtcaaacggatgatgatttgagaagttttaaagaattcaaacggttgtttgtgctctattatgctttgatttgcaactcttcttcaatgggcttatgggcacagagcagatatatatcattgatatattactatacatatacagtatcgtgtgggccggatgtgcatcatcatgaatctaataaaaattaagtttatagtataacctttttctaaatgatatttgaactcttcaactcatatacaaaattaattaattcatgggaccttccttcacgttttaagtttgttataaaataagtaaaattgattcagtaaatcgtcatgacaaacctgatttacgccaagttttacgttcatgcgattattttcagaactttatgcatgttttcaaccgtgcgattaaatttcaacgaccaagtaatccaccattaacggttacattagcgtacaaatttcgccatcaatctaattccaaattaccttgatttagggaaaaataagaattaatatgctatacgacaccgtatgatgcaaccagatataaactatggctctaacggttaaccgtaattaggattcacttcgaaataaaactaaacaaaaaacgaaagacttcaagtgtcttatagtatttttttagacaaagtaacacgtggattaatacagttgggcgtattagagtctttcacgggatttgatcaatctataaactactataagtagcccatcttaccttacttaatattatcatttatcacaatgacaattcttgtcgtagatcgatactacatgctcatgaacttactctttgctctaacttgtctcctcttgaacttaactcattgctttagccccaagaaattcaacatttcagccgccacgaccagcgattctgattggtctatcgccggatctacgtggtatggtaaccccaccggatacggaagcgacggtatatatatattcgtgttatgtcaattacagctctagataaacaagcaagaaactaactatatatttaaattaattactaaccacaatatattgattaattataatgaaggtggagcttgtggttatggaaatgctgttgcacaacctccgttttcgaaaatggtatcagccggaggtccgtcgttgttcaagtcaggaaaaggatgtggtgcatgttaccaggttactaatataattacaatattaagcggaagagattaagaataaatgaaagattagcttatatactgatttatttacgttcaggtaaaatgcacttcgaaatcggcatgttcgaaaaatcctgttacggtggtcattacagatgaatgtcctggatgcgttaaggagtcggtccatttcgatttgagtggtacagcgtttggtgccatggcaatttctggtcaagatagtcagcttcgcaatgtcggagaattgcagattctttataaaaagtatgtatctaaggatttggcattagtatattactacaaagttattctatactaatttagtaaggttatatttacttgttatgtaattgtgtttcattggtatgtgtgtgtgtttagggttgagtgcaactatataggcaaaacggtgacatttcaagtggataaaggttcaaacgctaactccttcgcggttttggttgcgtatgtaaacggagacggcgaaattggccgaattgaactcaaacaagctctagattctgacaagtggttgtctatgagccaatcatggggcgccgtgtggaagctcgacgtgtcgtcacctttgcgtgccccgctctctctccgagtgacttcgttggaatccggcaagactgttgtggcttccaatgtcattcccgcaaactggcaacccggtgcgatatacaaatccaacgtcaacttttaagactagctagaactaaactaatcataaagtataaataatatctcttacttaaatgttcaatcccgtgtggtggcaataatataaattaggtctagtgtgctcaaatgtttgttcatttgagttgtggtttatacatatgtcatatatatgtggtaagtttacgcctttacacagaaaacttgtatccagggtgatatactttataaaaggaaaggatttttaagctaaaaaaaagaaaagctaatgtatttgtccatataggcaagtatacattaatgaatatggtatcaaatattttgacttacataaatgaaatgatgttatttatttacaatttttttttatagcaagttaatacatgattttgaaatcaattaccaaaatttatttaacataaatcacattttgttttcctttcttgaatgcatttatcgtttagacttaagttttaccttaaatttacctttcgtacgtgatgattggagagcttgattttccatttgtaagaagtgactcagattttagttttcgggtctaagtgtgggagaaactcggtgaaagagagggttcgaagtctgttgtgactaaagtcataacacgtgaggcgagctgactaaagtcataacacgtgaggcgagctgactaaggtcataacaagcttgagggcgttttggtcttttcgcatgagctctgtaactatatcttcttcttcttctctgtaattctgttagatcggagatagagaaagagagagaattgtaatcaagttctagagagaactagagagagaaaacttgtaaagatacattgtaaagaaaggttctagtggatttccggagagattctccggcgagacgtagcgattccggttgaggaacgtgaactcgttaaatcgtgtgtgtctttgtttctttaagttaggcgccggtagcaccggtactaacaaaattacatatttgtaacaatatatatatatatacacacatacattttagaatagtaaattctttatatgaatatatatgatgcttaaatgtgtatatatatatggttatatataggaggagcttgtggtttcgcagtggctaatccaccattatacgggatggtttcagctggaggtccttcagtgttcaacaatggaataggatgtggaacatgttttcaggtttgtatgaatgtatatagggcaagactcaagagcatagtgttacgtatgtaacacagaatttatgcccttttggtcagctttgttaatgctttttaggtaatatattagttagaatagtattttcagaaaagatgatacaattttatatatatgtagctaagattgttcataaaacgtaaaaaaaaattgtgtaattatattcaataaaatgaccagttcatatgtcttttttaattaatcagaatgaacattaaaaatttgggttggaaaaaaaattgacatagcatgcaagatctgaatgtatgttatatggttacaacaagattttactttcatcaactatatagtatatgttaacatttttatttatcagattctatgcaatgggcatccagcatgctcgaggagaccaataacggtgacgataaccgacgaatgccctggtggtccttgtgcctctgaaccagcccactttgatcttagcggcaaagccatgggtgccttagccagacctggccaaggcgatcgacttcgatcggctggtgttctacgtgtttactacagacggtacttatatacttacataatttttgttttaaaatttttccttttagtatgtatatctaggttttgagttgaattttttttttttgataaatcaaagaaatcaatgttttcatttttgttattatctttacagaaatattatttaattaaaattcaactattttctatgatatacgaatcaaaatattgactattgttttttgatcagcgtggaatgtttatatcgaagaactaacatagctttccgtatggaccctggagcaaatccgtactacatttcatttgttgtcgagtatgaaaacggtgatggagatttggcctatatagaaattcaaccagccgacggagaattcatccccatgcaagaaatgaggtctgctgtatggaagatcagctctggcagtcctctaacaggaccattcaacatcagacttacttctgctgaatctcataaagtagtcctagcttataatgttattccggcgaattggaaacctaatgaaacttaccgttcagttgtgaactttaagtagagttttctttgtcaaatttgaaatccgacacatttcattgtttttctctagtcaaactacaatatacaaatctttttttttttggccaaataatatacaaagcttatgatatagtaacgaataatagaaagatatatgacttaccaccaatatgagcgcatatattatattttttgccattctctaaatcttttttcatcaaaagaaaaattatcgacattatgctcattctctagccagtgttacaatacctttcaaaggtagccttcctcctgaaactggttgtacaactacaaagacttcggtttggtatataacttgaactaggaatttgtttctttgtacttttgattcaggaccttacttcatgaggatagttctcaaattgttacagaggactgtcacaagttaagtacatgaatcttctttgtgtaagttcttttagcgtttcttttctacatgtctctctcttctcgcaaaaattcagtttgttctatatatctatgtctctttattatctctttcatgttgcttggaatgtcttaccataaggtttatttattgagtttggtctttgctttagaataccagaagtaattgttggaacaagtaaatctaatgcaaatttgaattcataactaagatcttggagttacctccaatttaagttgtaagtagttaaaactgaattttggagtctaccttcaaccaattgtttgcttaaaagaaggtaaggtggagtggtggacatgctctggttttaaaaacttacaactactatactttgaattccacctatgtacatagtattgtatactttaatatattaatttaaaccaacagtttattatacaacaaaggtctgagacacaataatgtactttagaggagaactatatatgagtatgtgactatatctgacaaaattccctctgtatatctcgatattaattatataaaaaaaaacggatctataacctaagacgaaatttgcaactactactttgaatcttaataacattattggtagccaagctatcaacaaatacaccacatctgaccaagaatcttacttcgaagagcttcaacttcccaaatttgacccgaaccggttggtttactctaattctcaatggtatattcccggttctttgttgttgctcttctaatgtcgtccttaaacccgatgcattttgtgtttgaccagtcatttctacgtatatcactgtcgtattttcatgtccttggtaaaattttggcaacgaccctattcaaaaaaatcacaaaagttcaatgaagttaaatctataagaagacccggtttgaaatggtgtaaacgaattataatcaaacaagaaaaccaaacaacataaataaatatgtttagttttggggttttcagtccggataaaccggtatgatccaactctaccaaaaacgattgatttgaatgaattaactctattatatccgaactattgaatatgaaccgaacaaaaactatctaaaccaaattttgtttgaaactaaagatatacagtatttgacaatcctaatccaaaatgaaagtaaacccaaagccaaccaaaaaaatttagacatccctaatttgaaaagagttttaaagtcttccttgtgtacgaaccaaaccaaaggaaaagaacagaaatcaaccaaataaaccggttttgtagtgagattttgaagccttcctacgttaaaaaaccaaaagaaagcaaaccggagtaaaccaaaagtgacgtaccattgcttagttgatgttccatgtaccacacggtaatcttgctcccatcttcataataaattccaatcttctcgttcggattcttagcggttatagtcacgttaaaagccgtagtcaaactcgagtcttggttcagtgcaaaccgggtgagctgtaaccggtcaatagagtaatccggtagcttcggtttaaagacaaggtatagtataccaatggatgcgcctactgcaacgacaagaagcaaaagaaagcagaacgtgtagcaaaagcatctgcaacaacaacttcttctcttctttggaggagccaacggcacgaaccgttgtggcctttggttcaaagggactttggatgggtctccatgttctgatctagaggaaccacgaggaaccaaaggagctgttggacgcgctgttgcggcttctggatcttggaccggatagattttttggtgttgagacatttttggaaaatcttgatgacaccaagaagaagaagaagctttgtttgtagatcttatttaggggtttgggaaattaatataagtagggaccttatggagtttttaaagtcaagagggaagaacttttcaatggagagacttctctatatgaacctatagattatgaaaaacaagtacattcgcttccatacaacacatcacacgtgtaatgtgaatttgcgtgtctgcttaggtagcggtcttttatggaaattgagtttgatgtgaacccatcaaataaaaaaaataaaaatcattagtaggtatcaaattacttgcaatatagatggaaaaattaggatgactttttggaaaatacatatattgtagtcctatacattatcaaacaactaaaagttatatccacttaagatattttccaattactatttgtttctttttatttcctataattttttctatttactcttttgctctttcatgtttactcttcttgatttatttatatttcatatataaatggtacttaatctacaaaataaaatttcatatatttacgcctcgcattgtctttgagaaaatacaagtttttaatatttagatcgcatatagtttgactaataggtacattataaagtcaaaatacatttgatgaagatctactttacttttgttgacctaatcccctaagacttatgcagcagtgttctcatgcatttcgtcatgaattttttttcttttacttttttgttaacatgctttattttattattttttttgcaaataaaattccattcgaaatccctaggccccaacgatgttaatttatttgtagtgtttctgtttaatattaatcgttatcaacgaaaaatttttagaacgcaattcttttgttcttcatattaataaccaaaaatcaaaagcttctgataacacttactatgaaaaatttcaagaaataaatcacttaatatgaagaatattacattggaatcgtaaaagaagacccaagactccgatgaaatcagaagtgtttggttttggcgagttattaccaaaaccaacgacttgtatgatgcgactatgggagaatgacatattaagttaatatctatattgttgtcttatagaaaatgtatgatgcttctaagttttaaatacggccatttgttgatgttgatagatttgatgatgtatataatccttctagatgaaattgcaacgacattataatttgtaagataccagaaactaattcctcttttttttttcttttgcaatttgaatatctataaaattttggttaacaataaaagttttttttctaatcaaagaatttgtggtctagtagcaaacctaggtccgtccaaaagattgtatgatttaagtttccgaccaaaacgtttaagacataaaatatcatatagcttttgtccttaggatacacaaataagacaactccagacatcaaaacaaactatccaaattgtttacaatcaaatcttctctttgtttttaggctttgaatgagagaattagattttctcaccataactatattcaatcaatgcactacgggtttcaacggatgggctctcagcttcgaaaaatccagactagcatcaagctcctcgtccagctccccgataacacctctgatcaaagatgacaccattttttttattgaaacaaaaaaacaattgcaatgttagaaaatcactgatgatgatggatgataagaattacatgttgtcccctctgatgatgtacaaacccaacacatgttgttgtactccttcctgcaaagatgaagacatagtaagaggtctcaatcctaattccaatatccatcattttaacagaactctgccttcacaccaaaaatatccaagaacatttgtctaatgaagtatcaacatgacctgacatactcttagtgtaaacaagaaaacagacatgaatcaaacctttaaccctcttacgaaaaaaaggaggtgatcatgtataattaattacacactgccaatatctacgtatttgacttacctatcactagctaaatcttttgacatatgaactcacaagattttttcaatcagttataacactcgaagaatactaacactaaatctgtttcggtgtatccaacactatctgatttagatacttccattcagaggccagttagttcatgattcactattctcttaccaaacaaagaactgtaggacaaggcctatcttaaatatctgagtaagtttcctcaatattctgttgaaaagatgacactacgcaactaaatcaagcaatgtacattattagcaagaacgtagtaccaattaaaagatcaataccagacgacgaaagatgctttgagtgacaatgaacaaaagataaactagcatccttatagtacctctatttttctagttttatgcgatcactacaaacaaaatatggagacatcgagaactctgctacatcatagccactcatggatacaaaccaacaaggttttgcaggtcatacactggccaatttacttgcagaaaaatgtatttgcacccattcaatttagtaacatcgaaaagttcagatgaaaatactttaaaacaggaatcagaagctaacctttgtggaaaacacacgttcatgagattcatcaaggattatatttgtagcctggtcaaaacctttaagaactccctgaaaaaatataaaaatcgatctctttactaagatacttgcattgacataaggagttctaaaccagatatcacacaagagagtataacataccacaatgttgcgtccgtcatttgtaatcaccgaaataatctctgcagcaaccaatcaaaagataagatctttagacaattcatgtgacagaacatcacatatcaatcgagaatggcaaaaaaaaagactaacttacgatcgacgagagtctcaagtccagtagttgccgccatgttacagttcggaaattatttgaactgaaaggttactaaaaattagactaggaatttcatcgaacacttggtgtgcttacggataacaatgaaaaattaatagatttcgtatccatctcaacgagagatttcaccaaacttaacataaatccagaattacgagaaacaaatgataattccagtgtaatttgacctaaattaaaagaaaccaccgaatagaaaacgaatgtaaaacaggttctggttcaccggagggtttcaaggaattcagaagaagaaacgtatgagggaaaagctctaacctttgctgcttcggaatctgaaaatcgttacttggcggagattctgattggtaaagaaaccctaaaaaccttttcgtcactgttgttcttagaaaactctccggcgtgtgtttttgcttttggatgttgcttttaactacgaaatgttaaaagaaatactcaaaccgaaccgaacattttatccggtttagttattttatccgaaaccgacaattctgaaaattttcacctgaaccgaactgtttaatccaccaagtatgcatggttcggggttcagatcggattcagtttagattttttggattcatccgatacaaaaatttagtatatatttgggttctatgattatttggttcggtttttggaaaaaactacatattttttcaaaattttaataaaaattgaattacaaaaaatatataattttgtcatttagtttaggtataatactaagaattttcggatattttggatatatataatatatctaagatatttttggatatttttgttaattggttaaggtataattataatttaaaacatctaataattttgaatatgtagatattgtttcgatttttcagatatactgtttggtttttgtttctgttcgggttcagttgggataattcgtgtaaaattatttaaaagtctctccggttatatgattatttggtttggtttcgggtccgatacaggttttttgggttttatgccagactgaagataagaagaagattcattgaaattgtcaaattgacatctgaattacaaaataaaccaaacaaaggaaacaacaatagacaaacaaaacaacaatttctccatattaaaccgcaacaacacgagtttctgttattgctaaaagtgaatctccctagtcacgtaacattgttgctaccagatgattcctccaacgaaccaccacctctcttcacagtcacatacttctcaaaactcggttccataagatcggctttcttcaccgtcgatgtgaatctaaaccggctcgaatcagacctcaaacaagttctgttcgtcatagagttaagatcagccactgcttcaacaattgaacaagctttactaacacacaatggcagcgaaatcacgctatcatcaacactcttcccatgaaaactctgaatatctttcaacaacaatgcagtgtaattgttatcctcgtttgataccaaatcgaaatctcgagatttcctcaacgatctgcttctgcttaacacaacttgaggagctttcgtaagttctacaacagcaacacgactcgggcttggacctctacttgttcttgaattaggtttcacagattctatcatcttcttagtgttttgatcaatctctcccaatggatttcttctatagggagattgttccgcctttcttgaattactccggcttagcgagggaacattattccccgctctagccggagattttgacctcggagacgccgctattctgcaagcgtctccgatgtttctcttaaccgtaatccgttttactaacggctctacattgttactcttatccgttgcaggaatcgtaacaaactttcccggtctattattactcgaatttaccgaactgccacacgaatcagcgttacgaatctcagaacgtttcgccggagatctactcactctcctactaccaccgccgccaccgccgacatttcctctttctctgcttcccgatctttctctttctctactcggagttcgtcttctccgttcacgaggcgaaccatgcactctctctactccacggtgacgatttcgctgcattccgtcttcctccgccgcatcgccgccgcggattctctcgttctggtcaaaatcaaagcttcttttagaaccagagtatcttcttgttttagcagcagagttgcttctacttagcttcccacattgtatcaatatagcatcaacttcttctttagtacagctagagattctcacaagcggtgtagaattcgatttctcagccgccacaggagaagaaactggagaatctttatctgattctgtcttcttggatctctcttcatggcttcttgtgtgttttatcaccacaacttcttcttcttcttcttcttgattcagtttctcagatttgggttttgcttcttcctccaaaggctcaatcactggttccatgggtttgattggatctgagggtttaacactagagggaagagaaggggaaggtttcttgctgagacagcaacccattttgtgacaaagaattttgaagaacagagagattttgaagtagaagtgagtcaagaacaagagagtttttaggggaatgtcttttgtgtaagaagacaaaaagattcaaaacttcaaacttttttgtttggtaatgcgatttgtgacagacaaaagttcttttatttcagaaagtattcggataggacccattactttctaaaattaagaaaagtcgggtgaaattgtaagctttgaagaataatggggtcaaagtggaattaatttattttattaaagatagtaattttgaaattggagccgttatacacactgcagtcaatgtcgtattatctctgaccctttttgcctttttcaaagcaaaatggttctcttcaaaaattcttttaataagttttagaattccaacggttatttgcatgtttgatggttttgtttgtttaccaaaagaatatgaggttacaaattaggatatgaagaaataaacatcagtagtttctattgaaaataaaatttcgttttatgtataaataatttactgagtttgattaatgatatttgttgttaatcgagtgctttcattaatattaactcatgtgaccaaactgaatggtgatgtgcaagtttcttcatatgtatagtggaggacccaaaaacaattttattttattttatcagataactaaaatactgaaaaagaaacgataaacaatttcttttgaggtagtttttttgaatatatatgtagttttttaagaaaagagtaccaagacaattaggttcttttgaggtagttttttaagaaaagagtatatatgtagaaagcaaaatcttgcaccatttgtgttgacaatcgaaaatcggaccgattttgagacatctatagattctattaccaagacaattaggtactggattttacatacataaaacaacctcaaatcaaatagtaacataacaaaggattgttacaaggcaaataactactagactagagagaataaggcacttaattgttcctctgcatccaagacatcaacctttaagctatatacatacacaacgatgaccattagcaatagaaactagagactctcaatgctttgaaagctatgcaaatcagaaattagtatcaatgagaatcatccacatatcctgcgacctacttaaaagggtctacctactaggtagtcagaaatataacaagaaacagaacagaaactagacactgcctaaagttcacaatgcttgaaagctattaaaccacaaaatggggcaataagaaccatatatacagatgaccataagcaatagaacctagacactctcaatgctctgaaagctatgcaaaactcagattggggtcaaccagagtcatccccatatcctgctacctacttaaaaagtctagctactagctagtcagtaagattacaagaaacggaaccgaaactagacactaccttaagtatgcaatgcttgaaagctattaaacaacaaaatggggcaatgagaaccatacacacatatgaccataagcaatagaaaactagacactcccaatgcttgaaggctgttcaaaacacagattggttaacgagaatcagacacatatcctgcgacctacttaggttctagctaatcagtgcttgaaagaatgaaagctattaaaccacaaaatggggctatgagaaccatacacatatcctgcgaccaagttaggttctagcaagtcagaaagaaaacaagaaacagacttctcgagtcacgaccttggttcctttgatgatcaatccatttaagtattaagctcctaaactagtcacattggtatcaaagataatgaataaatccataggtaacatcataatcacacttatatatatctaagaaacatcaactacaaatcgtaaaaacactgatacttagagtatagtaagtttagataaatccataacagagacgaatttacttgtacgcaacaacatagataagcaacaacgtaaatcatgataatatgcagaaactgaaattcacaacctcaaatcaagcagcttccttcacaggagcaggagctggagctggaatcttaacataacccaatttcttcaagctagcagcatcagattcatcattctcataatcatcttcttcttcctcaaaatcatagctttgacgattcacaacaagagcccaaacaagatacatagtagcagcggttaaagcaccacaaccaacaccgaacaaaagcgcgacgacgacgctaagaatatctctggttcgatctctaaacgaattgatgttatcagagatcaaagggagggaacgatccgattggatctgtggcttctcgtgacgacgattgacgaagaaaggaaccacgtggtgaggatttagacgacggattgtgaaaacggtgacgaatcgtgtggaggtgaaatcggattcgaggttagggttttctggggttattgagagggaatatgaggagattaggaaggttttgcaaggacgtgcggtggtgatggtggtgattgagaggaaagctacgacggcgatcgcaaatcggaggtacgatgatgacgtcattgttatcgtctttgacttcttcttcttcttctgacgattttgaagacaaacctaacccaagaagattcggtgaacgaagaagattaaaaagattttctaagatacgtgttattatgaaataacccctctacttttgtatttgatcatataggtcccttttatcttcttttcttataaaaggtgccaaaatattatttaattttgacttaactattttaagtctaaatctcattatttatactcacataagcaaacaatagatttatttctctatttatctaattttcaataggttaattgttaattgatatgaattttgtccaagttatacaagttctaataccacaaatagtttgtgtaatatgtgaatagtctgaacccacctcgcatataatcaaacttctagtagttataaattcataagatttttgttattctaagcaagttaatgatgcattcatggtcaatatcaagttaaccatttgtttattaatatagtatagtcaaactttcacattttatatttattagtcaatattaatagctaagatttttttacctaattattatggttagagaatctaaatgaaaattctatctagtcactcatagtctcgtaccatagaataagagcacgacactttcgaatattccaacttttctcttatttaaaataatcctctcctttcttgtaaacaaagagctaggttagacttaaatttagcagcggtcacagagcgataaaggaaaaaaatgacgatctcaaatgccacgacatgacatgatagaatctttgaggccagccatgagcccatgaggatcatccttcgtggcaaagccagctcacgtttagagtctttaacaatgtagtgagagaacataaaaatgaaaatgtcaaatcggtgtaaacgtttggacacatagtttttattttttttggtctttccacataaataatttggtactattgaaaagcgatagaaatattttttttttgggaaaattgtggtagaaaaagtaaaattcccttgtaatctttaattataaaaaatattggttaatagttaagtactccgaaattaaaagtaatttgaagaacaactcactatataaacgactattgttctgaaatcaaatgttcaaacaatatttacgtgtattttcattttaatattttaattcttttcaaaaaaacacatttgcaactaaaacttaattctgttaagattaatacaatctacgacccgtcataattggctcgtttaacacgtaaacatgtcataatctaaattccaaaatccatttacgtatcaatttaattaactctaaatccacaccaaagaaaaaactcagattttacactgtgtatacacaccacaccatagtccacgtgcacgtaggttaattatttataaaaaaaacacatttgacttataaatatagaaatattaaaacagattcgcttctctctctcactcacacaatagagagaatcattcagttacaagaaaatcgtcctcttctctcgccgatctcttctcttcagatcctctcctctataaaatctctccctctctcgttcccctcctcagatctgactcaaatcaaatcaaaaactctcagctatggaagtcgaacgatcgaagaaagacgacgatctaaacaatggatctaaatccaacgaagaagaagaaatctccgtggagagaatcttcgaagagagtaacgaaatcccaccgccgtggcaaaaacagctcacgttcagagctctaatcgtgagtttcatactcgcgattctctttacctttgtggtgatgaaactgaatctaacgactgggattattccgtcgctgaatatctccgccggtttgcttggtttcttctttgttaaaagttggactaagattcttaataaagctggttttcttaaacaaccgtttacacggcaagagaatactgtgattcagacttgtgtcgtcgcctcctccggcatcgcctttagcggtacgtttttttgtttgttgatgtgaacgcgtcgatggaatttggtgtcgccgtctttaattttgtttctatttacggctaaaacttttttgctgttaggtctctattgaaaatgacagagtatatacttcttttttgtgtttatcgctttctaaaaaaaaatatgaaaattaaataaactatatagttgtttaaaaaatataatatgtgcaatagttaaaaaattaaaaccgatcaagttaaaacctagactaggaaactaatatcacacgatcttttttgataaaaataaatgtgtatgggtttgatacttctttgcagtatgtcaaaatcaagtggatacttcatactttctttagtatgtcaaaatcaaagttgattagtgagtgacgtgagagattcatatccgagagcaatgtgtatgacttttttttttgttataaaataagaaccatatctacacggcaagttgatagagaacatgacgcgtgagattcgtatttaggtctaagtcaatgatgttttagcatatgattagttgattacggcacttaattaggagcttcaactttttatttatagtagactagaattagctgttatttttctggatacttacgttagagattatattaacaaaaaaaaaaaaaaactaatccactatcgtttgacttcttactttgcatgggataagattggtaaactaaagtgagaatcacaattttttagaggataattatgactttcatatttttaattaaatggtgttgtcttgagaatttaatatttggaactattttcgagatttgaaacagacatcaccactcatcgtgtacacatacttaatgcatggagagattgaaattccaaggaaaccactatttttgattctcacgtgattcgttatgacgtcaattttattttaataagagttgacttgctatgcccaccatgtgtgtcaaatgggaacctatttggcacatgacctttaatttcatactattatataggaactttagtttgtggtatacgttatgattagattttggcttggtttttaatttaaagaaatcaattcacatctaacatgttcacaagatttaatacctaccttaacaatattttgtgtttgctaaccataactaattttatagttacatgaatgaaatttgtttccaatatgtttggttctctcttggtgtatttacgaccatagtttggcttaaagattgtgtgtttgtgtttgaacaggtgggtttggtagttatctgtttggaatgagtgatgttgttgctaaacaatctgcggaagccaatactccgttgaacataaagaatccacatttgggttggatgataggatttctctttgtcgttagctttcttggtcttttctccgtcgttcctcttcgaaagatcatgatcgtggacttcaaattgacatatcctagtggtactgccactgcccatctcattaacagcttccacacacctcaaggtgccaaactcgcaaagtaagaatctttcatcatgcccccattacaatctttcttttgtctgttgaatattgatcactttttttttctctatgtataacacaggaagcaagtcagagcattgggcaagttcttctcattcagtttcttatggggtttctttcaatggttctttgctactggtgacggttgtggtttcgccaacttccctacatttggtctcaaagcctatgaaaacaaattctactttgatttctctgctacatatgttggtgttggaatgatttgtccatatcttatcaatgtgtctcttctcatcggagcaattctctcatggggtgttatgtggcctctcattggtgcccaaaaaggcaaatggtatgctgctgatctctcatcaaccagtctccatggtcttcaaggctacagggtactgtgtctctcactctcttttccttcatttcattcaataagagtttacaatcttaagttgtgtttgatgccctcaggtgtttatagccatagctatgatcctcggtgatggtctctacaacttcatcaaagtcttaggccgcactgtcttcggtctatacaagcaattcaagaacaaagatgttcttcctatcaacgaccatacatcaacagcccctgtaaccatttcctacgacgacaaaagaagaacagagcttttcctcaaagacagaatcccatcatggtttgctgtaaccggttacgtagtattggctatagtctcaatcatcacagttccacatatcttccatcagctaaaatggtaccacattttgatcatgtacataatcgcccctgtcttagccttttgcaacgcctacggttgcggactcactgactggtccttagcttccacttatggaaaactcgccattttcaccatcggagcctgggctggtgcatctaacggaggcgtcttagctggacttgcagcttgtggtgtcatgatgaacattgtctcaacagcttctgatcttatgcaagatttcaaaaccggttacatgacattagcctcaccaagatcaatgttcttgagccaagccattggaaccgccatgggatgtgtgatctctccttgcgtcttctggctattctacaaggcgttccctgactttggccaacccgggaccgcctatcccgctccatacgccttagtctacagaaacatgtctatactcggagtcgaaggattctctgctttgcccaaacattgcctcatgctctgctacatattcttcgcagcagcagtgatcgtaaacggtataagggatgcccttgggccaaagtgggctcggtttatcccgctcccaatggctatggctatacccttctaccttggaggttacttcacaatagatatgtgtctgggaagtctcatactgttcatctggaggaagctgaataaaccaaaggccgatgcgtactcttctgctgttgcttctggtttgatctgtggtgaaggtatttggacgttaccaagctctatccttgccttggctggtgtcaaggctcctatttgcatgaagttcttgtccatggcttccaacaacaaggttgatgccttcttaaacccttcttaacattcttttttttttttttagagtttggtttttaattttctacgtttctttgtctagttttaattggctttttaggtcctcatgtgtctgtctttaagttggtggtttcttttctttctactcaaatatgtaaaaaaagggaatgaatgaattatttggttttctggtttctctgttcttctcttcttactcttaatactaaggagaaacaaacttgaacttaatctgagactaatgtagctaagttaacacattgtagtttaattcaaactaaattaacacaatgagagtttgatagattgctcaaatctacttgaaaaatcttaaacatttggaagaaaattaaggttttacaaattttatacatgtcatagattaagtttggaggcaagaatacaaaagtaaatccttaccgaaaatgaagatgaaaattaaggtttatttattgaagatgactggtattcttaatagaaaaagaaaaggtagctttgacctaaacaagattcagagaaagctaggaacaaacatttggaaacaactctgcgaaagttctgacattatctcaatactaccattaccattggtccattgtctagcttaaatatatccttgttgtctgtgaagtaaatagagttttgaaggcatccgtaaaactcatgagccaaaaccgagaaacaagtatcggtagcaatcacaaacgcattgtctcccaatgacttaacttctatccattttgctaatgtaaagctctccacaacattccacatagctcttttccataaatatctatttgtgatggtttcaagaataatggtccgtactcagatgattttaagagaagaattaatcaaaaaaaaaaacaccttttaaatccaaggcgtaagttcgacctttgtggattatgattaaataaaaattgcttaaacctctatatttgtaacttgtaagtacaaacactatatatggagtatcagtttttttgtagtttagggggtgatattcaatcatagatcttagtagaactaaaatctagcactaatctactgttattcagttaatgattctaaattggatcttatatttgtaaatcatgtttaatagattttaaagtttggtgttattcaactaagattttaaattcttcataaaaattatgtgttattcaaaacttgtaaaaaatctttgtatattaattcatttgaaatgaagtcactttggagtttcatgtgtaaattattaaaatcaaaatcaaagatattttgaaattcacacaaacagattcttaaatacaatatcaggaaacaaatcttgacctttaagaattaactttaacttcatgattggataacaccaccttagggaagtcaacccaaaatctgtattttccagaaaaagagaatgtaataatcctacaaatatgaagtccagcacattacacgcactttatacaacaaatgatgaaccatgaaacaatttatggtatagaatctcattgaatatgaatgaatattatttagcaatttagcactaatattttccatttagattcaatgtattcgttttcattgttgggaatgggttgattttttatatatatatagtttcttatttctcaaaaagttacaaacacaaccaaagtagcaatactgataaaagagagaaatggaagtttggtctaacttagtgggagagctcttccacttgattgccatccgactgtttctccatcgtcaaactcaaacgtttcagtagcgttttcacccttggtgctcctatgttttcgacgtgaacaaacaaattttataacaattaaggaaaggagtgttcttgttcacaacggaaacagatgagcacaaagatgtgcagatgctactgaaaacgttttgactttgacgatggagaatagtctgatagcgattaaatggagaggctcctccagtaacttagaccaatctaccatttctctatttatccgttttactattttggttgtttatgatttatgagtcacataatatatgaatcaattaccgaatcatcacttttccagccaaattatcagttttagtacgtttgttaatgcttgttgttatcagttttggcaaacagaaagtcgtttttacccttatcatcagctgaagaaaaaataataatgttcttttttttttcagtagacgacaagaaatttaagctctcttttacttaatctcacatgaaaatctaaagagtggaaccaaaacccatattttgataatcatgtcaattggagcccttgggtttagtagatatcatgcccttagggtttagtttcttttattccaaagaaattaattgaatctattgaactcatcaaagatggtttgaacttttagttgaaacgtaaaactccttatatatttttttttggataactgaggtgattctaaagactttcgaggtccaaaaattaatcttggggtctagagaaaccatgttagatgttgaacccgataaccaatgctgctcgaaacactagacctaggcaacttggttaaactccttacattttaggctacaaatggtgtgtttttaacctttgaagaaattataaatataaaaataaattcacacatttcccataaattaaaatgaatacattaaaactaaatgcaaaatattaatgctaaattgctaaagaatagtacattaaaactagatgaaaaatattagtgctaaattgctacaaaaatatctattgagattctatttgattttataccattaatggttttcaaggttcatcatttttggaataaatccagtataatttgtagaattactaaatactctctcaatctcttataaaaaaaaaagttgtgttgacttccctaaactacaccaaaacagggaccccatagtggttgtacttataaacgtttttgtggtttgaatatttttgaagcattaataaataatttattatcagaattgaatcgattgacatgttgtgttggattagggatttaaagattttatttgtttgatttaggtgatatttatgatatttcaaagatttattattattattattatttaaatctcatcagttatttagtttaaataagaaattttggagtattttgtgcgatatcagcctttttttctccattcgccactacatttttttgaatgctattttaggttgttcaaccataacattaattaaatggtatgttcgattcaatggtagctcattatttacgccacgatatataacgttgtagcattttattgatactatttttttcaaataaaattgacacattttacattttatatttaatatatttttatatagactaaatttggtcatagatatatattttaaatatattttttcataaaaattacatataaagcataacaagtcttacaaaagagtaatccattttagctttttggtttgctattatagggcttagcattgttgaaatgctatgatatagttatcagattcaaatcccaaatactatctttaatagcaattatgaaaaccatgctatcctaatatgctattaatgttcatatttttgtaaaattcattaaagccatgtgagtctagcaagatgggaaataatatgatctttcgacttaaggattttttcaataatcttgatttgattcattaaacactcttactttttttttgacggttaaacattcttactcatagtgagaataactacatatccttgcttattctcacacaaacattcttactcatagtgtatatttctctttgcttattctcactatatatcctatactataacttgaaaagttctggcttattgtaataatgatattgactagcattcgttgcaacaacttattatataatgtggaacaaccattgccattgtcaatcacaaaatctaatttgagttgcagcagctacattcatcttcctcttctccacctgaacatactgaagataaagcgaagcggaattaattcagatataagaatctagggtgtgagcaatttgtgccggcataggaagtagcataactccatggagaaaggtttttccttactgggagacattagcttcagaaacttggtagaaaattgcttcatatagtcacaaaatttatataacaaatttgctacgactagctatgaaaaagattttgttctactttagaaagtttcaaaatgtttatgacaaagtatttaaatttttgaaaatacgattcttgttggcgccaatttgttagaaaaaagcaagttctataaatcgtgtaccaaatagttgataccaaaattaatagattttttcatattaatatcatacgttgtgtcaaacattcaaccctaaaaatcaaacccaaaagcaaatattcaacaaagttttgaaagcttatgaacacatttaccagtttgattagctttctttaagctaaataaagtccgaattgataagaaagaaaagaggttgtccatcagagaattttcatcacgaaatggcaccagtattgtcttcattatcattgttatcttgctggttgttctcattgcagacttggttcggttcggaatgatggatgtgacttcagccaatgaagatcattagatccaactctaactttttggtagaattgtcagcattgttgttgaagcaagtggccagatatataagtttatgcgccttgtgtgggctgagcagagcggaagttggtagttgctacttccggcatatactggttcatgtactcgaccaaagtggccagctactgctgcaaggtagaaacttttcgttctaaggaaattttaaatattacatcaacatagtttttctctttgctcatacatcgaatgatgttcttcaaaaccaaagatccttcattttcttagccgatacgtaatgcaaaaaacagacaatttacaatacattttcataaactttcatttaattacaatatgtattcataaacttaactaattgggatataaaataggagacaaagaaaatcagtattgaaaacaaatgattctcatactaagtatctacccaagttcattcctttataagtatacccaagttcattcaaagaacacaagaaaacataactcttgaccgtttatagaaaccatagaacatacatttcatcctcatcaagttgtgtgacctatgagcattcactggttgtcccattagaagcttgtgacctatctgcctttgaatttctacattaaatatttgtgcccttctatccacataaatttcatcacgtctacgatgagtctttctcaatacaagcaacatggaagactcaattctttctcgttgtctctacaagttaaataaaaaacatttagtgctaaaatatatcctgattataaagtgcacacatatggttaggattaacttactatgagatctcttacttgcttgagagatcttgctacaaacattgaaatttaaattatttattaatgtctcactttgccaccaaaacactgtatcagtaagtgttattggacattacagcaaaatgcagactttgacctttcgcaatgtttagagtcatatagtttatgttgcgacaaatatttgtagccattttttttggtttgtcacagtttgtatattttgctacaaataaaaattagtcacaaaaagatatttttaagaaaataaatatagttcagctacatcctaatctgtaagaaatattagcaatcgtttattacaaatttgttacgagatatttttgtgagaaattttgataaaaatatcttgttactgtgcacgtcaatcttctgacgcagtactaactaaggcatatctatgcttcatcatgataccggaaaatgaagatattttagttacgttgcattgctttgtctataaagatgaaaagtaattattttattagagatgattggtactcttaattataaagaaagtaggtttaacctacacaagattcaaagaaagctaggaaaaaacatttcgaaggaactctcggaagattccgactttctggtgatactacttccattaccattgtctagctggaacaccttaggctctaaatcctcaatgaagtaaatagagtttgggaggcatccgtaatactcatgagccaaaaccgagaaacaagtatcggtagccatcacaaatgcattgtctcccaaggtcttaacttctacccatttggctaattccttatctatcttgtaaaccttgaaaccagccgttcttgaaaattgaaataaggtcgattttctctttcgagaattctctttggggaggcgtttgataacgtaaagctctccacagcaatccacaaatctcatgtaatatctcctacagccattagtcatgttttcatcgagtgaagtttcgtaccttgacatttcaagatcggaattaatgcaccaaacgatgccttttgaatccaagacgtaagttactcctttgtgaactataatgtcggagaagtgatgacccatttgtttgaatccgttcaagacatttccattccagtagttgattgttccatccctaccgattccgagaattccatgatgatgatcatctccttccttcactttgacaagagcacttctttggtatcctggattcggtagtcttcccttggcgtccttaagaaccgcataagattcttgaatctcggagacagtgaaatccaaaagatcaaggctctcggaagaaatacgcaatggaaaacgtgagagagggttgaggagatggaatctcccggagttggtgtccatgtcggatttgattatccagcccttactcggagaggaggagagagtgactcggaagaaggctgcacgtgagaggaacgcgccggggttgcagctgaagacatggtcctctagaagggtctcacttggggcgatggggttgaagtcaatgagagggcgcctatggaaaggattcttcttcacgccggagacagaggagtgccatgatacacagatgctgctgaaacgcttgtattcaactagggagaacgatcgggcggcgataaaatggaggagctcctccggtaaggtagaccaatctaccattttgctactttgattgtttgtgatttgtgagtcacataatatatatatactacgtatacttacctaaaagtcctaacattttaggttccaaatggttgtgtttttaacttttaaagaaacaataaaatataaaatcaaaattcactcattcccataaataagaatgaatacattgaacctaaatgaaaaatatgagttctaatttgctaaagaatattaattcatattctattcgattttataccattaatgattttcatggttcatcatttgttgaattgaaatttaatagcagtacttaaagagtaaatactctctccatttgtagacaaaaatattttgggttgacttccctaaactacaccaaaacagggaccccaaatagtgtttgtacttaggcaaaaagatttaattatgtttcataggtgattgattatatattctaaataaacaaaaacaaaagcccaacaaatatatgagactaagacacaacaaatcaaaaatgaataataaatgttacaaattttagggttaaagcctttgtaaaaatgacttttagaatgacaatttgaccaactaacagaaaattattgattagtgtggcacccaaaattattacataaaatgtggccttggcacaaatcgtgtattgtttttgcgataagagaacaaatccatagcaaacgtttgtaacgcagtgaaaggaagattattagagcatccttattgatggtctcttaacacaattcttatgttaagagatatgtcttataactaacaaatgtctcttattgacttgaaagtagcctgggtctagtgaagtcaaccaaataatttcgatgtctttttccttgtttcttaagagatttattttttgctttaccatgccttttttattaattaattatgacgaatcataaacttttaaaaaatattgattgtaaataatttattgtataaaattactattggtttaaagtaataaagaaacaaattaataccaaaaataatatttatatttaaatattaattaatttttttaatatatgtgaaaactcataaaatcaatcattccaaaacagagagagtagtaaacttttgcggacgtgacttgatttaatgttttctacacttctgttatgataccaaagatgaagatattgtagttgctgtgtgtgtctataccgaaaatgaagctgaaacgtaagcttttttattaaagatgattggtactcacaattataaagaaagcagctttgacctaaaacaaatttcagagaaatctaggataaaacatttggaaagaactctgagaaaatcctgacattgttgcgatattacttccatgccattgtctagctcgaacaccttaatctctctctcgtcatctgtgaagtaaatagagttttacatcatccataaagccaaaactgagaaacaagtaacagtagaatcaaaaatgccttgtctcccaaggaattaacctctatcgtttcacctaattcctcttcgaacttataaccttgaaaccgactgtttgggaaaccaagtgagggatgggttacaatcaataccgacggagcctcgcatggaaacccggggaaggcaacagcgggaggtgtgatccgtgatgagtatgggacgtggttaggtagttttgtttttaatattggtgtttgctcagcctattagcggaattgtgggctgtgtattaatggcttgttgtagcttgggagaaaatatttagaagggtggtgttggagatggattcggcgttggttgttggtttaatatagttagatattagggatatttttacgctaacaaccctgatacgcttgtgtcatgactttatctcaagagactagatagtccagattactcatgtgtatatgaaggttgatcgccaagttagtttactatgtgtttactctattgcttggttttcagttatttaatgtatgtttggaggaagtttatctggttatgatagaggatgttagtgagatatcgatcccacataatgtttgaataaaatttatatttcgttattaaataaaatgtaggagaaaaatctcgtacaatctaccaaaaataatgtaacatataccgatgtgcgtacatagaagatattgctttttactaatttcggctttttgccactgagtaaataaaacttgaaagtagttattttaaataaatttctagtcaaaagttatcccttcaatctcaattggatatatctctcctttcttatatttccatttcggcttgtatttcttaaaattaaaactaaaactgatgagatttacttttcttttcttttcttttttgtttttaaaagaatacataacaacctaataaatctctgaaatatcaaatccctaatctaatacaatctgtaaatcaagttaattctgataataaattatatattaatgcttcaaagatatccataccacaaaaaagtaagtataaacaataaacactatatttggtgtttagggaagtcaacccaaaatctttcatctagaaatggagagaatattttgtaatgctacaaattttcaagtccaggccaaaacatgcatctatcccacaatgatgaaccatgaaaaccatttatggtataaaatccaattgaatttaaattattatttttaaagcaatttagcactaatatcttgcatttaggttcactctatgagaagaaagaaagggagtaagggttggatgcttctaaagctggatttagagaaggcctatgacagaataaggtgggattttttgtcagatacgcttgtcgcagcagggttttctgaggtctgggtgacttggataatgcagtgtgtttcaggcccggatatgagcttgctatggaatggtgagaagactacacctttcaagccattgcgaggtctgagacagggtgatcttttgtccccgtatttgtttgtgctgtgcatggagagactctgtcatttaattgaaagatccatcaatgctaagcaatggaaaccgattaatttgtcgcgtggggggccgaagctctcacatatttgctttgcagatgatctgattttattcgcagaagcttcagtagagcaagtacagatcgtaaggagagtgttggaagcgttctgtactgcctcgggtcaaaaagttagccttgagaagtccaaaatcttcttctctaagaatgtctccagagagttaggcaaattgataagtgatgagagtgggatacaatcaacctgtgattggggaagtatcttggaatgcctgttcttcaaaagagaattaataaagatacctttggggagatcttggagagagtttcatcccgcatgtctggttggagagaaaagacgttgagctttgcgggccggttaacactcacgaaagcagtcttatcctcgatgccggttcactctatgagtacaattctgttgccgcaatctattctgaatcgacttgaccaactatcccggaccttcttatggggaagtacagcagagaagaaaaagcagcacttggtaaagtggtcaaaagtgtgttcaccaaagaaagaaggaggtttaggagtcagagcggctaagagcatgaatagagcacttatctctaaagtgggttggaggttgctccaagagaagaatagcctctggaccttagttttgcagaagaaataccacgttggtgaaattagggattcacgttggttgattcctaaagggagttggtctagcacttggagaagtattgcaattggtctaagagatgtggtatcgcatggagttggttggattcctggtgacggtcaacaaataaggttttggactgataggtgggtgtcgggtaaaccgttgttagagcttgacaatggtgagagacctacagattgcgacacagtggtagccaaagatctgtggatacctggtcggggttgggattttgcgaagattgacccttatactacgaataacacacggctggagttgcgtgcggtggtgctggatctagttacgggagctagagacagattgtcttggaagtttagccaggatggacaattctcagtgcggtctgcttatgagatgttaacggtggatgaggttccaagaccaaacatggcaagcttctttaactgtttatggaaggttagagtgccagaaagagttaagacgtttctatggttagtgggtaatcaagctgttatgacagaagaggaacgacatcggagacatcttagcgcctcgaatgtgtgtcaggtttgtaaaggtggagttgaatctatgctccacgtgcttagggactgtccagctcaattggggatttgggtcagagttgtgccgcaaaggaggcagcagggtttcttttcgaaatctctgtttgaatggctctatgataatctgggggataggagtggctgtgaggatattccgtggtccaccatttttgcggtgataatatggtgggggtggaagtggagatgcgggaatatttttggggagaacacgaaatgcagggatcgtgtgaaatttgttaaagaatgggctgtggaagtgtatagagctcattcaggtaacgttttggtcgggattacgcaacctagagttgaaaggatgattggttgggtgtctccatgtgtgggctgggtgaaagtgaacacagatggggcgtctcgtggaaatccggggctggcttctgcaggcggagtactacgagattgtacaggagcttggtgtggtggcttctctctaaatataggccgctgctccgctccacaggcagagttatggggagtgtattatggattgtatttcgcatgggagaagaaggtacctcgagtggagttggaggttgattcagaggtgatagtgggttttctcaagacagggattagtgactctcatccgctgtcattcctggtgcggttgtgccatggctttctacagaaggactggttggtccgaattgttcacgtgtatagagaagctaatcgtcttgcggacggattagcaaactatgcattttcgttatctttaggctttcactcttttgatttggttcccgatgcgatgtcatctttgttgagggaggatactcttgggtctacccgaccaaggcgagttcgtttgtaattttctttagtttcttaataaatcacgggaggcaattgtctcccggtcacttaccaaaaaaaatgagtggattttgtttttatattttcttatttctttaaaagttacaaaaacaaccctatgaaattattaggtttcttgtgaagtacacgaagcgtcgtataagtaaatattagagatattatgtgactcacaaacaaccaaagtaacgaacgaaacagatagagagaagagaggaatggttgattgcgattggtctaacttaccggaggagctcctccacatgatcgtcctcctattattctccgtagtcgaactgaaacgtttcaggagcatttgcagatcttggcgctcctctacttcgggcgtgaacaggaacaatcctttccctagtcgccctcgcatccacttcgatcccatcgaccctagcgaaaccctatcatccgatgattcctacattagcagacccggtgcgtttctctcacgcgccgcctttttccgagtcactctctcctcctcctcgagcaagggctggatgatcaaatcagacatggacatcaactccgggagattccgtctcctcaacgttctctcacgttacccgttgcgtctttattccgagagcatcgatcttttggagttcactgtctccgagattcgagaagcctacacggttcttaacactgccaagagaagatcagcaactaaaggataccaaagaagtgctcctgtcaaagtcaaggaaggagaaggtcatcgtgatggagttctcggaattggtcgggatgggaatatcaactactgggatggaaatgtcttgtcggaacttaaacaaatgggtgatcatttctccgacattatagttcacaaaggagtaacttatgtcttggattcaaagggcaatgtttagctgataaactccgatcttgagatctctaggtttggaacttcactcgatgaaaacatcactgatggctgttggggagacttgagatttgtggaaggctgtggagagctttatattgtggagcgccttccgaaaaatacccgaaagagaaaagctggggacttttttcacaactcacgaacggttggtttcaaggcttacaagatggatgaggaattagcaaaatggatagaaattaagaccttgggagacaatgcgtttttgatgggtaccgatacttgtttctcggttttggctcatgaggtttacggatgcctaccaaactctatttactacaccgagaatacatggcctaaggtgtgcaagctagaggatggtaatggaagtagtatcatcgtaacaatgtcggagtcttctaagagttctttcgaaatgttttatcctagctttgtctgaatcttgtttagttcaaagcttgtttatctataattaagagtaccaatcatctctaataaaaagcttatttttcatctttatagatttcaaactttttttagatttctctcacaaacacgaatttttttggtcgaaacaataaacaaaacaaaacacatacttccaattctggagagattttctccctttctcgtatatctctctacccaaatctcttatctacgaaaatctcttatctactaccgttaagaacccaaatctactaatcgtatatctctctacccaaatctactatcattatgaaactgaggagacaatccatcttatcgacttctttgagacttccctttggatgtgatgcttcagcccgtatgaaaatctgtggttactacaggacatggctattcatatggattatgaagctgaggagacaattagaagagacactcaacgtgtctcgtttgacctctaataagagacgtggatgagtcaagacttgttcaagaacaacttggtgatatattgtttgccaagcatggacatggacgcccataagtttgacaggctacaaaacctagggattaatgtctttactcgcaatctcgataatgagatcagttgggattggttccaaattttctcatattttcattgaatttggacatcattgatttccttaggacatggttggcttgagttgtaagcaagcttgttctcattgactgattgcaagaaagaaactctgaataaataacatctcaatgcttcatcatgataccgaaaaggaagatatatttatcagttgtattttatcatagatatgttgcatcttctgtataatttttcataccgaaaatgaagagaaagataaggtttttattaaaatgattggtatccttacattataattaaagaaggtagctttgacctaaataaacattcagagaaagctaggaacaaacatttggaaacaactctgagcataaggatatatcgttgtctcgatactacttccattaccattatctagcttgaacaccttaatcatggtatcgtcggtgaagtaaatagcgttttcaagacatccgtaaaactcatgagccaaaaccgagaaacaagtatcggtagctatcacaaatgccttatctcccaaggacttaacctccatcatttttccttgttcatcatcaaacttataaaccttgaaaccgaccgttttcgcatactcatacccggtgtcgtcagcttttctcttccaagtactctctccaacaagtctttccacaatgtaaaactctccacaacattccacaagtctcctatctccggtccagtcaccaactagaggtccaaacctaatgaatttaagatcagaacgaatccagtaaacaatgccaattgaatccaaggcgtatgtttgccctttgtgaactataatgtcagagaattcataaccctcttctttggctttccatgtttttatgtcccagtacatcatcttcccggtactgcgaattccaagaacctgattatctccttccttgtctttaacaagagccactcttttgaatataggccttgtttcttttctcgtacgccagtcatgaacctgataagcttctcgaatctcggtgatagtgaactctgaaagatcgacacgcttgcgcgaatgctccatcggaaggcgagagagcgggtcgaggagatggagtttcccggagctgacgtccacgtcggatttgataagccagccctggctaggagaggaggagagagttacacggaagaaggcagagcgtgagagaaactcgccgcgtcggcgatggtcggtgagaggtttgtttgggttaggattgaggaggattagaggacgggtcctgaaagggtttttcttgccggcgccgggaacggaggagcgccatgaacggcagatgctacggaaacgtttgagttcaatgttagagaacaagcgaccggcgatcatgttgaggagatccactggtaaggtagaccaatcagccattgctctgtctcactttgtttcgttactttagttgtgtgtgagccacataatatatagtgaacgtttggaatttgaaaagagacgtgaaaggatttcgtatcccagcaattaaggctccaaaatccaaatggttgtgtttatagtaaatgttttaaaagaaataaaatataattaaaactttgacttatttcatcaataattactaaattttattcatacatatcctattatatcattaatggtttccatgtttattggtgctatgaatgcataatattttgttagattcgaaattggtaacaatttaacatgcatggtatgtgttttaacattttaaagaaataaatctaaaaattatccactcattgttgaaaaacataagtaataattacatttattctttcatattctattccattttatgtcattcatgtatgtcatgatttttaattgtgatgaaatgacacctcacttttccatgttttaaaaacatgattttttttttgtttaccatttagtgtattcatcaaatgttcaaaatgttgttaataataaaagtttcatgtttttacgattttgaaaatgtgattcccctatttcttaccatagtgttataattattagaattcataaataaaacgtcatttatcaactaaaatcacttttctgcacaaattttatcaactctactgttttactactccactataacattacaaaaaccatctccaatgatcacatctatatttttctctattatagaggtgactctattttagagacatggtgctcaaatgttcacctctaaaatagagtttcctcaaaaatagagatgaataatagacatctctatttatagagattaaagtagattaaagccaacgattaaaacccgttggcttgaaatacggagcacactattcgatagatatttttgcaaaattgacttgatttaatgttttgtgttgtgggaataacaaaatgttatgtttattgtttactattgtacatattgaattataagtttattgtaaacgatagttggagaagaaactattgattcaaacttttcagaatttgctttctgagtacatctctgttgggagttgggaccttaaagcaagtacatagtggaaacctaatttcgaatttacatcaaaaagaattttcacaaaaacactaactaacgtagatttgttcctaataggaggaaaccatgtcacagagtgagtttataggcaaatagatcccctaatcgatctacttcaaaatcctgctcttccttctcaacttccagaggttccacagagtcactacacgcccatttgtgatgtttgcatacaaaaagaatcgatgagaggttgatctttcttaatgtacaaggttgagtaatccaaacaagtattaacttacttggatggtactgaagacaacatttctcccacaaggttgagtgatccaaatgtcttgataacatcacttgaacaaaccaccgagctcttttcaggtatgccatttgtagactcaatagaccatctcatgggtacaactatatccctgcatcaatgtgaaaaacttagacgtacaaatgctttagctagttacaacaagttaggatgttatgtcagtgtgtcactcaccctctgatacatctggctttgcatttttctatctcatcttttgtatagttcgtatggtttaagtctagacgttttaatgcttcaggagcatcagatgatggtacaacatcccaaatcttcagaacttgatcatagtgaaaatcttccttaagaatgtctacagcccaaatgatcctaagaacatcgtcgatcttgctttgttttaacagctgagaggaagaaaccagattctctctctctgtctcttcttccttaagccaaccctgtgataacctttctaagaaattctttatcttcctgtaagtctccgggttcttaatttctcccacatatttcttgaattcgtcgctgaagcaaagctgtttcacatgcacaaagccaagtctcagagaagaagaataaactaaaagaacacaaaagactcatcttctccagcactatggaaacagccacgtttctgaagcgaagctgtttcacatgcacaaagccaagtctcaaagcaaagtcattaccttccattttgagttattcagtggcctaaactcgatattcgtactagcaatagcctgagctaatgactcgtcttctccagcactatggaaacagccacgttcctttgcgtcttgtatcagattcctccacacagacttgctattcatcaaagttgcctcatttccaagtatccataagcagaacctatagaaaacaaaaataataaattgaaagacacattcgttttcagtaaccaaagaaatgagatatgcctaacataccttgctcgagtgagtaatacatttgttcttcggcggtttccaaggaatccaacccttccaacaccgttggacctaacagttgaaactattataatatcctcttcgccaccttgaaacccatccacagtccgaatcctcaaagagaagagtcctcctgcatcacctatgcttgtttcctgaatcttttcttggattgcaattacttgagccttgtaaggggaaataacaccaacgtttatacgtgtctttgttttctctgaaactgcatttcataaacaaaaaagtctgcttcaatgaaccaaaaccaaagagagacaaactttttcatagacttctttaccttggagaaggttggctattatagccgcgaccacaacaacctcaacgttgtttttcagactacgtccttctccttccccatattcttctcgtccatatgctatgttgatgaaagagtagggtccatacatttctccaggaagatattgcttcgtgtagtttctttgcctgaccgttggagcatctaaaatcttctttccatataactctttgtttgggaagctacttatcgaacaatgcatccggtattggatgtttagcatgtatttcttatgtccaagaagagccagtctttcaaagagacttctcccaaatcctgcctctaaagcaatctgtatagttttaaacaaaggttaattaaggagtgggcacagtgagtatgagttgtgaggatacagagacgcatacttggctttcgaccattgcaggaagttgcctctcatccccaaccaaaattaaatgccggagtcctggaagttgcataggaatggatgattcacattcttttaactgagcagcttcgtcgatcacaagaagctgtatcggtgttccagtatataacctagcagagcatgatgctgtagagaaaagcaggcaagcatgccctaagcaaagttctttaataagatgcctatcacttacagctggaagtgggaaaatctcagggattgatcttaacagctttagatagtcatcctctactgtcacatgttggctgctgaatctgtcacttccttctccattagggataaggactgactttactccttcaccagtcacaccatctagtatagctaaaattgtaacatctctaacaaggtcaatagcttcatacatacgtgttgcagcttgagatgacagtaaagcagttggcaaatgtgtgcataaacttgagaaatgaaggtcaagatctttcctaagttcactgaatttctctggtagataatcctgaaatgattgaggacgtgtatcagaaacttgttccactatgttttcattttgctcatttcctttgcgtttgaagactgaaccagtgtctttccttttcacattgttagcccgtgccagattttccaagtatagattatactgtcctttcgggtcctcaagtaaacgtatcatgccatcgatagtagctttccacccgtaaaaaggcataaaacatgggtaaagcttatcaacacgttcatcaatgaagatgttaacaagatctttcctatctttaatcttcatcctctcatcattcccaaacaaaactacatctccaagaccatagttaccaatcttcaatgatccagagactagtttcaaaactctcgacgccacttcaagaacagaaacattcgttggaccacatgtcaaggttctacattttgcattcagtaatgtgaacaacaacacacttgttgtctttgtcttccctgtccctggtggtccccaaataagtctgacggtattcgcgtggtagcatcttctaacatccaaacaattcagtattgcatcttcttgtgaaggattcagcttgagaaaacgacgaggagcaagaccatcacttccttcttgtaaacactgaatgcaaaatccttcatcctacacaagcagaagccaaaaatgatatgactacaaacatcgaaagctattacagagtttatcaatatcttttacctcactgtttcttcgaaggactcttgagataagattcaagttcacaccttcatcaccaggatgcaatgcattccagatacggatattagtagttaaattgacgagatgaataccgaaaaggcgttctttcttctcattcttcttcctccttccatcctcaacgaaaagaggttttgaagccaagatagttacatcattaggcctatctggatctaccttacacactaaagcaactatataaggttcactggaaatattgaagccatcaacatggtttggtctttgatctgttagcgagataagatctctaggcatcaactttgtactagcctcattacttattccactcaaacgcactttatagaacaagtcattaggaagcttatattccgcagtttgcataatgtagcttatttcaaccacaggtgcttgccacaacttcctcatactcgacaataaagcggcatgtgtttcttcgataagcggaggaataaaggtcttgaagtagtctccggttgattcaaactccataggtatcttctccacctgttataagcaatcaaacacacaaaattactctctaggaagcttctctttactcaaatgggacagagaacacaagaaagtaaaacagaacctgtcctttataaagatcaacattgagaacttcgtcaagagaccatgagagcaccagatcgactaaatctcttccttcaatacgcattctcggcatttatattaaagttaccaaactcgatttcgtactctgaaagattaacgcaacaaaacccattaaacaagtgaaccctcaaaggtacgaactttacacttttggctataacagagaagcaaaaggaactatttttacgagaaccattgatcattgaaaggtaaagtaaggttttttcttctttgttctttttggtaaacaacgtcttaggattttgagattcgcaatgaaaaaccctaaattctaacgttggcttgaacattagagcgtgtggcaacgaaatttgaagatgatgcaatgaaattttagccgcttactttgaattcgagttgttgttgtcagagtttgattacttcgagacgaagaagggtttggttttgggagacaggaacagaggtttcttttagaaggacatggatgagtaaggatttggagggaaaggaggagaagaagtaattaactaaaatggtaaaattttggggctttcttgagttatttgtttacttacgggtctactatgtaaagtaattacgtttcgtatttaaccggtttacacgctttcgcaatctagcctatctacgccataagctaaacatgactagatagtcctataaggctatgacaataatgttaatttaaaaaaagaggatgtgttcgtggatgttttagagagaagctagagaagaagaaagcaatagaatttagtatattctaaaatctatttctatttttttttgcatttgcatagtcttcaacattaataataattatttgtattgacaaaattttcataaaataaaatctatgtcaaataatattataaagacaaaattttacacaataatacaaaattatatatgaattagaaaaaaatgttgaaggtaatatagcagttaacaatttcttgattcatttaaagagagagtgcatcaattaagagcaaatgttatgagatggctcaattctatgcaaaaataaaaagataaagttctaaaaatataaagcatggaaataaaatattgataactccttcaagtggtattgatgagtttatacgatctgaacaagtaagaatcatacaaaacaaatcaagaataacaacaacctatgattgcacctaatatttattgacaatattttggtgactttaaaggaattgtacgttgtaaaatcgtttatgtaacaagtctcattatttgtaataaataataaattttataactaaattttataaataataaaacagaagggcccataaatattttgtgtattgcttttgtttttaataactaaattttattagaactgtcatacaattttttttaaataatgtaaaatctttaaaagaaatttataagggcagccaaaaaacaattttgttctagaacccatgatagaattgaaccggtcatgatgcgatggccagtacacacagcactacgaatacgaagctctgccaaacaaatgtcattttgtagtctaaggttaatgatttacttgtctagcgaatgaaatagttgaagcttggtggtgtaagttaatttctttcatgaattgatattcgtaggaaaggaaagaaaaccaaaaaaaaaagattatttataacgagaaaaacacaaattagttttatatctctctgagacacgcataggcctggccacacacacacacaaataaggagtgttgacgagatttgtttcttttttgcgtaaacgaagaaaggtcagttactaagaaaattacaaaaacactgataagtaaatgtctatctaacgagttattttcttgtcatttgctaggtcaactctatagtgacagagtctatagatatttcaaatgcgaacaagaagaccaagaaaaccaagaaaaccaagaaaagacagccgaaaatgaaatatcatcaacaatgtaatatacagagtaatcgtgtaaataacggcacacatcaacaataatatgaatctccgaagataaaaattctcaaattctcataaaattccctcaagaagaaagaaaacagaacacgagaaactgtcctagagagagatgagaagtgtaccaaactaccaccattctttcttcattttcctcattttaattctgtttcttgctttctctgtttctccaaacactctttcagccacagaatctctcactatctcaagcaacaaaaccattatatctcctagtcaaatcttcgagctcggtttcttcaatcccgcatcaagttcgcgttggtatctcggcatatggtacaagataatccctataagaacctacgtatgggttgcaaacagagacaatcctctctctagctccaacggaactctcaaaatatccggcaataacctcgtcattttcgatcagtccgataggcctgtttggtcgacgaatataaccggaggagatgtgagatcaccagtggctgcagagcttcttgataacggtaatttcttgctcagagactccaataacagacttctatggcagagtttcgattttccgacagatactttacttgcggagatgaaattgggatgggatcagaaaaccggattcaacaggatcttgagatcctggaaaacaacagatgatccatcaagcggtgagttttcgacaaaactcgaaaccagcgagttccctgagttttacatatgcagcaaggagtcgatactataccgcagcggtccatggaatggaatgcgttttagcagcgtaccagggacaattcaagttgattacatggtttacaatttcacagcaagtaaggaggaagtgacttactcataccgaatcaacaaaacaaacttatactcgagattatacttaaactctgcgggtttattacaacgattgacttggtttgagacaacacagagttggaagcaactatggtactcaccgaaggacctatgcgataactacaaagtgtgcgggaatttcggttattgcgactcgaacagtttaccaaattgttattgtatcaaagggtttaagccagtgaatgagcaagcgtgggacttgagagatggctccgctggttgcatgaggaagacgaggctgagctgtgacggtagagatggttttacccggttgaagaggatgaaattgccagataccacggcgacaattgtggacagagaaattgggttgaaagtatgtaaagaaaggtgtctagaagattgtaattgcactgcgttcgctaatgcggatattcgcaatggcgggtctggttgtgtgatttggaccagagagattttggatatgcgaaattatgctaagggaggtcaggatctttacgttagactagccgctgctgaactcggttagtttctttcttatttgcatttactaaagtggttcttactttttgttttgattaaaaagttatgacccaaagtcaatatatcttcccaatctgcggaccaagtcatgtaatattgtccctctcgaagcaaagttcaaactccctaatctatagaggctttggtcaacaaagtacattcttgatgtttggtcaatttgtttagttttttttttttgtcatctgtttttaattagagatcaaaagattaataagagtttagctagatccaataccattataccaaaaagaatttttgtttaagttaaattaattattttgtttatttttcgtattaattttttttaatcaaacgtacaacaaaggatatttttcgtatagaagtaaatatatgcctcgtttttattgcagaggacaagagaatcaaaaatgaaaaaattataggttcgagtattggagtgagcattttgcttcttttaagttttgtcatcttccatttttggaaaaggaagcagaagcgatcaataacaattcaaacacctaatggtaaaataaatcattagctttcatttcctttatttttgtcaataaattttgataatcaaatgtcttgattgttttttttttttttaacgcctgaatgaaacagttgatcaagtgagaagccaagactcgctaatcaacgatgtggtagtatctaggaggggttacacatccaaagaaaaaaaaagtgagtacctagagcttccattgttggagttggaagctcttgccacggcaacaaacaatttttctaacgacaacaagcttggacaaggtggattcggaattgtttacaaggtaaaagtgattcaaaacatattgaaaatctaccacagcacatggtttcattgtataatcacatgtgtggtaatagggaagattacttgacggaaaagaaattgcggtaaagagactatcgaaaatgtcctcacaagggaccgatgagttcatgaacgaggttagattaattgcaaagcttcagcacataaaccttgtccggcttctaggttgttgcgtcgataagggtgagaagatgttgatctatgagtacttggagaatttaagccttgactcgcatctctttggttagtgactcaaacagcttctgttctaataattgaacatttttgtgaaaacgttaacttgttgttggttgtgttggatgtgtagaccaaacacgaagctctaacttaaattggcaaaagagatttgatattatcaatggtattgctagaggacttctatatcttcaccaagattcacggtgtaggattatccatagagacttgaaagcaagtaacgtattgcttgataaaaatatgactccaaagatctcggatttcggtatggcgaggatctttggacgggaggagacagaggctaatacaaggagggtggtcggaacttagtaagcaatcattcttcaacaaaacaaaaaaagagcttttatctcaagtccaaatattttcttaaaaacctcataacatatgagtttatattttgttatgcagcggctacatgtctccagaatatgcaatggacgggatattctcgatgaagtcggatgttttcagctttggggtcttgcttctagagattataagtggaaaaagaaacaaaggattctacaactcaaaccgtgatcttaatctcctcggttttgtaagctaaaaacctcttcaattcgatattgttttgcattcataatctgattataacactaaagaaatattacatcctttatgcacaggtgtggaggcattggaaggaaggaaacgagctagagattgtagatccgatcaacatcgattctttgtcatcaaagttcccgacacatgaaatcttaagatgtatacaaattggtctcttgtgtgttcaagaacgagccgaagacagaccagtgatgtcctcggtaatggtgatgcttggaagcgaaactaccgctattcctcagcctaaacgtcctggattttgcattggtagaagtcctcttgaggctgattcttcttcaagtacacagcgcgacgatgaatgtacagtgaaccaaatcactctctcggtcattgacgctcggtaatttgtaacttacggcccaatctgtttacatgcatatcattttataggtaagtctaaatagattttattactacatatatgattcgatatcttgctctatctaatttaatttagacaaaagattcaccacatgtttcacatgattttgatttagagcgagaattataaaaaaaaaacatttagacaaagacaaaaaaatgcaagatttggagttgtcactccaagatttgaagtttgagaccgaaactcaattaagtgggaattcagtaatgattaatattcactttttgtacatactactgataatagaccaatactggaagcgaacataggactttatggctattacaacagaggactttatgaaacaaatcgaatatataccttaaacttttatgaattcatcggtgaagcattctcttgcatataacatttagtatgtcgccagcaacattgaaattttgtctattctcgtacacacacacacaaatggttgaggatattatttttttggagtaaacgaagaaaagtcagttactaggaaattacaaaaccataattatcaatttaacgacttttaaggtcattgactcaattctatagtgacatagtctatagatatttcaaaagcgaacaagaagaccaagaaaatgtagctgaaaatgaaatattatcaacaatagagagaaatcgtgtaaatgacgttcacacatttcaacaccaaacatgtcgtaatctccgaagataaaaattctcaattatatgtacataaaattttcataagaagaaaataaaacagaacacaagaaagtgtcctagctagagagagagagagagatgagaaatgtaccaaactatcatcattcttacttcatattattcatcataattctgtttcttgctttctctgtttatgcaagcaacttttcagccacagaatctctcactatctcaagcaacaaaaccattatatctcctagtcaaatcttcgagctcggtttcttcaatcccgactcaagttcacgttggtatctcggcatatggtacaagataatccctataagaacctacgtatgggttgcaaacagagacaatcctctctctagttccaacggaactctcaaaatatccgacaataacctcgtcattttcgatcagtccgataggcctgtttggtcgacgaatataaccggaggagatgtgagatcaccagtggctgcagagcttcttgattacggtaattttgttcttagagactccaaaaataataaaccaagtggatttttgtggcagagtttcgatttcccgacagatactttactatcggatatgaaaatgggatgggataacaaaagcggaggattcaacagaatcttgagatcttggaaaaccacagatgatccgtcaagcggagatttctcgactaaactccgaaccagcgggttcccggagttttacatatacaacaaagagtccataacgtacaggagcggtccatggctcggaaatcggtttagcagcgtaccggggatgaaaccagttgattacatagacaacagtttcacagagaataatcaacaagttgtttactcataccgagtcaacaaaaccaacatttactcgatattaagcctaagctccacgggactattacaacgattaacttggatggaggcagcacagagttggaaacagttatggtactcaccaaaggacctatgtgataactacaaagagtgtgggaattacggttattgcgatgcgaacacttcacctatttgtaattgtatcaaagggtttgagccaatgaatgagcaagcggctttgagagatgattctgttggttgcgtgaggaagacgaagctaagctgtgacggtagagatgggtttgtgcggttgaagaagatgagactgccagatactacagagacaagtgtggacaaaggaattgggttgaaagaatgtgaagagaggtgcctaaagggttgtaattgtacggcgtttgctaatacggatattcgtaatggcggttcaggttgtgtgatttggtccggagggctgttcgatatccgaaattatgctaagggaggtcaggatctttacgttagagtagctgctggtgatctaggttagtttttctttgctcttttggtttttattttattgtttagttgactaataggttctaagccaaggtccgtaacataacggcttgatccactaggtccgaccatataaagagtatatggtccacaaagtatcttgttgatgtttggtcaatttttttagtttattacttgaagatatacaaaatactagaataacttatatatcaaaagattaatatggcttaagctagttccaataccaaaaaatatattaattattttgtttatgttattgaataatattttatcaaaaatacgtaagtacaacaaagtatactttggagttattattatgattgaagaaaatatatgcctcgtctttattgcagaggacaagagaatcaaaagtaaaaaaatcataggttcgagtattggagtgagcattttgcttcttttaagtttcatcatcttccatttttggaaaaggaagcagaagcgatcaataacaattcaaacacctattggtaaatcaacagctttcatttcctttatttttacttcaatttttgataattaaatgtcttaattgtttttttctgtgtgtctaaatgaaacagttgatcttgtgagaagccaagattctctaatgaacgaattggtaaaagcaagcaggagttacacatccaaagaaaacaaaaccgattatctagagctcccattgatggagtggaaagctttagccatggcaacaaacaatttttcgacggacaataagcttggacaaggtggttttggtattgtttacaaggtaaacatgactcataacttgttgaaaatctatcactggcaatggtttcattgaataatcaaatgtgtggtaatagggaatgttacttgatggaaaagaaatcgcggtaaagagactatcgaaaatgtcttcacaagggaccgatgagttcatgaacgaggttagattaattgcaaagcttcagcacataaaccttgtccggcttctaggttgttgcgtcgataagggtgagaagatgttgatctatgagtacttggagaatctaagccttgactcgcatctctttggttagtgactcaaacagcttctgttctaataattgaacatctttgtgaaaacgttaacttgttgttggttgtgttggatgtgtagaccaaacacgaagctctaacttaaattggcaaaagagatttgatattatcaatggtattgctagaggacttctatatcttcaccaagattcacggtgtaggattatccatagagacttgaaagcaagtaacgtattgcttgataaaaatatgactccaaagatctccgattttgggatggcgaggatctttggacgggaggagacagaggctaatacaaggagggtggtcggaacttagtaagcaatcattcttcaacaaaacaaaaaaagagcttttatctcaagtccaaatattttcttaaaaacctcataacatatgagtttatattttgttatgcagcggctacatgtctccagaatatgcaatggacgggatattctcgatgaagtcggatgttttcagctttggggtcttgcttctagagattataagtggaaaaagaaacaaaggattctacaactcaaaccgtgatcttaatctccttggttttgtaagctaaatacctcttcaattcgatattgttttgcattcataatctgattataacgctaaagaaatattacatcctttatgcacaggtgtggaggcattggaaggaaggaaaagagctagagattgtagatccgatcaacatcgatgctttgtcatcagaattcccgacacatgaaatcttaagatgtatacaaattggtctcttgtgtgttcaagaacgagccgaagacagaccagtgatgtcctcggtaatggtgatgcttggaagcgaaactacggctattcctcagcctaaacgtcctggtttttgcgtggggagaagttctcttgaggttgattcttcgtcaagtacacagcgagacgatgaatgtacagtgaaccaagtcactctctcggtcattgacgctcggtaatatgtaagattgtaagttatcgacccactctttttatataaaaatatagacacagggcagtaaggtctccacactaggggctgatactttgcatcagtcagtgataccttgtgtaacaagtttcctttgcctccatggaacgtatacaaaagttgtattcaacttcgttgtaaatataattaagataaaaagaaaaaaccaaagagggtataaacccacaaggatagctacaatttccggagatccggatgaggaggaagcatgataccaagcttgagaatccttacaaaatcccactactgcgatagcattatatttatagtgaagaaaaattgtgatctaagatgatacacatgttcagtgatcactgatcaatgaccaatttaagtatgtctgacaaatagcaaaagataataagagaaaagtcacaaaaggacgcaaaagaagcagacacacaatgttttaaaagaccaaaaggaataccaaattgtctgcttttgacaaagaaacagtcaaatttcacttaggatctttggggttagatgttgaaagttgaacctttcttctaatcttccacagtttctttagcttcacttgtttcctgcaaaacaaataaacagagaatattactgaaactgctttgaaatctcaaagactcatcaaataagccttacttgataggtttaggactcacagtttcctcttccacaacactgagcaacgcaaatgatctcgaaacatcgcttacaatatctttctttgaacaagaattggaatcaaccggccattgcattggtacaactaaatcactgcatcattgtgaaaacataaaaacataaatttctcatgtttcagattaaattaacaccacaaaaatttaactaactcacccttgagagcatatgtatcgacaccgacttatcttgcctttcgtgtatcgcctgtaatgtttctctagatgttctgtaacacgagaaacatcagtagatggcaaaacctgccagatcttcaaaacttgtacatgttgattattattcttgaaaatatctatcgcccaaataagacttaagccatcatcaaactcatgttgtctcaacaaattctcactttcaaactcaacctcttgatgaagctctttcccattagataacttctccaaaaagctcataactcttttattaatttccgagtctacgatcgtttccagagatttcaagaactcgtagctgagccaaaccttccatatcgaattctcaaaagaaataagcttcttgttttgaagcttattaagatcatcaagtgctgttgttgatctttcaatacactgagctaatgattcatcttcttctgcattatggaaacagtttcgtgctttcgcatcatctaccaactgtctccacactgatctattgttcgttaaagtcgcttcgtttccaagaatccataagcaatacctacaaacaaaaagagctaaatcaagaaactgagcatagctaaatcaagaaacagagaaaatgtttacatacctcgcacgagtgagtgctacattagttctttgttggttagataaaaaaccaatagctccattaccgttagacctgactgttgagattataatgatatcttcttcaccaccttgaaacccatctacagacctaacactcactgtaaatgtcccttcggtattatacttttcgcctatcctttcttggatcgcaaacacttgagctttgtaaggtgaaatcacccctacgcttatcgttctcccggtctttcttgatactaaagattacataacaaaacaaaaatcaacatcaaactttactttaaagactgatctgaatcaacattttgtttacctgagtaaagctttgagactatctcagccacaacagagacttccactaggtttttcgaactatatccttcaccaaactgttctcttccataagctatgttgataaaagagtaaggtccatacattttctcaggaagaaactttttttcataacttctcagtctcacagaaggagcatccaaaatcttcatatcgtaaaactctctgttcgggaaaatactaatcgaaggatgcattcggtactgcatgttcagcaactgtttattatgtcccaacaacaccaatctttcgaacaaactcctcccaagatcagcctctgaagcaatctgcacataacttattaagtaagcaaagagaagagagtgaatatgtgtataattagttaatataagagaaccaacattgctttttatcattgcaggcaattgcttctcatcaccgatcaaaatcgcatgttgaagtcctcgaagctgcaatggtatcgctgactcgcattcttttaactgagcagcttcatcaatcacaagaagctgtattggactactcatgtgtaacctagcagagcttgatgctgtgcaaaacaacagatatgcattatctaagcagagtttttgaagttcgaacttggatataaaatccggaagtttgatactcatagaaatcgatgtcaacatctccaaacaatcttgcgttcttgaatcattttcatcaccagtatctttaagcttatatttcattcttccataaccatctctcatgacatcagaagccgcgatgtttctaaggagattattagtctggttcatcttttccgccaccctaaaggagagcaaagaagttggtaaatggagacacaaagttgtaaactgatgatgcagatcatatcttagtctactaagcctctcctccacaaaatccttaaacgagagaagtgttgtatttacggatttgaattggcgaaactcgtgtttcggatcactgagcaaacagatcatacggtttacatttgctctccatccagtcagagccataaaacatctataaagctcatcaactcggtactcaaggaagacatcgaaaagatcttcgcgatcatcgattttcatcctttctttattgccaaacaacactatatctccgagaccatacccatcaaacctcaaagactcagagactaatttcacaagccttgaacaaacttccaaaacagctatgttagttggagcacaagtcaatgtcctgcatctcattttcagaaagttcaaaagcagaacacttgttgttttcgtcttccctgtgcccggtggtccccaaataagtttgatattgttggaatggttacaacttttagcttcaagacaacgtaaaatcgcgtcctcttgagatgaattcagtttaaatgaacgtagcattcgagctgagtaatctgagactacactctcactgttttctttacaagaaacacaacttcctccatcaacctacacaagaaaaatatttcaaaacatgattttggttctgttttcaaaacttaacttaattacctcattgttgctttgaagtactcttgaaataagcttcaagtttcctccttcggggtttggatgcaacgcagtccaaatacgaatatttgtcatcatgttgatcaaattaaccccaaagaaacttaagcttttcctctcaccctttcctctcttcgacgacgtttttatatcgtcatcatcgtcgaaaataattggcttagaagccaaaatagttatcaaatgtggattattttcattcactccacaaacaagagctagcaaataaggctcatgagaaaatctcaagtcatcgattcgaataggcctcttatcggtcactgcaataagatcattaacctctaacagattttgacctcctttggtcatatactcatttgtcatctgcaaagtaacctcataataaagatccctaggaggtttaaaatctttccctggcttgatttcccaaaacttaaaagcttgtgcacgacgtatcgttcccatacttgacaacaaatcagcatgtgtctcttcaataatcggtttaacaaatgactcaaaatactctttggttgatgtgaatgtgttaggaatcttccctacctaataaccaaaaacacaaaatccataaagcaactaagaaaaaaaaagagaattgttttaaagtaaagacaagagtcagaagaatacataacctgtcctctgtatagatttgagtttaacacatcacgaagagaccaagagaagacaacatcgactaaatctcttcctttgatgattttttccttcttcttggtttcttttgctacccataagtgctccatcgttatatactctgtttatgcaaatctcaagacctctcaacgtttttgttcacatgcctaactttttagaatgagaagatgaagaaatacttgtgaggaggaaaaccaaaggtttggacttggagtgttgaagtctaaaagacttgttctttttctttttcctcctaggaaagggccaatactaaactcaatactttaacttttagaaatttcgaaacatacaactttgattatttatgactaggtttacgcaatctcaatttatgttttaattttgtttttgataatctcgattatgttaatatcctttttcttttgggaacgatatatgttattttccttgagtagatatcctttgagatttttctttctaaatttatataacaacctccaaattcatgtttactagcctttttctatatacctagagtaaatcaataaattgagaaaatcttacgaaattttcggttttaaaattcgtcagatgtgataacatcttacaactttaatttattcagcctgaataatattttttaatttaaattctttttttgttctgagaacatctaacaactttaatttattcagttttgtttcgacccattaagtagttaagctctttaaatcgtctcgtaaatgttaaatatttttcctctgcatttaaagtcatctttatttgtcagcaagacctttacacacatcacttgtcgaatttctattgacgttgacgtgattgcctagaatgatagtatttacatgtatagagtctttcagtactgacaatacagtctaaataaatccaattacttttatttcctttaatttgtatattgcaatttttgcaacttcctcaaataagtcacaaaagtactattattaatttgcttttcattagtaatacagataatagtataaaactaaaaagaaatttaaccaaaaagtaaaaaagttatagaaaatggaggatttattagcgaattctcgggaaaatggcgtatatcaaccttaactatttgtacggtagtttttctacccaaataaagatatagtgccttttttcccaaacatctcaaaaattgaaaaaatctaccccaactcttcatgcgtaaatcaaagtcgtcgataacggaagttaatcaaccgttagtgtggattacttagctgacaaatgtggagcaaaattgacaaggtagcatatttctccttattacaaggtacaactacgttattactgacatttataccataccacaaaaatccacgataaacaaatattacatataccatgctcacaatataaataaaactttattttaaataaataagaccacgatgattacatatttcacgctagagatgtccataagttatatttttaattttttatttaaattttcatttcaaggaagaactacattgttgaactaattagaatgatccatagaagctttgatcctcactcaaccaaacattcttgaattttttaatcaagctaagtcctaaagtattaattgtagaattacgaactaagcatgaacaccataatcgatattaatgcagtattgcagtttgttaaccttgttctcttcttcctacatcgtatcacacaaaacagtgtttagtgtctctggtaaaataattgcaagaaaccagaacatcccaattgtgattccgaacagaccaaattgccataatccattattctgagtttctgaccaacaaccaccatgatagcactaagaattcaccaccaaaaccaatgtttgtctcaccataatcgctaaatttctaaagcatgttggaaatagctcaattgtatatatcatctccatgttaaaagaagagcagtcactaaaatattgccacaagcccattattaactttatcatcatgttactttatcataaataaaaactcgattattgatttggaaaattttgcaaatcaataaagcatacgatatggaattttttttcattctaaaatatgacaagaaaaatgcaaaacataagcaatacataagcaacacacaagcaaacaaaattataagctcaaattttaagactttaaaacattgctagttatcaactacacaaaaatgtgtaataatataagagaccgaaaatatgtgttttaagactgtagatagttgtcattaattttgttttaactaaaaaatatttataaaactattctatataacacttctttttctatgtgttattcgcaatacatcatacaagattttggaactgtcggaggaggcgcagcgggcattacttcatttaccatcgcagagctcatctcgatcgtgtcgtcggtagcggccacgccttggggaaaggattcatccgctattcttgttaaccttttttaattgagtcttcgaattgtgaacaaaagccttttgtgttgtacttggttcgaattgtgaacaaaactcaatggttcaatctttataaggaatccttatcatttttaataaatgttttttgataattatgaagtttagagtttttgtagagtctctatattttttattatctaatagtggagtctttaagtaagtttttaaaaacaaaagtattttttaaataatttatttgataaaacttaaaacttattagaaatattaaaattgtaaatatatatcataacttaaaagcacaaaaaaaactaaaaaaaaacaaaataaaaggcttacaagaagaaactaaaatccaagattccctatctcggtgaagactttcgttgaacatgttgtgtgtactaaataaacgagtggagaatgcagcgacaaaacaatagattcgaaaattgggtttgaacttttccagagatggaggtctccttgttatcattgtgaatcacatttgattttcacgatttgatgatcaagagattgttcaatcgccatcggagttaacaagagaaaagagaaagaaacgacatagaaaaatgaaaataatacgttggcaaaggaaaacaaatgtttcgtccaaaaacgttaccaattgagaagttgacacgtatgcgcaccttaacattattaaaaatccaagcttaggaatgcacctaagtttatataacattttttatttaatttttgcccattttaccgaaggattcatacattagaaactcttaaggatcactaatgaaggtggtcttagatcggttcaccagtgggcaaatataaaacatctatcgtatattttcttctagttaccaaatttaggattgcatttttgtttaattattttgttattctatgactccaaatggatatgtccggtttaacggctgatcaaatgcggttcggttctaataatgactaatatatatatatatatatatatgaagaaaattttgttactacagtagaaactctataaattaataatattgggaccatgaaattttattaatttatagtgatattaatttataaaataataaatattaatttatagaaatatttacgtgaaatacaatactaaattcttcttaaaatgttttttaatttagtttttcttatgttttgttgtttgtatattcagttatgttaaaaaaaagttatttttctcttgacttttataaaacatgaggcttaatccaatttatctttgtacaaatcttagcaatgattaaaaaatgttacaaaaccaaatatgacggataaatacgcaaagagttatgtgagtataaaagagataataccaactgtactctaaaaagagttataattatggtttgaataaaagtttcatataaaattagtgttagaatatatgcttaagatttatgattattaatttatgatattattgagaccatatttttacatagggatttcaaaaaaattattatcttattatcttatcgattttggttaatttttacattggtccgacttggaaccggtaaagtttattaatttatcgtgtttattaatttatcgaatattaatttatagagtttctactgtatatgacttatcaccatgagattgtaataactcttatctaataatactcactcaagtaaaagatccaataatcttcaaacgaaagtagtaccaggtatgaaactccagcgttgatgatgtgagcttctcaatatctactagtcaaagacgcatcggatcgatcatcggagttgcatcggaatttatcgggaaagaatggattgggcccaatgtggaaatgataagtcgtatgggcctaaatcatttagtcgtaggcccaatatgagtttaagctctttgatatttcagagaatgttattcaatttattagtaattttcaaatgatataaattcaatttattaatcacttggttaaaacttatacacgtgaaaaaatgagaaatcattttagtacattgttgaccatctttttcgtatagactactatctctgatctcttgcgagttaagtcagtaactaggaaaattcagaagcgctctcaatctcaaaaatatccatggcggcgattacagaatttctaccaaaagagtacggatatgtcgttctcgtcctcgtcttctactgtttcctcaacctctggatgggtgctcaagtcggcagagctcgcaaaaggtttccacgaaactcctagatcgttaacgcttgaattgccgtgatttcgccactaaaatcgaatcgaggacgatgctagatcgttccctttgttcttgattggaatcgaattttaactgaaatctgtagattgatgtgacctaaaactagaattttgcaattttcgtcctaagtttttggattctgtagtctgattcattgttttgatgttatcatcagttcgatttcaagtttattgaacttacgatttcaatctgttgtttgtttgttcatcttctactaattgattagtatgagcgagattgtcttatcggttagatctgttgtttgttcatcttcaattttgaatgatctcacatgagtctatgatcttgatgcaggtacaacgtcccgtatccaactctatatgcaatagaatcagaaaacaaagatgctaagctcttcaactgtgttcaggtttgaaatatagttaaaacaatacttgtgtgattctgttttcttgtactacttgttattgagatgtgataaaatttgtggttgtagagaggacatcaaaactctttagagatgatgccaatgtatttcatactgatgatcctcggtgggatgaagcacccttgtatctgtactggccttggtttgctttacaacgttagccgattcttctactttaaaggttatgctactggagatcccatgaagcgtcttacgatcgggtttgttcttttatcctcttatcagtgttcattatctttattgattgatttagttatgttagtcaataggatatagagtttagacttgtatataaggttgtaacttgcaagtatagtttcattaactgatttcttcggttattgtatcaaagcattgatctaaggctctaagctcaaccattttccgttttgcgtatcaaatgtttctcgctttctttgtctttgattcttgggaaatttctttgtttctgcatacagcttttcccattcttcgtttctttactcggttctgtatttactacgactttgttccacgtcttcgtctctaaatcgagtttacgtagataatcgttgtaatctacaatgttgcagttaagttagtcagagtaatagttaagagttaagacttgtacatacggttgtaagtgaacattttcctaaactgacttcttctgttatggtgtcagagcgtgaagctaagctcaacgatttcttcgtgtttctgataagtaacaagccaccaaagtctgattacttatctttctaatctataatgttgcaggaaatacggtttcttggggttgctaggtctgatgatatgtaccatctcgtttggtgtcactctgatccttgcttgagctactcgtttctggggttaatgattctctggtttgctcgaagaatatagaaccaatgcttgtaagctgtccacaaaacttgtgtaatactttagagtttgtcacttttaaaagtttgtaataaatcatggcttcatagaacagttgaaatttcacatccgtagacgttaataaagatttgaattatgaagacactttctggttattttataattccatctatctatatctctgtactgaagtgatcaaaacacttacgacacgttatcttggcttgttactcaaaaaatgaaaaaaataaactaaaaacgtgaacggcaggattcgaacctgcgcgggcaaagcccacatgatttctagtcatgcccgataaccactccggcacgtccactgtttgagatgtaacttaaatattaagataatataattataaataaagacaacacgttacgatactacgtggatagtaactaactatttgctgaattatgataaagtcgtttcattgtttgtagagttccgttgacgcaaaacgtgacgagaaaccgacaaaatgagacacctacataaccacgtggaatgatatatgccggaactataatgtaaagttcgaaatggagaacactaaaaagacaaaagataagctataaacctctaattaggtataagttaacacagtgcaacaacgtgaacatccatttggccaatcgacatattatgctctaaatttactaaaagagtgaattactcggtaactatacttattatgagaaattgattagttggttagtaaaaattaatatgaacatttacattacataacttttatatagattgagtgttttttttatcattatataatattttttatgtgaacatttcatttatcaaataaatgtgtataaaaccataaatctgatattctaaaaaaaaattttcttagtaaattagatatcaacataaaatataacatgttacagtaaaaaaaaaaaaagctattttgtgaaccctacaaaatcaaatatcactatccatagattttcattgcctttgggtcatttccctatctgttgtttacctttttgacgggtttctttttgcggagaagcataaaaggatttgatcgcatattcgcattaaaggctcaattggtagaaattgaagactaattttaaattgcaaacaaagagacccatgccacttgtgacttgccccacgtaggtccactatgttgtctcttttcatcacacaacactataagacaaattctcttataagacaacttgatccctaccatcacctaatgaatgatatatttttcaatattatgaagaaaaagaattatagagtattcataatcaattgggaatgattgaagtagattatgattcttatatatttcgggtgatttttcttacaaaaatacaattttcaacatgccatgcaaaacaattttttttttgctttttttttttttctcaaatcagattttattttataattgacattgcaaaaaagtccgaccaatttctaccaagaatttagttcgaaattggttagaccatttttgatcgaatcatgaattgctatgtttaataaattaactacccaagaaatgatatctaaatgactgattgatcgataatgggtagtaatttcatcttagacaaaataagcatagtatactatttcccccaatattatagttacctaattaatctcttaaacaactgattaatcgatttaagcgatcgacaaaatataacataaaattatgtttaatagattacaaatcctatatatacatcaagttaacgcctaatggttgttgtaaaacctttaactgtgttttttttttaattggtcagatttgttttagcatatttctttaaatcgcatttgagtggcggccaaagtttaacagattaaggaccctaattaagacctgacaacttcattctttgaaaacaacaaacccgtggtattacttaatcgctgtcaccgagtgcattacgaaccccatatgtccacatgcttctttcaaactaatacaaaactgaatacgatttccttcatcaataattgagtataataagatcttaaatactctaactacaattattaaaagaaaaggttaagtttttgccaatagcttccacgcaagtggttgaccaattcaacttaactttctcaaaacaatgagattccacctaaactatataaatgacgtaggaattatatgtattacactaatataacaactcttatatattagttcatctctcttattctcgcaaagttttatttatttatatttaatatttaataataaattaagttttgaatgctatttgtgaatttttttaaatgaggagctatttttggaagatttttttttttggagctatttatgtcaatctcccaaaattaaaatttacagattttatgcttattgtttttgatgttaatttggtataatatattttccttaaaatagaccattacctcaacaaatatttattgtaactaatcctatatatatatatgcaatataatataatatcatattatttaatgtttatatataataaattaaaattccattgattttatgtttacatatttttataaaatttaatatagttaaacttaaattagtttatctatattcgtaactaataaaccaatgtcaatttttatatcagcaatgaagaattaatttatgatttatttttttaaccaaaaaaaaaaaacaataaataaggatcatgacctatcaagatctggaaaatctttcaactgttacatatatgaatatatgatagacaaaccataaacatatcaacatcaaataattaacgtcattagctgtttactatattaatcacacaattataaataaaggtaactaactaaagtatctaaaatggaaagaacattttgttgaccacataataaaaacaaaacaaaaaaatagagacaaaggggttttacgtcatttcaattcctgacgaaaaaaatctttaacacagaggggtaaaactgtcatttggatatcggctcccactataaaaagcctatttgcttcgtgttttttggtcaccaaacccttcatcttcttcgtttcagcttttttttctctcatgtttctcgtcttcttctaaacttttgtgaccacccaaaaaaaaaaacgtaacggaacaaaaaaaaaaatgctccgatcacggaattgtaagatctccgccgcgaacgaagccgttatttctaatcgtctttcaatttctaatctcaaagttttattcgtttttgaatcctcgccattgaataatttgattaatcgtttttccgataagcttcgtcgttgaacttatctccgatctctgcaaattttctctcaaatctctccgatcttcctaattgattagaaacttctccatcgtttgctcaattatttcggatttttctctgtttctttccaacaaaatcttcaatggataagaagaagaattcgtttccagataatcttcctgaaggtattgttgttttcttcctgaattttgtaagattatgcattcctatttcaaaatcgtgtgatagatttaagaattacttatcgtttgaaatcagatcttggtgaattgaacaatgttgcatggtagaggaatctgattctaattttttatgagatcttgatatttgtatagcggaagaattatggattccaatatgttttgaatctttgaatcaggcacaatctctgagcttatgcagaagcagaacaatgtgcagccttctgttattgtgattggtagtggtatatcaggtcttgctgctgctaggaatctctctgaagcatctttcaaggtaatgatacgtttaacttatttttgtgacatataactttgaggtgtgtttctctatatgatcatgatttatattgttggatgctgtttgtttgtgtaggtgactgttcttgaatcacgcgataggattggtggtcgtatccatacggattattcctttggttgtcctgttgatatgggagcttcatggtgagttttatcacctttgtttgttggtttcgtttatacttctttcaaatgttattatagtttggatgattagagaagtaggcaacagcggtagtctttgtttattggagattcctaagaagaatgaagatgagatgcaaatttcttaacttattgaaatgtggtgtaggttacatggagtctctgatgagaatcccttagctcccattatacgccgtttaggactgactttataccgaactagcggggatgactccatcttgtatgatcatgatctggagaggtaaccctctcttgcctttactgttctataattttgatcagtttgttatggttctctgtgctataagattgactgcaatagtgtggaagaagtaagtagaagataagttagataattgtgtcaataccgaaggttatttgattaagcagggaagagtcgtagactgattgattttaaagcctgtcaacattaatttgatatacttataaagagaatttggctctgttttttcagttatggactttttgacatgcatgggaataaaattccgccgcagttggttactaaagttggagatgcattcaagagaattctcgaagaggtaaacattgcatttgctagaattttttttctaattactatcttttgttacaagagatgttgacacaactttacttgttggtttcagacggagaaaataagggatgaaactgccaatgacatgtctgttcttcaaggaatatctatcgtcttggatagaaatccagaactaaggtaccaaatgcagtcacattgttttaacttaaaacttttacttctaaaatttatatatctgtaacttctgctgtttttttttgtcttatctaggcaagaagggatggcgtacgaagttttacagtggtacttatgtaggatggaggcgtggtttgctgtagatgcgaatttaatttcactaaaatgttgggatcaggatgaatgtctttcaggtggtcatggtctaatggtgcagggttatgagccagtgatcagaacaattgcaaaagatcttgatattcgcttgaaccataggtaatataaatcaacctttgataattactcatacgtaacattcagctatcttactagatgattggattgattcacgcagggttactaaagttgtaagaacatctaataacaaggtgatagtcgcagttgaaggcggaaccaattttgttgctgatgctgttattattacggttccaatcggtgttctcaaggcaaatctaattcaatttgagccagagctcccacaatggaaaacctctgcgatatcgggtctcggtgtaggcaatgagaataagattgccttgagatttgacagagcgttttggcctaatgtggagttcctcgggatggtggcaccgacttcttacgcatgtggctattttctgaatcttcacaaggcaacaggccatccggtgcttgtttatatggctgcagggaatctagcacaagacctcgaaaagctatctgatgaagctacagcaaatttcgtgatgctgcaacttaagaaaatgtttccagacgcacctgacccggtaagtaatcatcatcttttactctctctgtagcttccttgtcctatctttattgcagtttagctcatatcttgaaacaaaaacaggctcaatatctagtgacacggtggggaacggatccaaatacattggggtgttatgcgtatgacgtagtaggaatgccggaagatctgtacccgaggctaggagagccggttgataatattttcttcggaggagaagccgtgaacgtcgagcatcaaggatccgctcacggagctttcttagcaggagtctcggcctcgcagaattgtcaaaggtatatctttgaacgactcggggcttgggagaaactcaagcttgtttctcttatggggaacagtgacattctcgaaactgcaactgtgcctctccaaatctccaggatgtgattatatctgcttaacagacagaagcagggttccaatttatttttctccatctgaacaaataaaaaaacattcatcaattgtgaatgtgaagtcatgtttttttttctttttcttgttctatgatagatctctcgatgggttatataaactgtttataattcaatgatctaaacatgtttaccagtctagtaaatctctttacaattattgttgcttttcttttttgatcgattaatctttcttttgtcaacatgttttataaataaataagttatgcacatcacatgttagctgttgttacatggattttgtaaatataattttacttcagaaaatgaaatacgtcatcatctctaaatgaaatgtaagataaaattagatatcaatgtcaaagatgagatggtccagtttcatcagttttgagcattgaatcaaacatcaaaatgatactaaagagataacatatttattgaagaacgaggatttattgtacaatccaataaaatacttgatgagttttcaaaggataagtgtattccaaaaaaggattctaagtggtagttttatctgtgaaagcctttcccacacactcttgtttggagatcacggaactgctgcatgaggctttgagattttcttctttttggttttaagaggctttggaattttcttctttttggttttaggaggcctcggaatttgtctgcaagaattctctcctactgccgtaacttgactcccgatattagttccacatggtggagagggccatacgggcgagggtggtggtggatttaggatttgacttggcggctcagctgccaactcaaaatacataaaaaaaagattagttcaagatttagttgaaaattgtgaatagaggtaatactctaaaaaccattcatagtcttagttatcatatgacagaaaaattgggagtaagaaggtactgacctagaagagggcgtatagcacgaatctgaaaggatagacatagaagtatatgaactaaacttagaagaagatacgcttgagttgtttttttcattatcattgctcctctctcacatgtttactgaccagcttaatgaaacacttatagtggagctaatctttatcggaaaaaaaaaagaaattattggagaaaacaaattaacttaaagtcaacttttggttcgacgactttgcgtttttgaaaacgcgtctactttgtggatagaaaacaaagatgggtaattatgcaaggctggctcaatcatccagaccaaattaattaaataattggcctagttcatatattctaaataaatttatcaaattacttctataaaatagcatgttatgattactatggagattggttggctccaaagtctttttctaatttctctcatctactaattttttgaaaattcaattttaataccactttttagtcaaatcgttagatttcatttttttctatataaacattcatcttcaaaattagacaattcaaaaaaaaaaaatgtataatcggaaaccaaatcaaaacgtaacatattttcttttctaataactttaaattattttcacatgtacatatataataatgcaagatctcggagaataaaaatgcgtgagtacaaaaaattcacaccagtgaacatatatctgtacaagagattcattatatcacatttctttttctgtgacgatacgtgaactgacgttaaatagaaaaatataacctttttattttacattagcatgcgacagattttaatatatagttgttcataaatagttgatattaaatatttatactagtatacaatttaattactaaatatatgaaatattgataaatcgataaaacaaattttcaaatataatattgcctttcgtggcttaaaaatataaattttaaagatatttatatatatatatatagaaatagagagttgaccgagtcagtctttaacaaagtctcatcttggttgtgtcatattctttgaatatttccatgacatccatgatagcttctcgccaacagagtcaacgctcctgtccaatatgcgcaacaccttgtaagcttaatcttgatcctctctatcattactaatgaattc

SEQ ID NO: 120 - DNA, 81490 bp, Arabidopsis thaliana
atatttatatatatatatatagaaatagagagttgaccgagtcagtctttaacaaagtctcatcttggttgtgtcatattctttgaatatttccatgacatccatgatagcttctcgccaacagagtcaacgctcctgtccaatatgcgcaacaccttgtaagcttaatcttgatcctctctatcattactaatgaattcttcattttttcttggcacttttgcagctgcaataggcttctttactctttttagaaaattcagattacaacaaaatacttgattcttctactatatcttcttcatcagttccttcatcatcttcgtcccacaagtggacacatcaagtctttccaagcttccgtggggaagatgtacgtagaggttttctcagtcatattcacaaggagtttcaaagaaagggaattacaccattcattgataatgagatcaagagaggagaatccattggtcttgaaatcatacatgcgattagagaatctaagatcgcgattgtcttgctctctaggaactatgcttcttcatcttggtgtcttgacgagttggtggagatcatgaaatgcaaagaagaatttagtcaaatagtgatccccattttctatagagtggatccatccgatgttaagaagctcacaggaaattttgggaatgtcttcaaaaataattgtgttggtaaaactaatgaggttataaggaaatggagacaagctctggcaaaaatgggaacaaccactggttacgattctcgcaactggttcgtccttctgaacatacgggcttaatcctttttaacacaacaaattatatatgtgtatctacaaatatttatgatctcccatatagaaatttatatattttaaatacgtacttgaaattttcatgactatattatgtatttattgatcttccaactttattagggataatgaagcgaccatgattgaaaacattgccactgatatttcgaatatgctgaattattctacgccatcacgtgattttgacggtttaattgggatgagagctcatatgaaagtaatggaaccgatgttatgcctacactccgatgaagtgaggatgattggaatttggggtccttctgggatcgggaaaactaccattgctagaatcttatttagccaatttagcgacagttttgaattgagtgtctttatggagaatgttaaggagttaatgtatacaagaccggtgtgttctgatgaatacagtgcaaagttacacttacagaaacagttcatgtcccagattatcaaccacaaagatatcgagattcctcacctaggagttgtagaagatagattgaaagacaagaaagtgtttattgttcttgataatatcgaccagtcaatacaactagatgctattgcaaaagaaagtcgatggtttggtcatggaagtcggattatcatcacaacacaagaccggaaacttttgaaggcacatgatggcatcaaccatatttacaacgtaaattttccatcagcatatgaagcttgccaaatattttgtatgtatgcttttggacaaaaatttcctaaagatggtttcgaagagcttgcatgggaagttgcaaaacttttaggtggactaccattgggtttaagagttatgggctctcattttcggggaatgtctaaacatgagtggataaatgccctaccgaggttaaggactcgccttgatgccaatattcaaagcatcttaaagtttagttacaatgccttgtgtgaagaagataaagacttatttctttatatagcatgccttttcaacaataaaaggattgaaaaagtggaagagcatcttgcagagaagtccctgaatgtgaagcaaggacttcacgttttaactgaaaaatctctcatatctattgaagggggaagaataaagatgcataatttgctagaacaattgggtaaagaaattgttcgtcatgggctcgggcatcaacccattcgtgaacctgggaaacgtcaatttttggttgatactagagatatttgtgaactactcactaatgacacggttagttctatgattagtctatctttgcattggtgcttcctacaaattaaatttagtttgataagtaaccatcgttagttctctaccttttatggtctttttttcagggtagtaaaagtgttataggcatacatttctactcatccgagctctcaagcgaattaaatataagtgagagagcttttgaaggaatgcctaaccttaaattcttaagattctactaccgctatggtgacgagagtgataaattgtacttaccacaaggtttgaattatctatctcaaaaacttaaaatactagaatgggatcattttccgttgacatgtatgccttccaatttttgtacggagtaccttgttgaactaaacatgcggttcagcaaacttcataagctgtgggaaggaaaccgggtaagaaattgttatagagttctcttcaattttcaactttttttgttgaagttcatctgtatagatatttgattttccttgcaccttttacgcttcaaaggagttttacaaaagcattacgttttgaatttaatcttggtgggttagaagtttttttttacatattttttcactaataaatgtggtcatttatattgccttttgttttgtttttatagccgcttgcaaaccttaactggatgtatttgaatcattcgaaaatcctaaaggagctacctgatctctcaacagccacgaaccttcaagaactatttctcgttaaatgctcaagtttggtggagctcccatcctctatcggaaaagccactaatctccagaaactgtatcttaatatgtgcacgagtttggtggagctgccctcttctattgggaaccttcataagttacaaaaattgactttgaatggatgctcaaagctagaggttcttccagctaacatcaacttggaatctcttgatgaacttgatctcactgattgcttggtgttgaaaagatttcctgagatctctacaaacattaaagttctcaagctcttaagaactacaataaaagaagtcccttcgtcaattaagtcatggcctcgtcttcgcgatttggaattgtcatacaatcaaaacctcaaaggattcatgcatgctcttgatatcatcacgacgatgtactttaacgatatagaaatgcaagaaattcctttgtgggtcaagaaaatctctaggcttcagacacttatactcaacggatgtaagaagctggtatcactcccacagcttccggattccttatcatacctaaaggtagtaaactgtgagtcactggagagacttgattgctcatttcataatccaaagatgtctcttgggtttattaactgcctcaaactgaataaagaagcaaaggaactcatcatccagattacaacaaagtgtacagtcttacccggtagagaggtgccagtgtacttcactcatcgaactaaaaatggaagttccttgagagtaaatttgaatcgaaggcctctttctacagcctcgagatttaaggcttgcatcttgctggttaataaatattgcaaggagaatgaggtgaaagaggtgtttggtagaaaaatgatgaaggcatcttactgcatcatagatcttggtcttgatgttcagtgcagacctacacaccactttctacctccctctttaactgagcatttgtacatctttgactttgaagcagatgtgacatccaacgagcttttctgtgacttccaagtcgacagtaacgaaatggttataaaagaatgtgggataatccaactttaagtacctccatatttgagagattgcaatggagaccgaagataaatgcgacataactatataactggatctgaagtctcgtggacaagtagatggagatgacaccggagaggtaaagaatagcggaaaattagtaaagatttttctttttttaaatgtgagtgaaaatttaatcaagagatttagtccaatttaagttgtaggccacatcatttgtacaatctgtccataaccatccatcacattcacatatttgttacatactataaagaattttatctatggtgaagctttgtaaaaattgtggttgagaagtggatgttttcgactgcataaataggcataatattatcctatatatagaaagttatccatgccatcgtcttgttaaccaaaacttaactagcaagtcaaaatacttgaaaatcttatcaaaaaatcaaactaaactttagaatttaaatgacattttaaaagttcatatttttcttcgtcccaaatttggaacatctggtttttctcgacattttcccttataaatattatatcactgatcgtatatagatatgatatttatccgtcaatgaacataaataagagtatcaactttaagttactggaacacacaaacaaaattaaaaaacaagtccagctgctacttaagactataagaaagaacgaaacaagcgatttttaatttttggacaatatttgtcgcagatcatcatcatgattcgaggaaataagaaggatgagaactaattaacttcttcctagcaaaatccttgtacgcttcttccataagatcatcatcatcccattcatcgcggtaaatttctgggtgggagaccattctctggaatccacgctcaacttcttgaattctccaattttcaactggcgaacaatgacattcttccgcgatccagttgaggtactcacactatatgggagaaaatatctataagtaacatggatatcatgatgctcttctagcgtacattaatatacgtttcatcgtttattacatatttgtgtttcatttatatttagtatattttcaaaattataagcggcacaggcagaaatcgatgctgaaaaaattgaaacctatatatattttcacacgtaatcatatttggaagataacgacttaccgaaattttacccaatttatgcgtatgtcttttgggaattcctaacacatcaagcgttgcataccactcaataatatcttccatcatcttgtcttgcgagggaagtataactcgtccggacaagactgcagccacccatttgctttgaatttcaaacataacgaattgtatggcctagtcaacagtcaaaaggttaaaaccaactaagacatgaactagaaaaaaatctgagtgatatctattttgattgagactaaccattccaggtaaaccgatgaaagaaagactgggggctagcgcgggtagaaagacatgcttgtatagaggttcgacgcggttttcattaatgtttatatagccattggtttcaagaaatggaaagtaatatttgtacctacaaacatagaacaagcatttacataaatacacggtaaataatcaacacattttcacatttgaaatctcgttgttaacaagcatgaaaatacagaagataaggaatatacccagtgcaatgcacaatggtatcagcatataccaccttcccatttttgaaaagaatggatccatcctgatgggcgaagtctatctacgacatataaaacgaaaaactcaaacactttcattctttaattggctttaagatgatattcattttgaaaatcaaaatcatgcatggttagataagtttaagtaaagtgaagtggtcagttttacctcggaatgaacccatagattgttttggggcactggaagcttctggtacgtatcagattcactcgctctagaggcaatgtgaacttctttcgcgaccttagctatatccctactaatatcagcaccgctcgcataatttccgatcaccaccactacctgccaaaatatcaacaaaaaaatagacagatcagaaataaatctatgatatacaattaattagcccgaacatttctgcaagaacttgtttgatggacgattacgtacttgtttacaaagtgagtataatgataggtacaagtaaaactataaaaaatattgtcaaccaactaacaagtacgttgatgtattactattaatagacctagctttatatctacatgtgaaaagtttttgtttactaattagtatcgctgaattgcaatttttcccacatactaatatagaatatttttctaacctagtttatcaaaagaaaaaaaaacaattaaacttagatagatccggtggtcgaacagattaatcagattgatcgtccaaatttatttatataacccttaaaaatccacaaaatttgcaaaacgaattatacaatgaagcaattaaccttgataattcgatgaataattttccattcttgtttacttttatgtcttgttccacgtcatataagttgatgtatatatactactactagttattataattttcttgatacaaatttattttttaaactttatgtttatatcgtaacttaatcagagtcatgcatgcatgatcagtggcattacattgtcaaaataccaactttttagtagtattctttaaggaaaaaaaaataatactaaaaagtataagaaaatatcaaaataacaatttgatttaagaatacaagtaagaaaataacaattttctttaaaaaatcaaaaatctaacaaggatcccaaaaatcaattgaagagtattattataaaattttgaaaagtattcgtacatatatgtttagtgctacttttgaattttttttaatacgttatggtatttttggaatgcaaaagatataaatggttcatgtatcataaacattttcagtagcagaaattctaatcgaacatcttcccaattgtcagaaaaaaaattaagaaattatatatatatatatatattttttttttttaatgacaattaagattttctttctttttgtaaaagaaattatatagtagttgagatatatcatttctcaagttgaatggaacattacctcgttattgaatggaccaggaactctgtagttgtggctatggatctgctttcctggccacgattttatccctaaagatacatatttcaggttaagaagatgattataaaactggggtaggtactaatagtttgtcaataaactcaaaatctttgtatagcttaatgaagctaacttcttttttgtcaactaacttttatgagcgttttccaactaggaatacgaagatttttttttcattttcttttgtagataaaagcgatatcaagattactatttactagattagtcttactaggttttgtttagtgcaactatttctcaatttcatttaaaccattttgaagtgaaaagccataaagttaagtttataaaataatttttcttttcttttcgaaagtacatatattatacttcttcctttataactgaggtgatcctaaaaaattttagacccagagactaagaacaaagaaaccaagttatttgaaataagtatagagaaatggatctttaccaggaatatgagcaacgttaggttctgtaaagtgaccactacaaacaacgacggcatcaaagatttcatgggcggcgaaaccaacggaattcttggaccggacactccatttcccgttaaccggctcaacacaaaccacctctgtctcgaaccggaccatctcctctattttaaactctctagcaaagtcttgaagatacgcaagaacttctctgtgactcggataccgtctcgagtctctcgagatgtcatgaatgcgtggcacgaaaggaaagtccgtaaaacccatacattctctcgggaggttggttcggagagactcgtagatgctcgtgtggactatggttcgggttgtgtcgaggctaagcgggtcagagtcagctttagatgagtagttccagagacctcccacttgtttttcccggtcaaagacaacgacagtgtgaccttcacgacgaagttccctagccgttacgagaccggcagctccggctccaatcactgccacgtgtttcgaacagattgtgttttgagttggtgccatttattttattaaatttctatgatatgtttgattttcatttatttaggaatgtgaaacaatatgttttaaattcattggtatgtttgatatttatttataaattggcctagctaaaacgtgtttctgcatatattacatgtgttttcttctacctgaaagcttacctaaccacggtaccaagtagctatagcagaaaccacacatattatttttaatctatcaaaaattatttaattatttagttatgtaaatcattgtttattgaataattcttggatttttattaatccactccaaattacacaataatgtttttccatatctaactaaatgaattaaaaaaataatattatctaaataaaataactaaattaatcattaaaacccctccaaattggattaagtatggaaacaatatacattagtgttagagattatatgtctgtttcgattcataagagaagggttatgatttaatgttataattataagaaagctatatattggaagcagacattgtgacaattgaaaacaaacaattataaaaataaaaattttattccccaaaaataacagatattgttctcaaacataatacttttgtgaattatcaacagaatggtatatttgtaaacatatagattggacccacatatacatggatgatagaagggtagtggtcctagatcatctaagaaaaggaggagatgaagcaaagaaagttagaggtaattgtcccttcactaaaagctatttaactaatctatgaagcatatgactttgactttattggcagttctaaggcaaagtttgtaaccaagactttgaagccttgtggggttccacaaacaaatgatgcaagcacttccacagaaatgcaatcacattttcacacatagcctgaaaaataatttgagtttgtagcgcaacgaccatttcttcgccatggctagtctttatcttctactacttcttcctctgttcttagctcttattctcgcagccaccattacagaatcaaaatctttctcaacaacagtgaaggcaccatatccaggacataaaccggataagctaacccacttacacttctacttccacgacattgtctccggagacaaaccaacctccgtccaagtcgctaacggtccaaccacaaactcttctgccaccggtttcggtttggttgcagtcgttgacgacaaattgacggtcgggcctgaaattacctcagaggaagttgggagagcccaaggaatgtatgcatcggctgaccagaacaagcttggtctgcttatggcttttaacttggttttcacgaagggtaaattttccgacagcaccgtggcgatgtatggccggaatcctgtattgtcgaaggtgagggaaatgccgatcattggaggtacgggagctttcaggttcggaagaggatatgcattggccaagactttggtgttcaatattaccagtggagatgctgtggtcgaatataatgtctatatttggcattaattattgtcattgattactgcttttagttattaaaaaaatcaataaactggtctttttttttttttgaattaatattgtgattttttgtgtaatttattgaaactgtggaaaaaacatatactttatgtgatgatttttttttctacataccatgagctgaatttgcctacgtacttagacgtaaatgttcatttccattccaaaaagttatcatgtcaaaccgcatttgtttgttaaatccacgtgtttgagcatgtatcttcttattcactgattgaactcagtaataatgtagatttacaaaacaaaaatgggatactttatatgatttgtgtttacatgtttgtatctacttctcactatttgctcatggtactgaatgtaatataatatccagttatgaagagttacatacgtccttttatttagagtagatttaatgatcattgatcaatacacgcagactaagaaaaatattaattcaaccacaaacagaaataaatgcattgatgcataatcatatacgtaaccttaaagcctggaactaacgttgttaccaccgcgtccttgaactttcttggaacgggtatcgtcctcatcgacaaccaaacctttagcgatatctctcagactcagattaggcttaagtatctttccgttcccattctttggcagttcttccaagaacactactttcctcggacacataaaatgcggcatattctcacggcaatacttaatcaaatctccttctttcgtcaccgattccttttcacgatctctttgattggtttcaccttggtttaaaacaacaaaggcacacggcgtttcaccccacaaagggtgaggcatggccacaaccgcggcctcgagcactttctggtgctcgtaaagaactctctcgacctcaatactacttatgttctcacctcccgagatgataatgtctttggatcgatctttgatctctatgtgcccatcaggatgaatcacacctatgtctccagtgttgagccatccgtgtttaaacacctcagatgttgctttagggttctttaaataccctttcataactatatttcctttgaggacaatttctcccatcgttatcccgtcgcgtgggacactctcccgagttttcgtgttcttcacgtcaacttcatctagggttatgttccttaccccttgccttgctttcagcttcatctgttgatgctttggtagcctgttgaggatttatatattaatcgttaagtataaataagattgtagtaaaaattgtgtaaactcataattgtgtttagtacctgttccactcgtcctgccactcacaatagagagctgcaccggaagcctcagtaagtccatatacgtgcatcacctgaaaccccaaccgttcaaccttctcaagaagtgcagccggcggggatgaaccaccagttagtacccgaacaggcaaggacttgtgtgactggttggttcgacttccttcgaggagaattctaaatacagttggaacacaagacatgtgcgtcacgccatgcaatcctatgttcttatatatttctacagccgtcacatttctgatgcatacattggtgcccccacgtgcagcgacggaccatgtgtgcgcccacccatttccatgaaacattggaagggtccagaggtagaccgggcacatgcccatttcccagccaagaatctagctcaaagcggtcaagtaggctcctcggtgactaatcaccacaccttttggttcggacgtggtgccagaagtgtaattcaaagagatcgggtcatgctcattgtggacacggaacaaacttgctgacgaagagagcgtaagatctcctttacggatgagaccctcgtagtctaactccatggaggaacgcttcgtagtggaatcaatctcaatgatggatatgattagcgggtgaagttttgaagcgtcaaatggtaagagacggaggacttcttggatcaaaggagcaaacgtgtagtccacgaataaacactttggctgggcgtggcggaggatgatggctatggttttagcgtcaagacgcgtgttaataggattaagtacagctccggtcatgggaacagcaaaatgcatctcatacatggccggtatgtttggagccaaatcgaaacctaaacacagatttaatacatacgttatatataaatgaatgattcattcagcttggttaagtttatttatttatctttttttttggtaaaatatgaagtttttataccattttcgaagttttgataaagaataaaagtagcggaaaaaaacaaaaagaattacagaatatgcagacaataataataaataaaggagaaaaacgaaaaattcagagtgaaaacaagagaaaaaacaccgattccaaagtgttaaactcgaaaatatcggttaagtttattgttcaaaagaaatctatggatggtacaagcaatatatatatttgatatgcatcaataaagattagacaagaaaaaggcgaagtcatgtggtacatatgcttattatgacattataaatatatcgatctgatgagtaactggcaaagtcatataatgatattagtcccatataggtatgagaaggtaatggaaatttcttacgacgtcgtatcgggtgatgtttagagagaggagagacgcagcaagacgacagcaacggtcataggtctgaggccaagtgaaacgagtttgtccgtagattatcgaagttcgattgggataacactcagaagctctcttcaagaacgttatgggcgttagaggaacgttgtttgcttcaaataacgcaagattatccatcttgtatgtgtatatgtgagggaatagggacatgcataatcattatatatatatatatatatagaagattgtgagaggcctcaaaatataattgctattatgcaatataaaagtaattttcgaagaataataaatgaattgcaagctggccatgcctaaagttttggaatctgtcatagaaaacatatcacgatcccactttccttttgagtctataatcaaaagatgatgttagaggaaccacctttagaagaatggatggtatatttaaaaaagcgaaaacaaaatatttaaaattagttttttttttaattataaaattatcatgccaaacaagaaaaagcgattactccacatgttaagagtagggtggcttagtggacatttatatctactgaatctgcctaggtatataatattgggacatgaagctattaaacatgtacaataattaagacaccatttatgatcattttaagtgtctttattggtatataaaaatcctatctaacatgcttatctcatatgtttaacttttagttgaaaattaaattaaatatacatatttgaacaaatacataataaaaaaaagaacttcgatgaaaatgaggggaaaagaaagcatgaaacgtggaataagccaagagaagaaaaaaaaaaacacacccaatttttttgtatatttcttctcgttttttatttataatgcagatttatgataaattttatcagttaaacaatggaaaatattaatggatatgcattgataattcaatattaggttagtatgaaagagaaaaaaattaaagccattattgtccttcttactttgtttaatttaccatatatgccatgtatcaattattcttataattttactatatatcaactattttaccatatttatagaaatattattcagatatttaatatgttagcacgttatattcagtataatatgttattataattttaaattgattatttcatattactttgtatgatatggtaaattgtttaatacgatatatataaatttatcgtgatacatattagttaatatgtttataaaatagttatctgtatttagcacaatactatactagttaacatgttaattaaatagttatccacataaatcataaatgttttatgcaatctaatgataaatagtgttgtaaatttcggatgaatagtatcgtcaaacaattgatgaacaatatcatacatacagtatctggtaataaatagtgttttgagataatgacattttggtaaataaaacaaaataaaaaggataattatggctttaattttttctctttcatgcttacctaatatttaactatctattgtaaatatctaattttcaagtttttgagacatatgtattaatatagcccttaaacaatccctatatattaagcttattatttacttatatataaaaaaaatagaagggcaagtaatagaaaacggatgaagtattatctatggttgtttcttattttataattattgaatgactctcttaaggaccctcaatgaagtgcttcaatcgacaaccatacatacaaatatataagtcggagaagtataaatcaaagccgcgaaataaaatgtccaaccggccgtttaacttctttagctataacattgatctcatcctcaacaaccaaacctttagcaatgtctcttagcttaggcttaaggatctttccattcccgtttttgggcagttcttccaaaaacaccacttttctcggacacataaaatgtggcagattttcacggcaatactcaatcagatttctctctctggtctgaaatttatcaacacgatcttctttaatagtagtctcactcttttctagaacaacaaacgcacacggggtttcaccccacgtagggtgaggcatggccacaactgcagtctcaaggacttttgggtacttataaagaacattctcgacctcaacactactaatgttttcgcctcccgatatgattatgtcttttgaccgatctttgatctcgacgtgcccatcagggtgaatcacacctacatctcctgtgttgagccatccgtgtttaaatgcctcaaatgtagctttgggattttttagataccctttcattatgctacttcctttaatgaggatttctcccattgtctttccatcgcgcggagcactcttttgcgtttccttgtttttcacgtcaacgtcagctaggcctaagatgcttatcccttgcctggcttttaattccatctgttgattctctggtaatctgtttcaattgagtaataagaccttttaaattttggtaaacgataacgcaaagggaaacttataccgtatacatgagaataaatagtacaaatgattattacctattccactcatcttgccactcacaaaacaaaattggaccagtggcctcggtctgcccataggcatgcatcacttgaaaccccaaccgttgaactttcttgacaagagcagcgggaggcggtgaacctccggtaagcacatggaccggtccagatctaggtgacaggtcaagtgaatttcctttcagaagaatgttgaaaaccgtaggaacacaacacatatgtgtcacgttatgcatttctatgtttttatagatctccggggcagtcacgtgcctcatacacacactggtacccccacgcgccgcggttccccatgtaaacgtccatccattgcaatgaaacataggcagagtccaaaggtagacagggcaggtccccatttcccaaccaataatcgcgcttaatgtgcacaaatatgctcctcggtggctaatcacaacaccttttgggtcggcagtggtacccgatgtgtagtttaaggagattggatcatgctcgtcttgaatacggaacatgcgtgccaccatcgagggcgtaggctctcccctctggatgagacactcgtagtctaactcctcgaatgaagcccttttaggaaaatcgttctcgtggataaatatgaccggcaagtttaggtttgagtcttcagatgataataaatggaggctttctctagccaaggcctcaaaactgcggtctaggaataagatcttgggcttggcgtggcggaggattgcggcaatggatgttgcgtctagacgagtgttgatagggttaagtacagctccagccatgggaacggcaaagtgcatttcatacaaggcgggtgtgtttggagccataactgatacctaaatacacaatgttagtcacatgcatgtctcatactttgtataaatgaatgttaatctgtttaattataccctacacaaaacggactatctctaacaaatcttaaacctcttcagcgaaaaattgaggtaaggatagtgaaagatagtggtacaatatgattaaacaaataaacataataaatcttgttatcacaactatagttttatccagatgggcttaaatttataaatattgaactccaataatgtgacataccacatcgttcttggagatgttaagagagattagagaagcggctagacgacaacaacggtcataggtctgaggccaagtgaaacgagtttttccgtagattattgaagttcgatttggataacactctgaagctctcttcaagaacgtcatgggggttagaggaacattgtttgcttcacataatgccaaatcatccatcttcttcttcttcttctactttgtgtaatgtgttaaatgaatgttgatgtgagagaaaagggatgtgcaacgatatagtatataaagaaaattaatgagaataaacaagtcatatatttttcggaagtagatgtaaaaaatggctaaaattgggaattcaaaataatccgtcgctcaattatggcaattacttaaaaggaaattatagcaacggtcctcttcctttactttttttaacaaaaaatctctcaattttaattctacataaataggcgtttacgtttatcaacatttttatgtggtcaggtttcaacagaattggacgaacacgttttatctctgttactcaccgacaaggttgatccatacatttgtatccatcattatttactcataaatcattaagaaataaattctttttctccgtcaaatttaaatccagatgtgactgatgttcttacaaccttttgtttcgactccccaccaacccccccccccccccccccccccccttgttctttgtgtatcattcttttgtgttttgagcattattatcttgtaaggttttcatttggatgcaagtgaagaaaataatgatataggatcatacaaaagcgtctaaaacataatgtgggatgtaaatttcctaccattaaaatttattgaagtttggatagctatagtacgaggttgagtttcaactagccagtgatgtttaatttcctaccaaaaaagattttccggtgtttcaactaatatcaaccggcagatcaaaaggtaaagacaaaagtaatgaacttatgatattctgatgcgtagataaagtgcaacgataattgtagaagaaatgaggtgactgactaaacgtcttaaagactgacccaaaaggtgatgaatataaactatttccactgatcaaccgatcattttaatgcaaatacacaaactatcgagaagaatcgacgagctaaagaggccgggcgatgtccacttgacttctgaaaaagtgataaataactcgaaaggtcaagtggacatcaaccggtcccttgcacttgtcaattattctgaagagtttgtgttttgcattaaaaatgattggtcgatctaagtagaactacaatatctgaaccggctcatttcaagtcgactcggtctaaacctaacttttaggtaactaccttctcatccagtttccatatccacttcaattttggattcatccaaactgatcggttaaccaaaatgaaattttaaaataacctgaaatctattatgatccacatccagttggttcgcaggtaaggatttcagatacaatctcgtcttcatgaacttcgaaaagattcaagaattgcgtggcttatattggtatttgattaagttcattttcactcccttttagaactggataaacggcaactttgtagtcacatgattaatgtaaataaaagaagactaataaaaaaaacatggtagtcacaactcagaattgccatgcataattaattcctcggtaatcttggacgagatcaaaatctctcattgcctaataatatgttcaatgtttcccgtgctagaattatgaattggagaatattgtttttgtttaaatgtgtgggtgataaaaaatggtaagaaattttaaattttaaatgtcattttaataactacgtacataattgattactttggtcaatgttttgactgtccatcaatggagaatcacaattttatcattactatatatatagacaaccatacataattgttgagagactctcttaagaccttcaatgaagctaaggtgctttaatagacaaccatacatacatatttataagtcggagatgtataatctcaaagccgcgaagtaaagtgttcaaccggccgttgaactttagatctaacattgacctcatcctcagcaaccaaacctttagcaatgtctcttagcttaggcttaaggatctttccattcccgtttttgggcaattcatccaaaaacaccacttttctcggacacataaaatgtggaagattttcacggcaatactcaatcaaatctctctctttggtcacaagtttatcttcacgatcttcattattagtctcacccttttctagaacaacaaatgcacatggggtttctccccatgtagggtgaggcatggccacgacggcagtctcaagcacttttgggtacttataaataatattctcgacttcaacactactaatgttttcgcctccagatatgattatgtctttggaccgatctttgatctctacgtgtccatcaggatgaatcacacctacgtctcctgagttgagccatccgtgtttaaatgcttcatatgtagctttgggattcttcagatagcctttcattatgctgcttcctttcataacgatttctcccatcgtcttcccatctcgcggaacactctcttgagtttccttgtttctcacgtcaacttcagttaggcctaagatgcttagcccttgccttgcttttaactccatctgttgattctcaggtaatctgtttcaattgagtaataagagtgacatattaatcttaataatatcaataaattaaagaacttttaaattttggtaaatgataatgataagtgaaacctaatactgtatacataagaataaatagtacaaatgatgattacctgttccactcatcttgccactcacaaaacagaaccggaccagtggcctcggtcaaaccataggcatgcatcacttgaaaccccaaccgctgaactttcttgacaagagcagcgggaggcggtgaacctccggtaagaacatggaccggcccagacctatgtgacaggtcaagtgaatttcctttcagaagaatgttaaaaaccgtaggaacacaacacatatgcgtcacgttatgcatttctatgtttttatagatctccggggcagtcacatgcctcatacacacactagtacccccacgggccgcagttccccatgtaaacgtccatccattgcaatgaaacataggcagagtccaaaggtagacagggcatgtccccatttcccaaccaataatcgcgcttaatgtgcttaaatatgctcctcggtggctaatcacaacaccttttgggtcggctgtggtacccgatgtgtagtttaaagagattggatcatgctcgtcttgaatacagaacatgcgtgccaacaacaagggcgtaggctctcccctctggatgagacactcgtagtctgactcctcggacgaaacccttttagggaaatcaatctcgtggataaatatgaccggcaagtttaggtttgagtcttcagatgataataactggaggatttctcgagccaatggctcaaaactgcggtatatgaataaaatcttgggcttggcgtggcggaggattgcggcaatggatgttgcgtctagacgagtgttgatagggttaagtacagctccagccatgggaacggcaaagtgcatctcatacatggccggtgtgtttggagcaacaacggatacctaaacacataattatgggttaagtacagtcacagatactctatacaaatgaatgtttatctcagataaacggactatctctaaaaaaactaaaactgttcagagaaaaaataaggtaaggatagtgtgacataccacatcgttcttgccgatattaagagatatgagagaagcggctagacgacagcaacggtcataggtctgaggccaagtgaaacgagtttttccgtatattatcgaagttcgattcggataacactccgaagctctcttcaagaacgttatgggagttagaggaacattgtttgcttcacataacgccaaattatccatcttcttcttcgtctggttattctttgtgtttaatgaacgtttatgtgtgggaaaagggatacacaaagatataatgtatatatagaaaaataatgagaatcaacaagtcatattttaagaactatatgtaaaacgtggctaaaactaaaaagtaagaaaaataatttgtcacttaattattggtgtgtgatttaaataaagttttaatgacttaaatgttatgtagaatttgttgttatttaatcaagattttttaaaattttggtaaagtttggtgatattagtttaatatttgtaaaaaataatctaaaatcttaagttattggatttcttcttttataaagttaacaaaactttttttgttattcaattaaaacaaaaagaatttatgattgttaataaattaaattattgtgttattggtttataactttatatacttttcttcacaaaataaaataatgaaaaatatcatcaaaataaaaaaattgtttgagaaaatttacaagatagtttaaaaccattcattcattcatttttctatgattttattaaagtcatgaaaatttattaaataggaacacccctaaatgtaaaacgcggctaattttggaaataaaaataatctgtcgcttgcaattattgaaaggaaattattgcaagggtccttttccttctcaacatttttttgtggtcaggtttcaaaaaaatttggaattgagtgatttccacgaaccacgatttatctcagctactgaccgacaaggttgatccatactgtttgtatccctcttcatttactcaataaatccaacagagctaaattatttttttcgtcaatttaaatccagatggtgactgatgatgattcgtttttaccttcttataacttttatttcagctttttgtttctttagttttttcttttcttatcattcttttgtgttttgggtattttttttatcttatttggttgtcatttggatgcaagtaagcaaaataatgatatatgattatcatgcaaaagcatctaaaagatcatctgctgggatgtaaacttacttaccatgcaaatttattgaaatttggacagtatagtatgaagttgagtttcaaccaaaaaagattttccggtgtagaatcacctttcaactcaaatttcgtattgaactcattcaagctttttccacatttgaggtcgtcaaagaggtgttcgagaccttattttcacgttcaaattatatatataatacataatatatcattgtcataatagtctaatcatttttttctaattcattattcgtagttatcttggacaaaaatcaaaatctctaacaactatcattgtcaaatattacattcgacgtttgttggggaatacttggtgagctgtgaaagtatagaaaaatcatccacaagctggaattgaaggaactaacggcaatgatgcgtctctatcacacatatccggactaatgtttatgactccttcaccctgccatgtgtagttatgtggtcaaaattatgcaacttataatagacgaaaaatgatacgagtggtttggagtgtttggacaaccaaacggggtgaatagagttgattaaaaaaataaaaatgacgagctttaaaattttagaatgtcaaagtatagagttgattagactttgttaccttagcaatgtttctgaagtacgaagttgtatagtttcccgttggaaacaaggcttcaacaatgtcagccagtacaagatttggttgcgagattgctccgtcataccagtctactcattcacaatttccaagacactggtttttagctcaaatcaacagaaaaaaaaaaaacaatgtcttataactttcttaccaagagttgttctgtttctgacccttttgtcatatctccagatgctttgattagcaagaaacgcaaaacaagagttatcatccacgtttatgttcgccaagaacgttgtctgtgtgtagttttgagggtcagatgatagcgtttcatcgatcacagcatccacagtctgaacaatcgaattgtagaggctaagcaaaagaagtttgtttttggtcatcaaaaagatgaaagcaaaacaagtatgaccagcttacacataaaatggcatggagtgcttccaaatcatcaggatcagagacattgtaagagaccttgttaatagacttgtcgatattttcaccaccagcatcttctacaaactgttgtgtatgggtttgtcatgttcagttccaaagcttttcccaagcatttaagggaataattgaaagtgtcaaatattgaaatgcgtacctttagcttgtgtgattccttagtaaaactccacatgcctcccttgaaaaaacaattatgcgttatgagtttgaaaccataaacagacatttatcttcgtattttaagaaacaaaacagttaaaatagctagagacaacccttgacaaaaaagaagaagaagaaagttttcttacattttgatcatatcccatccaggctacaatcggcttgaaggattttgtcttgttggcagccatttgagacaagcaagtatagcttgctttaaccttaaagtttccataacatactttataaacagcaagaatagaccatgtaggcagattttgctaagagaatcacaaatagtcactaaccgagtcatagacttgattggctttagtttcaagatttgtaaacgctccaaggaatttgatccactccgctcgcttattcaagattacaaaaccagcacaacctcatatcaaaatgtgtaatggttatcaattttggttaggtttagaactatgcaaagataataattggcacctgaagaggtgttccttcactaagtggaaaaaagtttgcaaaattgcaagtctgaggttgatcagtatcgctgatgaaatgcgccgcgaattgagatagttgttcacctttgtcaagcttaactacttcccctgcctcacacagtttcagaagacacggtgaaactacctcatccgatgttattcccttcaagcttccgagtaatccaagtaactgcatataatcaaaactaaatccattttttttttttggtacattttaaagtgtgatcctagtcttctatagaattttttggctagtgccaataaaagtctagagcttatgtattgagatactagaaaggagtgtttacctcaaagaaagaaaccggaacacttcctgcataagagaaaacatagagatctaaaacaacagaattttgttaaacagaggaatgaaacaggggagaaaaaaacagaacataccttgagaagattgagtgtctaatgagtaatttagaagtggaatcacataagactttatcctggaagtacaatactttgtccgaaccgccattctagaagtgttctacatattatcctcaattatcagacacgaaccataccatacatttggaaacaaaaagatgaaagataagttaatgagaaaagagcaagaacctgaataaggagatagctcttgccatcaatggcgtttttgatgactttaaaggtctgtccataatagatatggaaattcgtagcatcttccacctttgaaatgattccaacctttacattgttggaagctccgtttgataatctagctaccatgcaccacaatactaacaatagtatcagaggccaagaactataaggcaatggagacattatcactgttaatggtgatgaagaaagaagacaaaatcacaattaaccctttttgaatttagattggctcttcttgaattcacaagacaaatatctgtgggttttccatagagggagagagatagagtggagagtgatagggagaaatattttattattgttgttggcaaaaataaataaactttttctatatgctagaattctgttggaatgtactttttgtttttagtttgatttaagaataattgtggaattcagatggaatatttgcctcactggacatcctcactcaagtgtaaatgtatatgcaaccactatttcacattcttcatacatgtgaatacccttttgtattcattttagtatagtgtttatacggacaattgattcattatccctatgtctctccaattcctatagatggaagttcaaacagattgaaacttgtgtcaaggttgcaaaagcatgtgaaaaacaaataaatgtataaatttctggttaattccgtttaagaaatttaaaaatcgatctcaatgctgtttataacacaatgaaataatttcttaccacaaccaaaaaaaaaattagaaaaatataaaaaatatttggaaagtgaggttttgattgattgtgagaacaatagaggaggtgacccgtgaagaaagcacgcgactattatttgatttgtcactttgtgtttcaatagttaccactttcgctttcttgtgattttctgtctacacccattacgtatcaccacgtgcatcccaatccccattaccacaatctcgactccaagatttgagatcgtaaaagataacgcaaattataatcattttagggtgttgtaattattgttaatgatatataccaactgtatcattaatttttcttgaatttcaaaggatatgggagttcttgttttctttttttttggttaaatgggatttaagttgtaactttaaagtaggaataaagtcaaaggctcaaagccatatccataatatgatacatcttaccaagacgcatgaaaattaatggatccatatttcaacggaacaatgttttaaataacctaaactttcaaagaactttgtaaatttcaaaggatattgggagttttttgtttttggttgggatttatgtttaaagtattttaaaacgcatgaaattaggatccacattgaacatcttttaaaataaacctaaacttccgatgaactttgtatattgtaacactccaatccagcccattaaggcccaagtaccctaaattatgtcgttgtgtgttacttaaagtctcacaagtcacttaacgcatctcaatcttcaaccctaaaacaggcaacgaacctcagccaccactgtccatcgtggttgagttcgacgaagtttgttgttgtgatccgatctgatcctaatgaagatgaggaaggaaacagtttctggtagggggagtgagattcaattgtagttatacttcagcaagtaaggctagatgagaggtgtcgacatcacccctaaaggtatacctagctgccaaactctttgattgccatgcaagaatcaacaatatctataaaaatccagtatgcataatcatcttttgaactggttcttgtgctagagttacaaaatcctagttgtactagtaccaaacttttatgacactttttagcagcttgttttcggtcaagcttgaaaacatgatccatggaaacataacatctattttttttgtaaatcataaatttgttcatataaaagaagatttaattattaattgctaatgactaagatattaaaaattcaatgttgaaacgtatcgatatttggtatgttatgagatatgcatactcacgacattgttaatgttgcaacgtatcgtaatatgcatattatgacggggcaagtccgtctagtcctcttcactcagcgttagacacattcgtttattctatgttttgtttgggagagaataatgaagtttcaatcgccgatccatacaaactattaagagccaggaaagcaaatcttggctccatgagattggcgagcttctctgacgcacctagattcttttgtaagagaggtttttttcctctctctatcttccattcacatttgttttaatattgaaaccgacagtttgaaccgtataggttattcttaaatattatctgtcaagattcaagaacaaaatagctcgatagtaatttttgatgatctatacattgcaaaacatggaacagcaatcgttataataaacaagttattatgaaaatgactataaacttactcacatatctatagtgactaaaatactgaaatacaagatggctaaattgttaatgttcgtataatctgctcttaccgtcttacgtgcatgcaaacataataataataataaaaaccagacagaagactgatcgttcaacccgcggagagatcatatcacttaatacataaacagaaaataaccaaatctagttttgtttagacgactttagagaaatggaaaaagcaaatgagagtaaatacgacctaggcaaatgggagtacaatagaaaagtgaaaagccatatatgatatattgaacctcagtattcaaataagacttatggtagaaacagctaagatgatagcaagagaaagccccaacttcttcaatacgaaactatcttgaaaccgaaaaccttgttcgtcaaccatatttttctctttcttcttcttccaaatttttcttctcacgacagcattttccatcatgagtattgttccccgattgttacaatctcctctcgtaggctgcctcgagtaaccttcactgcctctgtttttgttagagttacctcgatgaacacaacgcatcaatagaagcataggaatgaagccaataacatgcgcgaattttctccattgtccaagaactgttgagcttactccgttgattcgcggatttatctttttacggacatgaacctcctcttttgatgtcatactatgacaacactcattgccatccgtcggatttatataaactataacggtttgcgatggtactatctgttggaagaatgtgttggttacctgacgagttgtgacaaacaatccatggctaacctcaactttttttaccacctcaaaacatgaggaactcgttgtctcatgatcgttcttgtccaaaagattctcgttatgttcgttttccgaaaactcgagtgtgaaagcatcatccacatctccattgttgttgttaacgtccataccatcttcaacaacaacaaaacaaaaaaatcaaatccagagatgtcaagaaagacaaccaaatgtagaaatcgcgaagtgaaagctaccttgatcatgatgttcttgttcttgattatcattatgatatctccaaatatcttctataggaattaccgttgagtgttcttcaacgaagctctgaaatttgtagaataaatcaaacatatacttatatttgataacatatatattaacacataaaatattttgcacttaacattgtaaaatatcactaccttttcaagttccttgcttgatactcctacccatctcaagttttcaacaagtctttcttccttaaaattcacatggtgttcttgcatatctacagcctccacgttcgcctctaggcatgagactttttctccggaatagttaaagtctccatggaagttcccggaagcagaaccaccgtcccatgagtctagactgtttcgtggctcatgtgaggcttgagccaatgctataatcttgctcaacatttcatctgtatcgttagctacattgtttccaaaatattcattgtgtgtgagaccttctacgtaaagtggtggtactggtggcaacatacgattttgtagtcttgcacactctaacgctatatcaacctattatatgaggagaattcaatggataagagattagtttgaaaacaaaaggttacatattcaccaattttaattttgtatttctttgagatatatagtttaaattttaccttcgagggaggatatgagattgttccatattgagactgaggtgggaagttgaaggacgtgtcatgcgacataaactgactccatttattctctatcgtttccatatccgacgacgaattattaccgagttgagttaagcctcctgtctcaggtgagactggataccccgagttttcgaggttttcatacattccatcagaatacaaacaagtactagaagtagattgttcactattagtcgttcctttgttcttcttcgtaccatggtgttgttcttcaattttgttggctaaagcactcttcttaaatactcgacaaagtgcataggcatcctgaaatgtttatacattggtttatattcaagttaagaatcttaatcttttgataacctttttaaaagttagcttacctgtataccggatttagagtcacattcttgttcttcaagacggtactcgtgcatgacccaatcggtacgagagccatgaggcgctcttcctcggtaataaactaatgttttctttgttccaaccatccgtgaatgtgaagtcactttacgatctttcccggtggctttccagtaacctgctttggtcgcccggtttgttcttgatccgtttggatatttccggtctcgaggactgaaaaagaaccattctaggtctttacttggcagcaaggacttccctgcaaggatcatacaattaagataaattatatccaatcttaatttgtacacactacttaaagattccataacatgtcatgagaatccaaaagattaaaaaagaaaagacaaataaagagaacattagattgttttatatttaaaacaaaaagttgaaggtgaatgagaagcttccaaaaccctaaagcacatgtgaaattattgtgagttacttattatctttttttttcaatcttcttaccttttttgactcggtcttccgaatttgtctcacactagtcaccaccgcatctctcggttttattacaatccttttaaagactaaagataagggtgggtccatttaaattttattctaacataaagttgggatcataattattaaagattatttagttgataaagcattcacgttcgattccaagttcgatgcgtgactagagatacataacttggtacgtaaaaatgtgaaaataaaatgggaattatattatgttaaggaaaaagagggaaagaacatctatcttcgaaaaagaaaggacgtcaagtgtctcttctctcaagggttaccctttcaaacattagtttcacattatgtagttttcagaaaaatgaatctatttttcgttattcttactaaattccaaaaaaaaatgatcttacactaagcatatcaatcaaatgattatgacatattagaaaagaaccagatagagtcttctccttcggttgctatggtatggtctcatttaaaatttctttaacatgagacacaacatgttgatgtactaacgatgcagaatcataaatttataccttcgtccatggtaaatacttgcggatgaccaaaaaaaatgatagatttgcatcttatgaaaaagaaaaaaaagaagcaaagagagaaatataccaggtaaatcccaaggttcgcatttgtaaagatcaatctcgggtattatctctaactcaatagtccgaccattaatctttcgcttgaggtagtatatgacaagctcttcgtctgttggatgaaaccggaaacctggaggcattgaaacaggagccatgtccactgccttatacaaacttcttagctagaaacaaatatgaacatttatagaacttaagagagaaaaaggagaagagggaggagaaggagtgagaatatgaagagacagttatataagaaagaagcgtaacataagggtttgaattcgatcgatcagtgatgaaattgtaagaaagacaaaaagagattaaaattatgtaaaagaagctggaaaaagcatttagggtcggttgccaattgcaaaccccacaacatattttccactttaacttttctttttactttaatgtgtttatatatttccgtgtaaatttgattctcagtaacgttcttaataagctttttcggtatcatgttcaatgttggaaaactcacgttcattataattcatctaaacatgtttatttttgttcatccatgcgtaacgtgtttatgcatatagactagatatttgtcaatttcatttatcagttttgctcctagtgaaaatattaaaagtaaccaattaaagacaatttgataactatttttgcttgtaaaaacggatatatatgtataaacctatactagttaataacttttgctcgtcatattttttggcatcgaccaacgtaaggacgtgacatatttgacatatttataaggaattttcaacaactagaacttaatgtaaggttttaagaaaacataataagtaaactattttttacgttgttaatttttgagatgctttctcactgttttcacacattttaagccacatttcatagtcaattattacgttttctataatatagaatgaaagttttatatttgatatacatcattttattttctatctcgtggtcaatgcctcaatggtaatattgaaccaatcgcattttgaagatagcatgttagatatatttctacttacatttacatactatgcaagtcttcttcattgctcaaaatcacaaacatttttcttaactcgcatatatatttcctagatgatcattaaaatatttttattaatcatatattggaatttttttcccagtatttttttttcattttttcttaaataaagaaatttttctgcattacatatattcactaacaaacatcaaaatgaattaaaatacattcgaagaagtaaactcaaaagttagtttcatatttcagcatcatacttgttatagaccaaaacctgcttctcttcccaccatctttgtgcttccttctctgaaaacctcttccgactgcaaccaaagttagaaaccaatcatataaatacttaagcgtacttcaaactatataaacacttaaaagcacattaacatttttttacctaaaccgtacgcgtttaagcgtcttctgaccgcaaggcaaggccgtgaaagttatatatacaccgggctcgtattgctcaacttgttctgctgacgagtcttgtgtttcgttttggagataccctgttcttgtgatggctggcgatgcatctactaatagcttaatgttgctgtcacggttcgaggatttcgtgacacatttctctacatgttgtttggtttcgtgttgtgaacgagctgtggtgattggtgtgaggtatggaatggacattgagtcatcaaagattggtgagacttgagaaggattgcatgcaatgccggtcttcagaggattactcggtttctctttattcgcttggagctgcaagcaaagataccgtgaaaatgtcggtcacataacaaaccaaaaacagaaagattaaaaaaaactatgtatcttttaccttcgatgccaaggcttttattatctctttagcagctttcgatttctctgcttcttctttagcaacttcccatgtcttgtcgagctcttgttgacattcttccatcttctcattgccaagttcacactgcctctggagattttttatctacatgttcataaaaatgtatctttagtgtctaatgtgttactattgttacaggtaagaaaacaaaaagaagtagtttaattaccacggcttttagcctttcgatttcttcggttaagatcttattcgactcagacgaggttgaaatcttcgttgaagatgttcgccttgctgagactgaaagattcaaagaagaacttgtcgaaatcttatcgaaacgaaacagagaaggaccagagacttgtccccatcgaggctgtccatccgaagatcgattagcttgtggaagattctgcatctcattctctgattgtttttctgtcaaatcctcagatactcttcgtgtaaccatctgcatcctcggagtgtgattatccatcttaacatttcttgaaaactctgttatactccatagatgatcaaagcaagaatcgcaaacccgagaaagcttgcttttattcggtgctaacgaagcatttaccgctttcttgctactacatgcattgcaaaacaatagaccacagttgtaacagttatgctttctccttgtgaatccaaaagctgatttgcaagaactacaagcggtttgatcattcaaagagatctctttgtgtaaacagatcgcagccgtcaaattcaacccgcaagctatactttctaccaacctatcacctaaaggctcaacaagaacaggagagtttctatctctaacgtcacctaaaccaagttgtccattcatgccttttccccaagtataaacatttccaaatgaagttagaacagctacatgatgtgaacctgaagcaatatccttgacaaattgtcgtgttagattgcctaaaacaacatttaccgacttatcctttgcccgcggacatcctaactgtccgtggatcgagcttcccattgtataaaccgttcctgaaatgcttaaagcaacagttaaagtccatccacaagagacttttatgaaatcatgatcaatgagttcagtaacacaagttggcacaagctttctcttgctatcagcatgtcctaaccgtcctttatcgccatctccccaagtaaacagctttccacaactcttggcgttgtagaatttccggtcgttcgcggtttccactatagcagccgtgtgccacggtccacaagagacagatatgaccttcatgcgtctcaaagactcaacttctttcggctttgtaacactctcaagactcccatgtccaagaactccaaaagttccactaccataagtgaaaagctgaccagaactagtcacaattgccgtgtgccacgcgccacaagcaacacttaaaacagtcaaagatccgccaagaacatcggatatcttccgagtcaagaactggcttcctgactgttcaatggttccaccatcaattccccataaatacagctcaccagattccgtaacagcacacgtttgatgatcactacaagccactgatcgaactgcaacatcctcaagagactcaacgcgtttcggatggtcgatatcgatgttaactttaagtccaagcttcccactatttccattcccccaacaaaacacttcaccttgtcttgtaaccaacgcagcatgttttgcacctagagatatactctgtacatcaaacatcgtagcagattccaaaagcttaggagacaacgcatcgttctgattcttcgatccatcgataagacccgttatagctccccatatcataatgtccttaaggacattggatcttgtaaccggctgtgttatgatagaaagaggaggagaagcagcaaatctttgtgatgaaaacctgcaaagttctgaacctgtactacgatcacaatccgagttcctgaaatcataatctgtttcatagtaagaagaaactggacccaaggcatcagattcagcaaaactatctgaagaacatgacaacccgttcgacaaacaccgctcttcaagtaacgtcgatggacttccacataagctacgtatcttcaagaacataacaagatacatcaagaaatcgaaaacaatatataaatggttaaagaaagtgtcttttagttacctgagtgacgtcaggagtctcttcaagaagtccaagattctgtttccttcgcataaaacccgcaggactattgatgcaactttgagctcccctactactccgatgattcacagagtttctaatgttatgatgctttgttatcacagctctaagacctttaaaccatgagtctgcttgtgctttatccttacatatctacatcaccaacaatatattcaccatttatcaaatctcctaatcttgaaaactatttgttcaaacattataactaaagcttacgagatcaagagtgtgttctccatttgcataaatgagtgaaaaagactgttcctttcgatcagattgtgcttgtttctgaaagtttggctaagaacaaaatgaaacacttttcatcatcaacgtcttcaactagagactatttagtgagccaaaaggaatatatacatactgtgatttgtccgcgaacaatcgttataacagaactcaatctcaattgtctctcctcttctcctgagtaccaaatcaagtacttctcatccttcataagaccaaaagaacacaactttactaaaacccttgaaagataaatgattgaaagatcaaaagaaacttaccattgagagtttaaaaggacaaaactttgggtttcctcttcttcgacatttcaaaagctgtgcacctttcttcaaagccaagattgcctacaagaaaataacgatcactaatcatctctaaatccagaaagatcttgaattctatgacagatctctaaaccatttaaaactaactatgaacagagtgattctaatgtgtttcacagaacagagatttcatttgaggaaaaaacaaaacacacaacaatgtttgaagatgagagaagtggtaatggaatgaacagtaatcactgtcgaggctaaaactggaaattttcaagaaatgcatcaatttcttgattttctataaccaaaacagagcaaaacagagtgtgaaacaagaatctgtaaaacagaggagaaacaaaaattgagtaacataaatcaaaacctgttcatcagttctatcacgaggcactgtaactgagatttgttgttcgcccataactttgtcagagaagaagaagaagaagaagattggtgtctctataaacaatttgtttggaatttagaggaatgtgaaacaaatttgtgtactctctctctctctcagctcgtatttatgttcttataaaaaaacatgatttttttaagctaagtagctaaaacagtgtaatagtataaacgtacaatttaatacttttatttctttaaataaccaaaaaaaaatcaagattctcgctcccaacgtttatgccaccgagtttgctaaatttattttgttcgctgtttttttggttcaaaatttaaaatttttgatagcttaataaatcgattaagtttaaacacaattaattcaccagttcaaaaaaattgtgagagtaatgtcaaataaaagtatcaaatctattctttttcaagaaaagtttaatttattgtaacggaaaaaaaaaataagttactcttgtttcaatagagtcatacatatttttttgtaaaagtgtaatgatttttttgtgatttgaatattattttaagattattatactttaaaactgattaagctttcaaacttaaaaagatttataatcacatcatttttgtttactatgctatgtttttattttcccacaacatgtactaactattctatattttaaaatatcatgtttaattaaatatgctaaagtgatattaaactatgtaattaagtacctaattttgtttccaaaatttagacaattttttttgtcggctttgagtgtatttttatttaagaaagtcaaatttcttgtcagtataattttggactgcatatttaaaaagtatcttacattgtataagaaaacattttataagaaaatatattaaataaatgttgaaccatatatgttgtgttatagtgatttgcattaatgactgtcgatgtgtatctatatatctgaattcaagtctttaaaattctgtgtttggtgatgtataagtatttaaatagtgagtcatttagttatatactgtacatacttaaaactaattttatctcattaagacaaacacaagagagtaagaaggttgcacgtgtgcataaaaccacatgggttactttcaattttttccataattattactctttttcttcttcaattattagtttctcttttttatttttctttctttttcgcaattattagtttcttactggttgcttctctattttttgtccttttcatatttctttattttttacttttgttatttttccatttagacaactggcatcaagacaagagtaggacacaaacccaacattgtcaacctcttttgtaagaaacaaagcaaacacatacaaactctaacgtatattgcatatgttagattttagctaaaaagtaaagttgtaactttgtgatttcgtgcgggccgaaaaattcgaataaaagtgaaaaaaattttgacgtaatcatgatttcagctagtgtcaaaaagcaaactcttgatatgagatgtttcaaggatggaaataatcttgatattattttttattcaatgcatcatgcatggtttttattgtcgacaaattcttgcatgattgtatttctaacttaataatagtttggttttggaagaagataacgttagtgaaatcaataattagatgtgacatatatatcataattacttaataaaatagtgtgataccgtgtaaaatagcgtattatcggaaaaaatctaaaacctgtgcagaatctatattatgtaacgggtcatcatatacaataaagtgtttgcataagtttttcttttgttttcgtttttatttataagtatgagttatgagtcttatgacttatgcgtagagatgtttttagccagagctttttttctttaatttacataaatggtttaggggatgttgtaccaaatcccgagctttagttctgacagtcggaggaggttagttgcaaaaagtatgaatattttatcatccctgactcaaagaacacatgtgccgcaaactcaagaatttcgtggtcacaaaagagatcttctaatgtattataatgatagaaattaggtggtcatttttgtaccagataaactagtcttgttaacctacgcaaaacagtcaatgaccgcatcgtatgagtatctaatgtttgaaaaaaaaagtagctaccactgcctttagtttgtcatttaaataacattggaaaaggataatcgatttcttattgacgttgctagatatacgtccattggctttctttttttcggttttcatgtttaaaaagttgaggatcattgccgaccaagttttggctatgtaaaggttccatcagcgttatctaaggcctttttttagaaactaccaattggagatatctttctttcaatctgcagtttaatttagttcaccaaatcatcaaagatagtccaaagatgggattccaaaagagcaagggtccctgtgatttatatatgtactttgcaaaggattagctgtttcttcttttgttatttgatgtttgtattctgtcttataacttttttttattaataatgtcaattataagctaaaaggaagctcacaaataaatgttttcaccaaatcatgggatgtagattatccaaaacaagctagcatggtgcattcactttcattatatcgaattaacaatataagaaatacaagggcctctgtgatatcatatctactttgcaaaatggattcactggttatccttttgttatttgatgtttttctgtcttacaaaaatgtgtagttttcaattcttctaaacattttttaaaataagttggattatacgttttcttaaaagtatatttctagttaataaattattacccttggcattagtcggaaagcattccaaactcaggacagacagtgtggtggtccttcggggagaagtccactctgaaatacttcggtctgtttctaccgaaacttaccggatcagccgatagtatttatcaacaacaaaaaaagttaataaattatttattgatataagtataagttaattagtttaagcacatggacggacccatcgcactaactaaacttgacagtctcttggaaacgacctcatacattgaaccgagcgtggaacgtacgtatatacgtgcatatgacgaacacacatgcccatgcatcctcgaacacgcacctctatataaacatgtttaatatagatcgatggctgtctgtacttggatatgctaaaagaaaatgactaatatagtttggtgtttgaaaaccttttatcccatgaaaacgtgagccgttcatgtatgtaaacaactttaaacaatgatcaaattaacaaaagaattatagttacccggcgacgggagatcaataatttagtatgtttaggcctatgacccaaagagattatggatcgaaggatcttgattacataaaattaaattatattggcattctaaaattaccacacttttttctttcctaacgtgtggtttatgaagtttttttttttaattatttgccaaacaattcgtaaaccgttgaaaaaatcataaatttcctaaagtcttcattgtaattagatttttatatgtttttttttttttttttgtatattcaatcataattaaatgttctcattttggccaatgatttatcggctactaataatattatagcaattgtttatcatttgctttgtccggattcagatccatcagacttgattatgaatgacaagattcataagagttcacgaacttagacagagtacatacagccaatgctatgcatctgtttttgtctcgaacacagatataaaattaaaaagctaaaccaaaattgttagatttgttgattgattggtttagatagaaaatcacgatagtatttgaagaagatatgattggttagtgggcataagatttgattcgttaaattcagtttcttgggtcccaattataaaagaaaaaacatttgcctttgtcatttttgtaattgagcatcaattattgcggtgataacattcatgattgtaaaattatagtatagggagaatatcacgtatataataaaaattcaaacttctacatatatagtattaattaattatatgaacctacatatacatttttgcaaccattttagcaaataaatcctctacttgacacttatttacaatggcatgccattgacattaattattttttccttaattatttgatttgatttttaattcttgatttaatataataatcacattattcattcaaatttaatccaaacatcaaactttaaatcaaatcccttaaaattagctacacacaattatttaaatgattattaatattatactttattaaaaggtaaatattgtaattatttaaagtttataaaacgtttataatatttaagggaaaaacgtttataatatttataaaatacaaaactatatgttacatatagagaaatattttaaatgtgaaatctataaaaattaaataactatttgaaagacaccttttaaatttgtttgaattaaaatttttttaataaaaatattatttaaacaaaaaatttaaaaaataatgtttaatttcaccgaacaggattagatggtatgacgggtttagaatattaaaatatatgaattttataaattataacaattaaataaccatttaaaataaaaattttgaaattgatttgaattatatatttttaaaattaacgtatttttaaaacaacaataataaaataatatttaattttattgtacggggttagatggtagaagggtttgagtcgatagtaatatgagacagtatacctaggatgaaatcaattaaatatgtttaatttcattgaacagaattagatggtaagacgggtttgagtttataataatacgacacgttatacaacgggtgaaatcctataaataacaattaaaatacaatgatatcatttaaaatatatgacaaaagaaacaatcttaacaaaaatcatatataatttaaaatttaaaattttaaaaatcgacttatggtgtattccatgataaaatcaagagattgtacaatatatagaaataggattatatatttataaaatacaaaacaatatattacatatagataatttataaaataatatatttttagttattttaaataaaataaataatccctcggtgtaccgcgggttaaaatctaatgtatattatagttgagacttaaatacattagggtgggttaataccaaaccctaagattttaggccacatgccatacttaattatcctacttacttcttttaaggttttatgaagacgctttggaacttgatctatttgctttccgtcttttatttgtgattacatattttcctagcaatcgagacgagagccttgtgttgcttatttcaaaagctaaactctaaactctacaaacaaaactttaaaccatacattttttaagtaaattataaaccaaaatggtgtatttacataatgtgtagtctatgtttatgtggaacaatacgtttaattcaatatcacatgtctatttatcgagtaatatttgtttgttttttaataaacaaatcagacatgcggaaaaaatctatagtttttttttcattagtcatgcgagtttaatcaattttgttaaagatatataaagaaatgaaagggatataaaatttactttacttagaaaaaagagaatgagaaaaataaatgatgacatgaagtaattaatttatcttgtctcactaaggaaaaatatgtccattttcaaaaattaataaagaaatttgatatagttatataattttttcactaaagcattgtcatttctccatattcctctatgaataatggaggaagaaaatagtatactgaaagagtttttttaaaaatagtatattcatcctttaccagacaaaggtaatatttctagctttgtgaagaccttaaaccacttatcgctatatattgtggtagttgatataatcttgttttgtttcggtttaaattgctattgaacaaataacccatacataaatatataaatgttatgcgaaaaaatcaattataagtatacatgggaatgaaatcaaatctgcttatatgtgactttgtatttaactagtcggagacaagtcagagaagtgctttctaccatgtctcttaatgtttgtcaattaggtcataccacaatgtcttgttttcattatccatgtccatgtggcatttataatagctgaataaatcataaataaatccaattttatgggcatggatatggctataagtaacttagaagtatcgaaagtccaaaccagatctcattatgatatattgtttaagatttttgtgaaacaattgtattttagtaatcaactacttaacctcattgatgcatctcgctaccatgcagattatggtactaacacaaatgactacactaaatttacttgtcaactaaagcaattcctaaagatagtaaagagagaactatatacaaaatgtttccagacaaagacatgcagtgtactgatttgagttactttttaagacttcctttagttgttgactaggacatatttttagctaaaagatatttctttcaatactaaaaatattttgcccatatttttagtatttaacgtaaacatgaaatcttacactactttgtatcgtgtagttccactgaagagtatactcatttttcttcacatttaattttttttttgtagattagtattatttctcaccgacctttgtagatttacaaacagctgttctttaaaactaaagaaaacataaatgttttggccacccaaatttccaaattttatctatctcaagtttcaacaatatttcaatgtagacgtaactgtcaaccactttgaaatgtaagtaacaggtgtcagtgagaatattgtgtcgcaaatgtcaaataaatgaatacgtaatagttaaagattcatttgatcggggcttactagtttagtaggacccttacaataaattagataaaatcatttatgtgaccgctaaaaattatacgtgggagaggattttttttgtataaagatgggcaaaagtagggtatgcattgttcatatagtgttccctttagactaagaaacatacacacaagtcacaaggccatgttctttgttaggtgttatattatccgaggatgtgaaaatacgagatgtcgggatttataattcccctaatgaatccaaaactttatgtatagtttactgttcggagtttattgaatgtcgtatttatctaattttctgaaccaattcttaacgaatccaaacgtataccttataaccaatacggtccacatgtcgtttaggttactacattattagaacgtaacttacacaaagaaaatcgaaaacaaaaaagaaacttgcatgattacgaagttggcagtgaattcttgtggttagcgtaatagcgtgatccaccatgccccctactttgagcatgatggatcacattaaaccgacgctgaaagaaatttaacggctaagccgacgtcgaaggaaattatggaccatgcgtcaaaatttgtttgggagcataatcacaaaaagaaaaggagaatcgtaagaattctgaccgaaaaatattttaagggggtcactccatgaaattcaaagattttgaattctttctccaagaacaaaccgggaaaaactcgaatctatctaccaattaaaccaaaacactatcgacaattgcaatatatgcccatatttgggattttattttacatatcagcaaccaaaaataggggttctgcacaaaatgcaacttagttttttgttaatggacacccattccccaaatcctcttttttggaagactttttatggacccattgcccaaatgttctcggatgcaaacagatctttaccataacttagaaggctttcctactaatatccaacatatcctttttgcttacgagatatatggagtgggccacttgtttgggctcaaaatatatatagagtaaaaccaataaggctatgtgtgagatgattgaagaaatagcttactagtggcccactccatatatggggttttaagctttgtagttagtacaacataaacaaattgtacaaaatcatgtatgcagtatgaaaagataataaaacgttcgtcatatctcttagaagctctctttcaagatatctcggaacatataaagcttgaacatattctctataaatatgttagggcctatctacaacctaactttgtttatcacttgccatttacccggaagcaatgtcaacaatttctacctcataagttttcggagagtatccagagtctgttagtatttgtttgttgttctattgtttcaaactggtggtgtagacgtgtagtgagtgataataaacacaagaagtttgttatcaaaattcaggaaccatatatttttctatttgtttttcaaaggcaaagaattgtattcaaaggccaagaattgaattgaaactcgaaacgtccacatcgaaatggtttggataaactgctaaatgttttaaatgactgtttccctcttgaagagtcttttctttgctagccgtagaaaataatccatctgattcggggccaaggacgacacccccggactcctaaattcattttttttttttaaattttttttttttttggaagttaagaatgaaaaacatatccccacgtcaaagctcatctatattctgaaactattagagatatcatacgtgttaaattaagagcgattttaaagaaaacattagttctgaatgaagacgtgtgttcaatggatgaaatgcgattcagttcaaaataataacaatatatatatatatatatatttatttatttatagatattcatatatatatataagaaaatatatagatatggtcatatggatatggttgtggacttgtgatgcgacaaaaaaaaattgaacaaagtggatctggttaggtggccagcatcttttacggaagggaaaagttggatatattacaatatttttggtggaccatgagcaaccccaccacaaagtgcatgtgaagtgaccacttttctgcgagctgatccaactaatcaataatggtaacaaatacaaaaaataaacgctctaattttatttcagtcaaatgtttttaataattttccatgtccgaaaactttaaaatcttttattattactaagttaagaaaattgcaaatgtaagaattatttgtttctaaatagataatattaataccaaattgatattccaaaacatattattttcttgtttgatttgattgataatctattaactgataaacaacaatgatagaaatatgttctctaattcttcttctctagcattcaaaaattcacatccaacaaaaccataaattttgtaattttagatacaattttacactaaaaattaataattgtaaagcttgtaattatattcccaaactttattctataaattaaaacttagcattcatattgttgaatatgacttttgaattttgttagtgggacccttttatacaataagtggcggctacaacgaaaaatcaaagtagggaccaaaatgatacaaatcgtaataacggggtcaaaataacataatccaaacttttaaatagcataaatacaacaactctcaagacctgtacaagctatttcacctacttcatcactcatcaccagcttcgcatcttcttctccggcttgatcttctctcgtttctagatctccgacgatcggaatatcaaatccgatcgattaattctgtcaatcacacaaaaaccgaaaaccaaaaaaaaaccatggcgtttgagaagatcaaggtggcaaatcccatcgtcgagatggatggtgagatcttacttctccttctcctctctcgatctctttcgctatctataatcagatattttcgttgattggatacgaaatgatttactttcgcttgcctagattgtaacgaagtttcgttgtttgttctgatctgatctctggaatctacgcatgtgtaaactcgttgattgatttggttttggtgtatgattacgttacagatcgataaaatcgataaaacctttaagctctgttcatgagattgattgatttatgaaaaatctggactcgatttcaagtgtggatttgatttacagctttgattcggcgaaatagtttcgatatttaagcttcattggtttgtgtaatgtaggtgatgaaatgaccagggttatttggaagtctatcaaggataaggtattaagcttactttttttgatgaatgagtgtggttcgtgttttcggcgtattttgaattttttctggtgaaacgttttcagcttattactccttttgtggagttggatatcaagtacttcgaccttggtcttcctcaccgtgatgctacggatgacaaagttactattgaaagtgctgaagctactaagaagtatgtgtgtttgagcttgaaacatactagaatgatgttgcatctctgtgtggaatattctgttaatctttaaagtttatgattttgttttgttttaggtacaatgtggcgatcaagtgtgccaccatcactccaggtatgtcaacagatgttttgcagttgaacattttttttaccagtgtttttattttacttagtgttgatctttgctctctgcagatgaaggccgtgtcacggaatttggcttgaagcagatgtggagaagtccaaatgggaccatcaggaatatcctgaatggtaagttatagacaattgtatgtttaaagcttatccagtgtcattctctgttgacttatatactgtgtttgtttctcacaggaactgtatttagagagccaattatctgcaaaaatgttcccaagcttgtcccaggtaattattgacaatggcctagttgcattaacaattttattttcaaagggttctgagaatatgtcttgttttctctaggctggacaaagcccatctgcattggaaggcatgcttttggtgatcagtaccgtgccactgatgctgtaatcaagggaccaggaaaactgactatgacctttggtatacttactgcctttcatcggtcatctcgtttagagttggcattgcataatttttgaaatctctttttcgtttctttttccgtatgtcattatgtattaattataatctttaatgtctttgattttcagagggaaaagatgggaaaactgaaaccgaagtctttacatttactggtgaaggtggtgttgctatggcaatgtacaacactgatgaggtatagttatgcttaccctttcttccaactacagtacaaattactcgtctttttggagattgtcctctaagatgttctcttataatacagtccatccgtgcttttgctgatgcatcgatgaacactgcttatgagaaaaagtggccactttaccttagcacaaagaataccattcttaagaaatacgatggcaggtatgcgacatttagttttggttttcatatcatataggcttttcgctcatatggtggaggagatagttttgctgttggttacatttttgttttcctataaagattcaaagacatcttccaagaagtctatgaagccagctggaagtcgaagtatgatgctgctggaatctggtgagctgtctctttgttttttcatttttggaatagcatggtcccttatattaccttttactgataagaacctaaataattaaattggttaggtatgaacaccgtctcattgatgatatggtggcctacgctcttaagagtgagggaggctatgtttgggcatgcaaaaactatgatggtgatgtccaaagtgatttcttggcacaaggttagtgtaatcgtaaatgaatatgtccttcagcgcttatgtctatcttacatattacttgttaactaattgtttcttataatgtgttttaggattcgggtcacttggattgatgacatctgttctggtataattctcacaagttcttagctatattgtcacataatctctttgttaggctgttacatgattctaagtttccgcttttacaattgttgtgtattttcattaggtctgcccagatggaaagacgattgaagctgaagcggcccatggaactgtcacccgtcacttcagggttcatcagaaaggtggtgagaccagcacaaacagcatagcctctatttttgcttggactcgtggacttgcacacaggtaacaaaaagaaaacatgcttaataatgtttcattagaaggaagaggattgtctaagctaatgtctttgaaacagggctaagttagatgacaacgcaaaactcttggatttcactgagaagctggaagccgcttgtgttgggacagtggagtcagggaaaatgaccaaagatcttgcactcatcattcacggctcaaagtaatcaattcaacactttctatttacgtccttgttctcatcaagatcacttaatttactgtcggattttttcaggctttcgagggacacgtacctgaacacagaggagttcatcgatgcagtcgctgctgagctcaaagaaagactcaatgcttaagaaactgaagaaattgggtaaaattcgaacgtctcagttcctaagtgtcttatctggttggtggggttggttgggatcgggaggaataaacttttgtggagaggagtgttgagaacgatttgtttcctctcttataatatttccaaaatattgcgacatttttccatttttattcagatctcgaattttatgtttgattgattggttatcacatcttcttttttttggttgatcgatttatgaaattggtattagggtcttttaggttataaatacacagtacggtttaactagaatacacataccaccaagccattggttgacttcagtttttattagaccaacaaacaatccatcaaatgtttgtttattctcttgggtataatgtactttagaagtctctgacgctttactttcttatactcttagtctcaaaagatcgtcttgttttgtctcaccacctttttgataccttgaagtgaagggtgacagttccatggggccgtttcagcttgatatggattgtgaacaataatgagcagtccaatatttacttgatttggtgtaatgccaatctaacgtattcctcttaaataccatgctaacataaatactttgaataattgggaaatttgtaggatccattagagcattaatcatctcgaaatgtcatgtcttagtcggatactaattggttgacctcaactagggatgaaaaagtatcccttacattttgctggtctcaccttttcattaggtagctatggatcgttccaaaccaatatcgagtagagggctagaaatggtggattatagcagtttgtttgttttcttattctattgtttgatcttctgtttttactaatgattttttagatcaaaaggtaaacacaatatcattttatatcgtttatgtaatgatacaaataattatcatcacttatgttaacaaaatttatatgattgcattgataatagagaataaattaacacttctatcaattataacaaattatgcttagactcaagaaatgttaagagaaataagtaatttcaaaagaaattgaaatggattagaagtttttattttattttcactaatctgaatcttgtgatgctttttaacgaaagtggcaccaacacttaatatgtcaattctggaatatttatttatgcaaacaaccaacacataaacaatgaaatctaaagctccaaaataatatttaattggttatgtgtggcatgtttgcataaataaatattccagaattgacatttgaaatggtagtacgacttcctttgaagagcatcgcaagatagataagtgagaaaataatggaaacttctgatcgattccgatttttttcaagattaattcatgtacatggttttggtcaactcatgtaaaagcttcaaaattggtaatattttaaattacaaaaacttatattgtactttctgaaatttccaatatctagattttaaccaacaaatcggcttcacaggtattcaagatctcaaaaaatatagaaaatgggttaactaggtaaaataataaaataagttacttaaaatatactttaaattactttcatttattttagtttgtttactatatttaccaaacattaagatatttatgtgtgtgtgtttttttttgaacaaagatatttatggttattctagaaaatagcacacatttgttttctaagataccacaaagtatctacgatatagatttactacccttaaattaaagtaccaaacaatcccacaaacttgatgttgtcttttacatgtaagaaatgttgattgttagatttcaacataaatcatccgagaaaccaaaggttgatctacccatgcacattatggttttacgacaacttccatcaattggtacttttcttaaaactccactacgagtctaatatctatgacaattctagcagaagtagcgaggttgagtcttattgtaggtgttataataacaaaacttagtgttatcagaatcacatcttgacatcaaaaagtttttttttattacaactagtacagtgagactcaaccgcactacttctacaagaactgtcgtagatattggactcatggtggagctttaagggacataccaattggtggaagttgtcataagaccaaatgagcaagggtagatcaacattcagtttctcatatggtttctgttgagatccgacatggtatttatcaacccgtcttacatgttcaagacaacattgagtttatttgtagggttgttgggtatagggctcattatgttggaactcaattttaagatatgtttgcgcagacacattatcagaatactgtttttaagcaagatcttttatcggaattctgagattgctgaactttttatcgcgaacactataatttaatgtactcattagtcaaaatttgagttcgtttggatgtggactacttgtccaaagtttcttgcatgaaagacacgaataggcaaggtggatttagttctacattagaagcttgagaaaaatctaactactgtatatataatcataaaaaatctagaaaaactttgggactactaaatagttagaagatcaaacccatgtcgagccaagttggtaataaccggatgggcatgggtttcaatttgatcttgagtggatgagccttcaggcaaacatccaatcttttgcattattttttgttatggaattgatcaatatataaatatcaatttggtcaaaaagtaaacaattctctaatcagttgaaaaattgatttggtctatgtcataagttctctttgtccattattgcctaaagttaattgcttaagtgatggggttttaatcaactaagaaaaaaaatgacgtgataagaatctcttctcgtcacaacaacaaaaagaaaagcgtaaaagtatttaccttatttagacaactctgaaatctgaaactcttctgcaatttgtctgttacacttctaaatccctaaaatccaaatattgtggtgaataaataaaatcaaatcacactaacaaataaatggccatgaatgttttgttgattttggtgggtttttggattttggattttggtttttgattttatgagtttttgattttggtggagattctagattttgcaaaatcttaaatggtaacttttctagtttttgatttttatataattattatttagaaactttttaaaattatttattttaaactttatttttatttttcaaaaacaaaaaaagagtttaccatagaatttgttgaaaatccccaaaaagtggattttggattttaagaacaaatgactagaaaatctataaaactctggattccctataatttagggaattgtttttttataaaatcataaatgggtgaaaaagtggattttgcaaaatcaacagccaaaatcaacttttaaaaccagtaccattcaaggccaaaatttgttttagattcatgcatgcaatattacaatagaaagttttaagaaaactacaaattataggtatgtattatgatttaaaatctcatagagagataaatcaaaaaactaaaacatgttaaatcatgcttttaaatttcaaaacctaccgaaatcatattataaaaaaagaaagcataagttacaaaggtatttaaactttaatcaagcatcaataaaatagcaaattaaagtgagaagtacttaccttagagtcataagctcaaaatctgaaagttacatgtgatcctttggctcttcttacaaatccctaaatccaagtatagcatgtggtgaataaaaatatgcatctagaaaataaatcatatatatgtacctttatgattgtattatatatgaacatatataactatcatatatatatatattaatatatgtacgtttttcctctcaattaatggtggattcgataaaaagaagaaacgagaaggagaaaatatcgctttactcatggatcttagttagttgggttttgaaaaatattgcatctaacgtgttgagattatatacaaaatgaaatgagattagtcaacaaataacataactctctttttggaagtaaatacagaaaataattctcaagtaaatccaatttaacaaaattggaacaaaataatttgggaaacatttttaaaagcaaattcagaatatttttactaagaaacaataaaagattttttagcttaaaccaaaatgtactaaacaataaataataatatatagttttaacaaaactaaatttgatatatatcaacttcaactttcttgtaagaaaacagattacatgaattcggtagtcaagaaaaatgtgaaaaattccatttaataaaaaggttcagaaataatttaatctaaaggaaaaaaatattttcgataaaagtaataaaatacaaaataattactaaacccagtagaaagagaaaattttatcaaatttagattttaactttcatttgttttttaaatactaagatttatacacagaaaaaagagtaatttataggaaatacaatttcataaatatagaaacgtaatcttacatagattcaattcaatcaaaatgaattcttgtccaatttaaatcttttgcaaaaagaaaaagatttcattagttagtcaacaaaataaaaaaaagtctatatggaaaagaatctttgaataaaataaaataaaatttaaagttctgcaatttcataaatgtcaaaaataaattttaatattgatatttattaccttctgaaaaaaccttccaatgcaactagagttattctgttctgtcttcaattttcagtttaaaccaaaaataccgttgtggtcaagtcggttctttgtttttctttgattaaagttcgttgtaccgagagagtcattggtttcacctcaaatttacatatatccgttattccgtttcgatacaaaaaatatatcaaagacacttttgaaccaattcctacatcataatcatattttcatacgctgcatgtaattcgctttacactatttgtgataccgccaacgagttgcccatagaaaccgtatatggtatgttttagcttcttcattccttgaaagagttccatcaattctgaaccaaacaaaaaaagagtttgaagtttacacacaagacttttgagtataattttatcatttggatagtagtttcttacctagaataagacgtaaccgaaggtaactcattaacattacagatctggagattaccgacttctcaacaaaatctggaaacagcagaaccaaaatctatagcttcattcttgataaaattgtatagatattttgaaacttctcaaacaaagttacctggttcagaagttggtttgtagccaagcccgtataccgcatatttcgcataagcgagtagtctcacccgttgtggagcacctaactttagagtgattgaccgtatgagtccactgagatcgatcaaaaacaaggaggtcataaataatattctttccagaatcaattactaaataaccgaggatcgaggattgtactctgttcgcagaacggttagaaagtcaggtggaagagaccccatgaaagttgttacgtcttccaatctcagaagtttgagctcctgtttcagtttttgcctctcttgtatagacattccttttcccagtcctgatttgctattaccaagaagatgcaggaacaagaataagtccttttgaatttaaaaatgtaaatgaaacccaaactgtgcattgttgtctctacggtcttattttcatactttatttcaggattaacaatgtctagtctaaacaatgctggagagacatatacctttcactagttcttccggtgaaaatgacggggaagaatttggcatattttccaaccccaaactgtttccctaattcttgtatcttgttcgagtctagaagaatcaaagcttcccacaaccgacaaaagtcccgcctaaatgcttcatccaatgttttacagttcccatggtctagcagaacttttcatccaaaagtaatttcaagaagaataaaagttctatgattagaatctggaaacagtgagaggtcatgatagaattacgaacacaaagtacctagagagaagccattctggccttcaggagaaactagtatatttccaggatgcggatcgccatgtatgaacccgtgaacaaatatcatttcagcaaacacttcaaccaatactttagcaacctattgtaatttgggaaaaactttcatgcgtcagcaaagaaatcaaagcgtatatttgacgtttcgaaggctaagcctaaatttcacaggtcaaatgctcgttacagaccaaaggtgtatttcataacttatgcacaaggagtggttaccaaccttttctggacttacattagtccttttgagggattccacatcgtcaacctgaaacctagggaaatttgagttagatgaacatacaagaattatagtatgcacgagaagctacatgaggatctctaagaatatataatatataacgttaagatataagagtaaaccacaaatgaaactcaaagaggtctctggtttggaaaatttatcccagattcaaatctatagctaagggaaaatctagatatattgcgttttgaattatcacagataatgaatatcaagtatttattgcataaaacttcataaggtactaatttgttttcactagacaagttaatatctgaattgatcaagtgctttctaggcgttataaccaaattccaacattctttttccaacactgtaactttatgaagaaacttatgatttttccatttttcagagttttagctataaagctttgaataccaatctcctttctaaatgtttctaagcaattaaattgtttgagattgcttcagacttcattcttcacttatttcttttaactgaataacgaataattcagatctaggagaacagataaactgtataattaattaactgtgttgaacatcattaccttgaaacccttgcaaaactgcattgtcagcacttgagtggttgtgaactcctgaatattaatgtgggcgacaatattaagaaaaacaaaatgccgatccaacatgtactagtaaaatcaaaatcaaagactctcaagtcataccgaaaacactgtaggaattgtaatcattttgttatgtttgaagtttttggcaattctctctgaattttttgcctcctgtagaaaatctgtggacaagaaaattaaagaagaaatgaaatcatcagattcactatacataactctagagaaagaatgtaatgaatatactacaacatgtattgtgtacatatagggttcactggtcttgacgttttcagcattttaaagaataaaacataaacacatgcatacaatgcagtgcttggttctgaagttttaggttactgaccaagttcctgggaaattgactttacgaattcataaactagccaatcaaatctgtattctggaaatatctgcgaagtggaagagaaaaaagaactctaagaaacaatagacggctgcatataatatgcagcctataactatatgaatcagagatgcacaaacagttcatgtaattgcatcattgatctcaactaacactccacagcaacacaggcttaggtcacaatcaccggcaaaactaatgaaattagaaagaagtaaaacaatgaagtcctcataatctaacaatgcatttcgcaaggcagcataaactactgcagcacactggaaatattatccgcaccagcagttccctgccagtacttttaataaaagacgaaactccaaatttaaagcctcaaatatttaatcaaaaaatcatatttccatcaaattcctagatcagttagatatatgatgtcacacgtctgtttcttcgtttcatattttatgaacagcttgtaagaaaacatattttgtttcaatctaacttcatgttctggtacagatataaagcaacaagaaaatgcaggcacctttgcgactgattttgaaaggaatgacattatcattgtatctaacatcatgttctgcttcaatccagggtattgcacctattttaacaccaaaaatgaaaacttggtgattcttgaagttgttgcagaaagaacataggaaattaaaacagttattgttatgaggagttaacctttactgctacttcctggtggttcttcaatacagcatgatgtacttgagcaatagatgctgccgcaattggttcctcatcaaaagataaatatctgacattttaactaatagcaatgtcaaaacctcttccaaaaacagacgtcaaaaaacaaatctgacatttaactctaaaagacttacatctctgtgagattttgacccaagttacttgtcagaacttgctttatttcttgaaagttacaaggaactgcctacaagataaacaaattaggaatagaacaaacaatccgaaaatgtttacagactcaactataacagtattcttaccttgtcctgcaacgaggaaagagccaacgagtactctttcggaacgagcttcaacgtagccacaaactgaccagctttcacatagaaacctttattactttcacacagtttaagaattcgtttagcagaccgtgaatgaacctacacaatcaaaacgaccaaatgttaccatatcacatagtactagtgaagtatactgcaaactttaaacaagcaatcgtatcactactctaataacttgccttcaccaatgacgaataagccgattagaatgtaattcaaactacaagaaaatcggcctaatgccattgataactacaattccatgaaaccaaaacttaaacacgaatgtaagatatgtaattgtacacctctgttaatctctgaagatactcatcggaatctgctggtaatctacgcaaagtatacttgtaatcagcgacagtgagagtgatctacaagtagagaataagagattcaatgaatgaattggaatgaggaaatggtgaaatcaatagagagataaggaagatacgaacggagtagatagcgcgagaagaacggacgacgccttctacagccgtcgctattttattggaaggtgagtctcggaagatggacacggcggtggcgctgccagtgacggcggttagagctaggccggcggtgactgtgaaagcaaagatcggagacttggatctcccgagaattttgaatttgcggagaatctccatttttgtggattctttgggtttcgtattatttttttcgtagtaacgaagaagaggacggagaagctacacattttctaacttacttgcaagtcgggtcggatcggattgatggacaatctaatgggccaggatccggttagactaatcgatgtgattttaatgggctaagtaagctgggcttggcaaatagccaaatataaaaggttaatttagtcaaaaaaatctctcaatttaaaattaactgacgtaaatcccccttcagtatcaatactgtaaaaattggatagacacagtaaaacgcagtgttttacagaatctcttttaatcgatttgacatcacacaaacttcagagaatctcattttgataaattaaagttttttttccactttgtgaattttaaagcctaggtaaattagtgcatatatgtaatttaagtgtacatactgtatctctctgcaacgaatacaaccttcttttttacccactaccacctgttttcgctaggcttgctggactcaaataatgtatttttatacggcaaaattattcattaaatttcaactttacgttatatacaacattttttacaaaaaattactaacatatatggaacctcaaacctcttaatgtagaaatattaataaatttttatttaaccattggactaaggagcttccacaatctactctaatctaataaagtgtatatctcatgggtatcaattttttttttcaataggtaagaaatcaaatcgttctacatatctttacgatcttgtgatattttacgagcgaatatcgtcgacataatataaaactcacaaaaaataaaataataatgatactccatataaaggaaaaagacagcaaatatgtagggtcaatataaacgcagcctcgtcgtctcttcatatattcgtctctttgtgttcttcttcctcctcagattctctttcactaaacagaaacaaagatggttttgacaaaaaccgcaacgaatgatgaatctgtctgcaccatgttcggatctcgctatgttcgcactacacttcccaagtaagtaaattaaccaaatgactattgaaaacattttgaatactttgcttcttaatgttgatgtattttatttaattgattgaaaaaaggtatgagattggtgagaattcgataccgaaagacgctgcgtatcagatcataaaagatgagctgatgcttgatggtaacccaaggcttaacctagcttcttttgtgactacatggatggaaccagagtgtgacaaactcatcatggactctatcaataagaactacgttgatatggatgagtaccctgtcacaactgagctccaggtctctccatctctcgatctttatatttcctaagtactatatccatagtataattaactaatggtcaatggtgctagatctaatttggtttgaaatggttactattgcttaatggtttcattagaatataggagtcattctaatgtataacgaaaaggtatagaatttgcattcaaagttagcgagggatttggaagttgaaaaatgatgtttgataaactcatataatcatattcattgtttagtattagtcccacatttatttctccaaaagaatataaaaggagacaaattataattatatttagtactatagttttttttttgagaaaatatgacccatacgtttctagctattattggccgacatatccatgctttcagtaacaagtggacttgctcgttttgtaagttgttctcttgatcataaataattggtattgactaatgttaaaattttcatcaatactagtggcccacttgatttgaactttgaataccaaattcggttatcgttaaaccagtcggtatattcatccggttttatatttatcaaaaatgaatcaatcaagtagtatgattaaagtagaaaacatctaaatctttgagaatcaaagtatgtgaggaaaagatggtaaagcagaataattgattagccgaaggacaaaaactacacttctgtcggcaacctctcttttattccccacatcaccagttcaccacaaacaaattttggttttgattggtccactcaactttttctcactatgtggtaccatttgattgagtttatctatatatttaagttgaaaagtgaactatggacaccgtgaatgcgtggtaaacgttgtatgaaattaatgtttgacaaaagaaaaccatgcattaaaataaagggtatgttggcaaaatagtcacttttcagaacttaattgtaaatatagggagtttactattcataattggagaattaggtacattacactattactctaatagaaatctgtgtaatagaaaaaaagtgggacatagaaagagaaatggaaattaccataggggcctttgatttttttttcactctactctctactttctacacgcaccctcttttttttttttataatatacatatatattttttctttattttttataacctctcaaatctaataattgaaatgcttatcaatatgaatttattttttaaattgattcagatacataaaaatctatatatttttctctataatttgatatgcattttgctaataattttaaatatattacatagacatttttatcaatagtcaattaattatatgtacacacttttatttgtacagcataataaatattcatatttataacaaatttatacaattcaatttattatttaacaacatatctcaatttttttatataatacatatatttgtatattttttactatttgattcgtacacttagttttgtacaacatttttagtgtacaaataaataaatgtacacagcgtacacttacatctgtacactaaaagtgttgtacaaatttaagtgtacgaatcaaactatgaaaagtcactactttgcaaatcgtgaatacccgatacatgtttgtacgtgtttattgttagacgattttattttgtacgttgcattagttagacataaaatacaatatgtatgtctgaaaatatttatttgcttgacggttttaatttgtaattttcacctaagctacatggaatcgtaagcggatattcggaagcatttggaagcggagaaacgagtttttctaaaaaaattaggatgcatgtatatattggaagtatgtgtataaattatataaatatctaattcataatattcataatatataaaaatttgaaaagatattcagaataataggtgatataaatgtctaatcgaatatagttgtatgaaagttcatgtggcgtagtggtaaatactcgcaaatgcattctctccacccaggttcgatcctatggagtttatttttttacgttttaattaaattacaggggtataatcgtaaatttaaacacaacttcttcttcccaaacaaaaccctagtagtcgccgttcctctgtaaagtttttttccttcttcttcttttttgaatttttaagttttgttcatcgttttctcattcaacttaaccaaaatgtgaaagatctatcaataatctacagatttctaccttaaaactgaagttttggacaacttttttcctcaccgatttgttttctgttttgtcaaaaacaccgaccaataaaaatgtctttacatcaccagcatttctaataccgaattctaaaattccatataagaaaattccaaaaaaattccaactctatgctacatagataacaaaaacttcaaaattcaacagatctgattccggcaagatacaccagaactaatgtgaaagtctctaactttcatggccgattatttttcttagattgactgcaaagtcaacaatcacatattcactgaataatgacttcctgtagattagtggcatgagttgtaattaataaagttgatttggggtattattgattttgtatttggtagggacaaagagcagtgactaaaaatctaattatgaatagtatactgcctagttctataattatgtttcaaaaagtgactaattcacaacttaatcctaaaataaattagaattatacatatatagaggatataaacagttgtgacttgtgataaaacctaggagagcccacccaccattaaaatctcgtggtcgatcggtctattgtcacatacattctatcatgtgaaacttcaacaatttcaccattaagaagttggtacttgtttgttcataaatggttatgtgatggcatcactgtgtgcctttgatacttgatagtgtgaatacgataataactagtaaaaaatatcatagtactttattgtgattattatcttgtcatattggttttttgcataaaaatatatatagcccattatcaatactataaataaaaattaccctttcgtttgataaaaaatctaaagatactttgatcaattagatcactgaaattcgtagattcactaatttcgtaccaatagtcttttcttttggtaaaagctacagataagttatgtgatagtaaatgagcatggaatttgatttgtcataacacttatatcaatcttttaaaaagaagattcataattttgaatatttaggaacagaacaaatgtgtaaacattataattttgaattgtttggaaaaacagaaccgatgtgtaaacattatagctcgactgttcaatgcgccactcgaggaatctgagacggcggtgggagtagggacagttggttcttcagaagccatcatgttagccggattggccttcaaaagaaaatggcagaacaaacgcaaggctgagggtaaaccctatgacaaacccaacattgtcaccggagccaatgttcaagtaagtatatatatatacagcttaatctgactagttagaccgttataataaatagaaattttggctctcaatttcaggtttgctgggagaaattcgctcggtacttcgaggtggagctaaaggaagtaaacctaagtgaaggttactacgtgatggatccagacaaagcagcagaaatggtagacgagaacacaatctgtgtcgcagccatattgggatccacactcaacggtgagttcgaagacgtgaaacgtctcaatgacttgctagtcaagaaaaacgaggagactggttggaacacaccgatccacgtggatgcagcaagtggagggttcatagctccgtttatctatcctgaattagaatgggactttaggcttcctttggttaagagcatcaacgtgagtggtcacaagtatggactagtctatgctggtattggttgggtcgtgtggagggcagcagaggatttacctgaagagcttatctttcatattaattatcttggtgctgatcaacccactttcactctcaatttctccaagggtatgtttataactttcatattttatctaggtcaagtaattatgatgttattttacgtagcattggttatgaacgtttttggttgttgtaggatcgagccaaattattgctcaatactaccagctcattcgtcttggattcgaggtgagtctatttaagccgaaaatatgttttgttacattttcaatttataatgtcaattttctttcgtttgttacgtttatgactctggtatttgttacatcgaatgtttgatttgattaggggtacaaaaatgtgatggagaattgcatagagaacatggtggttctcaaagaaggtatagagaaaacagagcgtttcaacatagtctcaaaggaccaaggagtgccagtcgtcgccttctctctcaaggaccatagtttccacaacgagttcgagatctctgagatgctacgtcgttttggctggatcgtcccagcttacactatgcctgccgatgcacagcacatcacggttctgcgtgttgtcatcagggaagatttctcaagaacactcgcggagagacttgttgctgatatttcgaaggtgcttcatgagctagataccttgccttccaagatatctaagaagatgggaatagaagggatcgcggaaaatgtaaaggagaagaagatggagaaggagattctgatggaagttattgttggatggaggaagtttgtgaaggagaggaagaagatgaatggtgtgtgctaagcaagtgtgttgcctttgtgtggaaatgaagaggtacttgcgaggactttgcgtttatcagtttatgtgtttgtatatctatttgatccagttattatggattatatacgcttgaaactcattttaagccattgttattgaacgtttatcaaatactttattatgccaagcaagtcaaacacatgcttgttgattgaaatcaagctatagaaatctcttcttcacatacagcagtttagattcacaatacaacaagcgaaacgataaagtttcttaaagagccttgagaatatcctctgcgctggaaaccgtgaactcgccaccagattcaacattggctacagtcaccttaaggttatcaagcaacaaagcgaatctccttgacctaataccaagacccttgtccttaaggtcaagctcaagtccaagaagatgcgtgtattctccagacccatctgctacaaacttcacatgcttgttctctggatatgtttttccccatgccttcatcacaaatggatcattcactgcaacaaaagatgcaaacattcatggcctaagtatacaaaaactcatagaggccaaaacagaggagagatcaaaaacatatcaattcatacttaccactaaagcaaatgatctcatcaataccctttgacttcagctcctctgctttcccaatgaatccaggcacatggctcatactaacctcacaaaaaccaacacaaaattctcaaatcaaatctaacaacaaaacccacatcttataaaactaatgcaaaggataaatctaaaaacgtttgagactttgtagtttgtacctgcatgtgggagtgaaagcaccaggaacaccaaagagaatgacttttttaccggcggcgatagagtgaacggagacggtctgaagctgatcattttcatcgaagaaagagatagttccgtctggtacaacatcgccgacagtaattggagccatgaagagatctctgtggttttgaagacagaggaaaatagaagagttttgtttgacttgagtgcgaaaatgtatttaggccttaggacaatttatagtgctttacggaatgatgtaaatcattaatagatttctaattttagtttgaccataaaaaatataatagaatttctaaaattatgattaaaacaaaaattggatgtaaaatctagaaccaatatctaaaaataaacttttttttccaaaaatacaacattttgtttaagtaaccctcactaatagactcatctgcaagaacatgtacacatattttggaaaacattgtatgacgataaaaattgagtctgatttcttcgtgagcaagcaagattttttaaatccaaaattaatgcatcatattcgtaaccttattgagggaaacaaattaataattcaaatatgctattttgattaggaaatatatgaaaatcgtttctctagagaatacaatcgaatagagagagaatatgcccttgattagcttttaattacataccaaacaaaatgaatggttaagactaaatctatcgtaaaaacattgttaagacctgattagttattatttgatttcgtgattcgacctatttgatcctagcccgcccatatgataaacacgcggatcctatacttttctaatttcaataagcactctaaatgctaaaattgaattgcaatcttataacaatttagtataatttgcaatttgtacttctcttactattattttcaaattcaacatgttgaattgaataccgcacaaaacaaatagaaggtcatacgcttacacaatcaagataagcattagataccgcacaaaacaaaaaaagggtcatacgcttacacaatcaagataagcgtcatcggacatatatatccgatgagcaaggctaaaagatagagcggtaaaaaaaatagagacaaacttaccaaagtttgataatgtgtgagaagcctatgtacattataaatgcaatatagcaactatacttaccagaaactcaggtaacctaactttttggtatgtgtctaccatagtcaagaacaacaatggcaaaatttggcataaatgttcacgtcaatgagtcacatctttcattaatcaacgcacagaaaaacaacaaaaccaaatactttgttatgccaaacaagtcacaatgaaaccgctttattacaaccttggttaatgtctgagaacaagctatagaatcctctactacacatacagcggtttacatagacaacacaagtggtacatttcttagagagccttgaggatatcatcggcgctggaaactgtgaattcgccaccagattcgacattggctacagtcactttgagatcatcaagtaacagagcaaatctccttgacctaacaccaagacccttgtctttaaggtcaagctcaagtccgagaaggtgtgtgtattctccagacccatcagctacaaacttcacatgtttgttctctgggtatgtttttccccatgctttcatcacaaacggatcgttcactgcaacatatcaatccaagtgataacgtcaatgccataaaccatttgaatcagtctaccatcaagcaaactcaaccaaatacattaaccaatactctgaatctcttctacaatttactattatgaataccaactaccattagcctagctttcacatgtttgactagcaagagatcagatttcagaagtagacacaaacacaaaggtcagaaatagtacaggttatacctaagaacagacctgatatcaaaccatatacatatgatgaacagttcactgcaacaatcgatccaaatgacggcgtaaatactataaaaccaagcagcatatataaacgtctgccaaaacatttgcacaagaagcagactcagccaaatacactaactgatctaattgtatactctacaatttacaaatagggacaccaactaccaaacgaatctaataataggtaagaacatatcatatcatagaggtttcagaagtatactcaaactcattatagagatcaaaagcatatcattcatactcaccgctaaagcaaatgatctcatcaacaccctttgacttcagctcctctgctttctcaatgaacccaggaacatgcttcatgctaacctcacaaaaaaacaaaaacaccattctcaaatcaaatctaaagatccatcatcttaccatcaaatcccacatcttatacaactaattagaatgataaatctgaagaaacaaaacctaatctgtattgagaacaagaaaaagaaagatcaaaactttgaaagcaaattaagtgagagatgatgaaaaaggttgaaactttgtacctgcaagtgggagtgaaagcaccaggaacaccaaagagaatgacttttttaccggcggcgagagagtgaacggaggcggtctgaagttgatcattctcatcgaagaaggagatagttccgtctggtacgacatcgccgacagcaattggagccatgaggagatctctgtggagttgacgaaaggagacaaatgaaagtgtttggacttaatgcgagactcagatttttagggctttcggacaatttatgagcgttttccggaatgagatttgtttattttctgttatggtaagaagtttccagaatgagataaaaggatatttctaagataatgatctattagatgtatattggctttctaaaaatacaacaatttggtgttaggtggtaggtaaggtctgtgttacataatattacaaatatatgatattacatacaaattatataaaaatgtctagtagaaaatggaattattaatttaagcaaaatttggacaaaacatttatttagttttattaaaaaatatataaaaggcttataactatgtgctaaaatttagttagaaattaacaaaaagaatacattaaaacaaaacttatgcatttttagatggtcgtttatccatcgcttgagtatctagaacttagtcggggtctcgacaaccgcgtataccactttaaaactattgttttaatagtcattctttttatcgttgatttactatggttttcaaattatataaaaatcttagtcgtaattcatatctcaatcttctcgtgattttcttttggaatcactaaaacaaaattcataattgtcattattggtggaaaaaaaaaggattcattgctggatttggcgaagtttccgattaaccagatttagaatctctggtatgtgttaaaggttgtggaagcaaacacgtgtccttagcttattcctattgtttttttattcttggaccttctttggactcttttgaaagttatattgttagagcaacttcaatggttggattcaaaaattgggatccaaccaagatttacaatttgtataatagaaaagcaaaaatttagacattttgaactttttttttattttgagctatccaatggtgagatccaaaagtgaggatccaaaattttcaaatttgaaaaaatatattacaagcacaaaatgttacttgacatacactcaaaaaaatttatatgatttttttttataaattttttttatgggttgcttttttatgtttataactatggaagtaattgcaaaatctgtctctccagctaaagactatccaaaatggttcagctagtaaaattatgatggtacctccttttcgataaatatatagtatatggggcaagatgcacaaaatattatcttgtttaattcttacacgggagacaacaaaatctcttatttcacaataataaatctgggatttgttctccataatcccagcatcattttattgtggaaacaaactcgcactgtggcctgttttgtaccataggttctgtccaaacgcaaattgacggttcagaacgtcaatgattgccctccgaacgtttgtgattgtcaatcgacagacagtactgaacactcttaattagcatccactacgtaaccattaatgttgtgtctattggaatgcgtacttagtttttgcccttctaagttggtgcgaacatttatatatacatacagtaatatctttctggttttgggtatcaagtctttggttcgtcgcatgggaataatccatagacgtttggccaagaggaaaagttaatgtagaaatttcgtagacttgttccgtgttaaaagacaatctttagagaaatcaagaatcaatcaccaaagtacataaataatccatgaggaaaacttggaaataagtttttggacgatataaaagcatatatagttttttttttttgtttttgtatgaattataaaagcatatatagttacttgaagctttcgtaagcttggatgacagaagccaccgtcccaaccagagtcaaaagcaagagaagcacggcggctaaagtagctgtgccggtccacaagtcgctgaagtaaacttttctgagggtggcccaacacctctttcttcgagatttatagtgagctttgagatctatggctatgtcatagtattgggaggtgtatccttcgtacacaccaacctttaacttgttcaccatgtccaccaccaagcttggccgacccatattgttcattaccacccctatgttccagcaacacatgcatatttttcattcatatatgttaattaatagttaaatgtattgatttagtgatgtttgtacctttttcgctgagtagctcgacgtctctgtcggaaactatcagggcatttaagaattgtatgtagtgcgaggtaaagggtattatgccatgctggcactgctcaaatgcaattacatttcttagaatcatatctgtcctatcattagcccagaaactcggcatcgataagcaacctttctttaactccacatgcaatgaaacaccttcaaccctctctctgtaggaggaggcacaacaaatacgtttccatcttatatatatacatgtgactatgaaaatagggatgcaaaaagtttaatcatttatatatgttttgtcttttggcccagtttctcttatttatgtaaaagtgtaaaaatctgtttcattgccaacatatggaggataagtataaatacatatgttcctagttacataacataaatcaaataacaaaattagctctacgtttcatacatccaaaatatttgatcgcatcttttttatttagtatattctttttttggtcatattacatagtatatatataactatattgatcatttattcaaatatatattatttgtagtattagttttgtaaactcaaaatatctgtctgcattctttagctctgtagtattcatgtatatactttgctatctatatcattatcttgaatttcctaaataacagttagtttaggttaattatgattctttttcatccgaggattatctctctttaacataacaaaatagaaaatgttgcatctttttcataatattttgttgaatatatttataatttttttaagaaactgaaattttttgtatactcattataaactttcgtttaataatttttttactaatgatcgcatggttcaccataatatattattttataatatgaatcttaataaatgtttatgagggttatgttgtttaatcatattgtttgtaaaatatatcttcatatattattaggaaacaaatttcttttagagttgtctcaacttattatgacttttcggttgatatctgttttcactttaaaggtttttaaaatctttttcctaagtcccaatgtatatatgtttcgagtggagatgtacgattcaagtgcggataaggtatggagcgagttaaatagtaacaaaatatatacatttatataatgtaaatattttttgttctattgaaactgcatcgtactgtgtggtttcgtcaccattcgaagccatatagtatttttaattgaagtattaatttagaattccacatgaatactgatcttatattttaaaattttagtgtttacatgacaacccacaacttttttcaaccattaggaattctaatactaagattgcgataaaatttcaaaaatgtattttctctataactttttttaatcaaaaatacccttaaaatatgaaatttattcaaatgtgtgtaattttgtaaaaattatatacaaactacctttatacgtgtgtaaaatctaaaaaactatgatctatccaaatctaatttctattgtcacacttttttaaatgatgctatttaccttttatttgttggtaatttcgtaagttcagagtcagacttgtctcgcgtaatctttatgtcaagtttctcgtcttgttttgagagatctaaataatcgtatgactgaaaagaagaaacgttcttgtcaaaactatttcaaagcttcataccaaaaatatatatacatatttcaaagctagtttaataacaatctataatccaaagataaaataaacaattagacacataaaattcatatagatggagatgaaaaatgatgtttgtttttttataatttaacagagcatttgaatgaattagttggatgaattatctgaatatcaaactcatttggatgaacttatttggaccatttggatggagataattcattcaaaaataataaatgataaatatacccttttttacactcatatattaaataatatcaattttctatagatttcttatttaatattttcaaatcacatatttgcatccaaaaagactctaaaatcgtgaaatcactgtttattaatttctgtcaaaatcataaaattatttttccccgccaaaaaagaaaaatcatttttcccgccaaaactgtaaaatcattttttctgccaaaaccataaaattattttttccgtcaaaccgtaaaatcaatttttctctaaatcatggtttcacgccaaaatcgcacaatcatatttttcgccaaagccactaaattgttttttcgtcaacaccgcaaaaacatattttccggcaaaatccataaaattatatttcccgccaaaaccaaaaaattatttttttccccaccaaaactgcaaaaccttttttcccgccaaaattattttttcttgccaaaacagcaaaatatgatatgtttggtattgatatttggtaatgatgttggataattgttaaaatgaaagcatgaatattttagccatttttatttagataagtatatagatgaaatataaaatgatcaagcaaacaaaaatctatttaaatgcattatttagatgaactaccaaaagattaaacaaacatcattcaaatagatcatccaaatggataatttaggtggatcattggatgaaaatgccaaatgaggaaacaatcagggcaaagtcgttttgttagacctaggcttttttttgttttgttaaataaacctaggatatttctaaactaaataaatatgtgtatgacagtgaaaagctcaaatagcaaggatttttaactccaagcaaaaacgaaccaaaggcttatcagaaacgaagatatagccgtaatcgaagatcatttaccttgaaattaactcctgcatttgataggttttcagcgttccgcaactctgtgatagaccatttaacgcgattcagtgagtactctcgtggaggaatgtagtcaagcgattctttataaacacaccggtacatgtctgtcaaatgcatgaagtttttcttctcttcgatctttaggccaaaacagcgcaagatgaaactgtcaagggtgtgtgaatccaaatacttcgtcatactgaaactgaacaagctatccaaaatgaaatagggaagctgattctcgagcaagagtaaatcattcataacgattgcaaagtctaaatttctgtcatctgaatgtattcgatcaaatccagaaagtctgataattaactccataatgaaaatcgaatcctgaaggataaggtctacgaataattcagatggtatccattcagttgattcttcatagcaattccgaatatttttttcttcggtttgtatggttttcctcatttcctcaatagtatcttccccgactcttttggtgaaagattcgaagtacgtcttctttgtgacttccatcttgatataatcttttttaagatgcctggtaaaaataaatcgacatattaaactttaattatataaatgatcatattccagtacgccactaaaccaaaattaggaacaagttgtgaaacttggtgtttttatctaaaaaataattaacaatgaataatatgaccgataatttgatatagttttcaatatttgaatttgctttatttattttttgatcaaattatttttatcaatgggttgtcgatagggttttatgttcatatttatttattttagttttataaccaaagggtgatctgggtttctaccctccgagtgagtaactgagtatatccgttgagtcggctactcactaatttttctggtggtttaaattatgacacaatttcaactgataaaaggttatttcccggttaaaaggaaacttagtgcataatgttttaaagcataattgagaaaactgagttaagagtttatccttgttgccttaattcaaaccaaacttgaaagcttcgtgcatacttcaaatctcctttattccgaattctgcttaaccggtttcaaatcaaatagttttttttgtcaagcaaaagaaagaaaaaacatttaatttgaaacgaattgtgaaggagatttgaagtatgcatgagaatcattttattactaacgtaatttagaatgaatggaatcaacagacaccggtaacgatttgttatatgtatattccatccatttaaattgaaatgaggtttctaagagtaggtgtgattcgcgttcaggttattaggccatctcaacatgattgtagtaattaaggataaaacgaaagacatgcatattgtagtttcaaatattcaacacttgtctccattaacttccgtttgaaaacttctgaaaaaaatattggcggattctgaagctaaacttcttctaaactttgttttaaaaaagaaagacttcaataattaacatttttaaaaaagaatatccaaaaaatgcgaaaagaagtattatgaataccataatatttagtgacaaagttttttctaagaaatttagaagatttcctatatataaatgacacaaaaatattttctaacagtttataaaatattatggtatttactttgttacgaattttatggtatttgttgtaaagaaaaatatgtgatatcctttggaatattccttaggaaaacaaaaacagaaacagaaataaccaaaatatataattcgaggaagtccttttttttttttttgagcaaaattctaggaagtatgtatgctttataatttaatagatctggattttccagatctcagaaacagcttctcagatctgaatatgctaattccccgaatttgatctgaatccgaagaaaatagcgaaacaaagtattaaatagaatataatctgattgatttcataaacatttgagaacattttctaacatatttttcatgaacattattaaagatactccaagtttttaaaatgaagtttattttttgtgatattttcaggtactcatcagtttattatataatatacagattttttttttcgacatataatatttagatatatctaatacatatattaaaaaaaatatatatatcaaaatggatccaacttatccggatctagattcccgaaaatctgagtcctaacctgttttttttttttttactaacctgtttttgaattggatcggatcaaattcaaatattaggtcaaatcgtaattgagatgatagctgtatttgttgataaatttttgagttcttttacattttaatattattttaatatattatcaagaaaatataagcatttgcccaaaaaaaaaaggaaatcaagaaaatattgacgatattgtacatatatttatcgtcatatatattcgtctgtgtgtgtaatgtgtttgacgtaccatggattgctacttgtttcagcgccgtccttagcagttgatttgagagaacgatgaagtgggccaatgacgaccaccttgggtgtataggcttcaggtttcactactcgcatccgatttggtactctataaatgcagggttcctgaactttttcatccaaatctatatgaacttccatcttggattagtccaaggacttttttctgttttgcacaaacaaataaaaagttgaagactcgagtataatatattcttagatctatttctaaaccgagatgggttctatttgaaaattggtttcaattattatctttgttcacatcatgcatgcttatagataaatatatatatatatataaatatatatatatatatatatatatataaatatatatatatatatatatatatatatatatatatatatatcaattaaagacataactataaggaagaaagcttactggtaatatggatgagctatgggaagaagatccgtctcttttaaaccctttaacgatttttcttgtttagaaaatttgacagagagggggtatttcagtattatgaaaatttgttcgaagtagatgatcatatataagtcaatgaataacatggtacaacttgtagttataaaaagagagatttctttaaaagcaggaagatgtgtcttttagtattgataaaaatttttgacagagagcgaacctataagtcaatgaataaaaatataaaaatagtacaacttgtagttataaaaatatataatacggaatacttaataattcgtatgggcctcaaatttttaatggtcccactctgttaataacaatgatctccaagtattaatacagtaaaacatctagaactcgcaataatttttgttagaattcgtctataatatttttacttcattaaaatttgttggtgttgtcttctacacacgatacttgctttctcacttgtacttaattgtagaaaattaatatttacaacaaaaaaaaacttattttaattagaaattttattttaaactaagaaattagacaaatttttctacaaattaataaaatatataaatccagattttattaatttataaaagtttttctggttttttttattaaaacatgaaaatagtacaactcatcctaattgttactttatgaaaatagaataagtcattgttgccatatttcgccatgataatacaagcctagattagcttggtaaacctcgacttaattttatgataaatacagttttggcaaaaaaaagaaagaataaactgcagaaatattatttttagttttttactcggtaatacatcaactgaacagaggtaaatattgaataaaaaaatataaagttgtgctaaagaggttatccaacaaggtaatcataccctttgtgttgcgaaaggaaatgagaatgtgaacacgactttaatgacaattaatgatgaccattttcaataattttcttcatgagctaattagataatgaagtagttttaagaaaaaaaaaaaagtaaatgaagtagttggaacgtagcttccttacattaactcttctggacttttaattatatatatatatatatatatatatatttatatatggattcgtgctcgcaggctcacagcatcaagttaatacttaataccgttgactagttagaagaagaaaaacacccatcgtgcgtttttttgtgtgtggccaggtcatactactattgctaaaacattagtaatcgataaataagactatttacttaactaataataatactataatagataaccaaccaaaattatactttcatgtttctcaatacccaagctttcaggccagggtttaaatttcgagctgaaaagcttttgtttcaaacaaaggatttcgatttcgtgtcattgtttagatatcgtgttgagattcacttcgggtttatctttcgggttgggcattagttacgaagttggcttaatttaattttaaatttaaaacgcgttttagactagatttaacaaaaacctcaaaatctaaacaccaagcggttgccgatcgattttaaaatattgtagttctggattggaaaagtatgttttttttgtgtagttccttaaagaagtctaagttttatgtggttggaactagaaccaatatgaaaaacatacggagtactcatctttgttgttcggattttattaagaccaatatgaccaaaaacagtcactgtggtgccattttttagtagattaatggtccttttcaaatgcttgaagtttgttaacattggagtctgctattaatggtcaattttgggaattgatacctcaggtttagtgaactcaagaataaggaaaaatagtatactacggtttctttgaaccgtagcttcaccatcggtttctctaactgtcgccttaaccaaaatgagactttgactacaacatatagtcccaaacaataatcaaagataattctctcttttttctttttttcaagataattctcttcgtgaaaactctctgatgctttgttcaaaaaagtagacaacaaggctagaggaccaagaatgttttggtaccatgacaaaaaaccacaaaattaagcaacatctaactttctatagtaataataatatataagcataacatttctttacaaacacattttaaaataatcatacataaatgaaaaaaaaaaaatcagtcatatcaaatctgttgagaaattgagtagtgggagggtaattaaaaaataataatcactgcttattcacattttatggagaagagaagaaccaaatcaaatggttccaagcatgagtaagaaaccataggaaatgcaaaccatgtatccaaagaagaacaagatttgcatttaccccgattagtcgttccacgcatacccgtagtacaagcaaaaagcgcacattagcaatccagttgatccaccacagacgagcaatctccaccaccatatggtcttcagatgatagttggaaaatatgtaaatgcaactgtgaaattgaccagaaggatgaagatgatgaagagaatgctacaggttgtatataatttgtacttaaatctttgatcaccctccatttcgtaacaattaaaaaaaaacaaaaaaaatcctaaaatcttgttcatattgaataagagatgagaagaaacaaattaatgttgctaaaagaaaacaaaggacatataaactagactttgtcaattgaaactaaccaactctcgctttctccttttgccacctcctcttgattgattcgtttaccatgtagatcatatcaatgccttttataatcgctctgttctttcgttttgcctcctttatgttgcttgatttgcactacacttggaacataagggcacacaagtggccaacagtttttgtctgccggttttccaagccccaatttccacaagcatctagcctctccattaatgatgtcaatactgtcgtgcgttaggtcgcctttagtgtctctttctttattagaaaccacaacaattttattttcctcgtcaatgaagaaagtctttaatgaaagaatttcgtgaaggtatggtgtatccattgtgaagaatttgctccacgtcgcattgttgacatcaatcttagtcgtaatccatagctcaagcttatatgctcggcaattctgaaataaagcagtgattttatcttctctaaccgaagatagtgacgcaaactgtgcaccccaagcactaaatggcagaggtagaagcggtccaaatctctctcttgtaaaatcaaaacagattatatgatcaatggatccgtatgcgtgccgttctttagcgccccagtaagtgtttcccttgagagaaaggccacgttcagacattataaaccagtgtggagacacatcaagagtagtccatacatcagaatcaaaatcatagatttcatactggagaggtatgttttcgctgaaaatgttgaaattatctgtaaccctcaagattttggggctacgacaagatctgttttcactattatttccgtatccgagagcgtacttcttccatccactaacgcagcaaatcaatcttgtttggatccaccttgtttgccccaaatacggattccaaaccacaatcttagtatcatcatctttcaagatgcataacaataaaccctcacaacaaaagacttgagatatcttgacctgttctgaatcgtctaggcaagtaagtttacctagagtctctatggatggaatttcattgactgcaatgcccattaaataaacattgtaatccatcatcactatcatccgagtctgccttagttcccttgttgctgcttcttctttgccaatgtgcatcttcgtaaagctctggcttttgaacataccgttccaccttttgcaagttaatcgcactgctctcatatatttccgaggaactctagagataatttcctctaacaaatccgttggaagatttgacatcgtcgtcgtcgtcatcttcataagttgaaacaaggaacaatcaccaccagatccaacattgactacaatcaccttgaggttatcaagtaacagagcaaatccccttgacctaacaccaagacccttgtctttgacttcaagctcaagtcccaaaagttgtatgtattctcctgacccatcttctacaaacttaacatgcttgttctcagagcatgccgtaatcataaatgggtcatcccctgcaaccaatcaaaccattgcgtcaatacaattaaacgttttgatcagatttcagaagtatacacaaactcatcatagagatcaaaaacatatcaattcatagttaccacttaagcaaatgatctcatcaacaccatttgatttgagctcctctgctttctcaatgaatccattcacatggttcatgctaacctcataacaagaaaacacaattctcaaatccaaaacccacatcttataaaaataattttaaggataaatcagaaaacgttttgaaactttgtacctgcatgtaggagggaaagcaccggggacaccaaagagtatgactttcttaccggcggcgagagagtgaacggagacagtctgaagttgatcatcgtcatcgaagaaagagatacttccgtcaggtacaaaatctccgacatcaattggagccatgaggctgagaagcaaagagatttgaagagttttggactttgagggaaaatgaaattagccaattagggcttgagagtattttctatgaatatattattatgtaaaaatataaaatctctgtatatatatatatatatatatatatatatatataaaagataaaatctttcaagaaataaaatcaatttgattttagtcttctttagaaaaccttattaattttgtagtaattttaatgaaattttctaaaatatttgatggtaatttaattatttttgggaggggtggagaatttaaatatgctgtttttgaaatatatttaataaattgtaaaaaagaaatatgctgtttttgaaatatattttatatattcatcaaatttgataatacacttcatcttattgttggcttgcaacagatgacaactaattaaacaaagaacagataagcttctttttttataaatttaaagaaaagaaattttcaattaatggtagtatatatttgtaattgaaagtttcttttaattttagttgtcatttaaatgtatctaggatttatgatttatgatttatgtttttttaaaactaagaatattttaatacctttttttttttttttggcaactaattagtagaagattaaactctaaaaaaaattctaacagaaaaattaaaacttacgaatcattatctatctatataagaattaaaaaaagagtttaacaaatcgtgcgtttggataatcagaagaatcattatctatctatataagaatcattatctatctatatataaagcagttatatacttttctttcttcaaccgttttatagactctattgatctcccggaactttctgttaccttcccatggataatcagaagtcgccgaagcaaccaacctcccaagacttcaccaaatccgccttcaagcttcttgcaaatcctcacattgaaccgacggtggaattcatcgccgccctcacaaagccaccggagaatccagaagataaagacatcaagttcttttgtttctgcgtcgccaattacccgggatgcttctccctcaagctcatgcgtgtctactcctcgaaagagccacgcgtcccatacgagatcagagagggtgcgatgagatgtctccacgttatcttcatcatagaagaagcctccttgaatttagcagtggttcacatactctcgcctatactcatatcatgccttgaagaacaagttgtctcggacaccagtttaaagattctttcaatgctcgtgaaccgtgtcgctttcgagatattcaccattcaggaagaaacgtggtatgacctgcgtgagtttatctcgtctaaagcggaatcagagtttgtgaaagtggtttccgtgttcaagagcttgtcgatgcctttggatggagaggagtttttgattcctctcatggagaatcttcttccagcgatcttgaaacgtttaggtgacaacgaggaagatagttcgggccagtggggtttagcgtttgtgggtggtttctgtgcggctgttcacttgttggagacgacacgtgttgatttggtggagaatcttgcgaatgagatgttgaaatcggtgaagagaggaatggaattagggtttcttgggaaagctcttagggatgttgaaatcgctgtagtggaacaattatggtggtattgtactacagagttcagattcgttttgggtttgattcaaagggttgaggcgattgtcactgaggagacaacaaagaatgtgttgcagaggattaagatagttgtgaagaagaagatgcttgaatatgcttaagagattgataatggtgacgaagattgtcagcgggaatgttttggttttggttttgattttgatttgtgtagtttgggtgtttacattctggatgcttcctgcacaagtaaacaaattcttaagggcggacgaaaacacaaacccttcatcgtaagtcgtcgatgtgatgtaccgtacgtcattcagtgtttcactcctctaggcttttacatcttttaacttttcggttttaggcagtaacatttagagttagaatctacaaagattaatcaaacacacaataaactttatagaattataatgagtagaacaaaagaaatagttatatgaactcgttttaatttgcataattaaattattttttttaaataatgttaaattagatttaaagaaaaactaacgtttttacaaatagtgttatgtgtttgatacaaacaaattgaaaaacataaattttttgagatttcttgtgattaaacttgattttggagccaaccatgatagctagcgtcgtatcgtcgatcctgatttcgtatttgcttatcaattcactgcttatgacgcattccgtttctttccctccaaacagtataaactgtggcttgaaataaatatttcatggagaacctctcaacatgatcgcttcgcgaggctgagactgtattgatgagctgagatcaatcgcttgtatacccccggttaaacaatcctatagcaagcgtatcctagattaccgaagtaaaagtgcaagagaagaagaaatgtctctaatttcaatgcataattaaattaaatagaattaaacagaaaaaagtttaggaaaattattagggaattc

SEQ ID NO: 121 - DNA, 101933 bp, Arabidopsis thaliana
gaattcagaaactttcatacaaaaactcacaacaatcaagaacagagattctgtaacagtgactcagaaagaataaagtcaactcaaaaacccattaaattcttcaattctagtcaaaagataaaaagactttaaggttatccataactatagtttaactcaacacagaatctaatccaacaactgtacatatatgtatagtgaaattaaagaagaagaagataccgagagagatgaagacaaaggctgagaaatgaaagaagaaaaacccatctctgattcaaatcttcaccactaattgccaaaaattgatctttcatcaccttcttcaacaaactctctgcatatatataatgggaatggttgcgagatttccactggataaaaaaaaacgaaagtggaagggaaaaaagttgtctttcactctttctttgctcagtgtcgacaattatatacaacactttttgctcatccttccatctttataaagttttcatcttttttacttcaatatttgtttaaactttgaattccggtttagtttattataattatttggattttgtttgtttatttaattaacttctaatttaatatggatcaattagtagatttaagtaacatttttggtttacttcaatcaatgatatatttttactattaccatataagtttttattaaaccaattatacataaaaaaaaaagttcaatacaattcaatataaaattttgaatatattgataaaaagttaaatatatatattttatttttgtgtgaaaaaagttatatgtgtatgttaatggagatttaagtgaatttaggtggacaagacacaagtctagtttcaggaaagaaaaagacaatggttagtgtttccccccattaattcggttgtttacttttattacatttatatatttttagttttatattcacaacctggttattgcattaagaattgactgaaaaaaagatttaaaaaatacgttaggacaagaaaaagatagacatgtggctaatactcattgttggagaaattggatggagtaggaagataacttgggtgggctatttggtatgataacttatttgctttggtattaatgggccttttgacccacccactttgtttttttgctttatcactcccacctaatttgtttatttaacaaaaaaacaacacatgaaaacaaaaacaaattgtgaaaaaaagaaaaaaaagacaaatctttggtatctcctatctttcaatctttctgtggtatttgagcatttcgatgttttcgatggtgaccaaaaccttttggtaaacaatatgtataattcttgagattaaatggtacaaaaattattaaaaaggggtaaaaatcgtttaaaatatttcaaaactttacactatatcagtaactaattaggaaaaaattaaaaaaaataatgaaagaaaattttgagtttttacgacccacacatagcttatcctatttcgaaagtacctaaacaaacgactccaaaatatctttatgtgaatttgggtcaagtccctttgattgaggaaatatatgatccacaagatccttgaatatacttggtaaaaatgaatattcgagactcttatccagaatcctatcctaaacaaggcacgtccacttatgtatccatcactagatttcaagtgggtcatcttttgcttcaagatattgttactctaaacctctcaagctcgttaatcatgtgacaagaattgaatgtgaaactaattttcttaatgatttctttagcgactcatggttcttaaacttgtaaatttcatatttgtagccgcattgtcctattttctttttgttgatatgcatatcaaattgaaagacttatagaacattacatatttatttcatcagacagttgagaatccgatagaatatgtctcgcaaaccggaaaacaaacgttaagtccggaaattaaaacccaagaaagaagaaaaaagcagaaaaacaagggataaaatcaaagatgggggataaagttttgaggtttacacaaaagcaaagggaaattaaccggtgaagcttggtggcttgtaggcaatgaaactgatgcactggacttgacgggtgttgtcgaatccgatgatcctaatgaaggcattggggtactccttcttgcactcttccacttccttcaacacttgagcggagtcggtgcaaccgaacaagggaagcttccacattgtccagtaccgtccatcatagtatccgggtgagttaccgtgctcacggtacacaaatccgtgctatacaaaccacatgttacaaaccactcagataacattttgaacatgtttatataaatcaagatcctaatatattaaaccaaattttcctaagatctagctagtttatatagatgtttaaattttgtttaattacctccaactcgaattcaacacaaggaatccacttgttgcggataaggtagtcaacttccttagccaattcggaatcggtaaggtcaggaaggtaagagagagtctcaaacttcttctttccaatcggaggccacacctattttttcgatttttccaatgatattagtttatgtagattcgaagaaagaaccgaaaaaaatcatatggaataataaaaaagtgaaagaagaaatataaatgacctgcatgcagttaactcttccgccgttgcttgtgatggaagtaatgtcgttgttagccttgcgggtggctgggaaggcagcggaggacttaagtccgttgaaaggagcgaccatagtggcctgagccggagaggcaaccatagtagcggaagagagcatagaggaagccattgttcttctttactctttgtgtgactgaggtttggtctagtgctttggtcatctatatataatgataacaacaatgagaacaagctttggagtgatcggagggtctaggatacatgagattcaagtggactaggatctacaccgttggattttgagtgtggatatgtgtgaggttaattttacttggtaacggccacaaaggcctaaggagaggtgttgagacccttatcggcttgaaccgctggaataatgccacgtggaagataattccatgaatcttatcgttatctatgagtgaaattgtgtgatggtggagtggtgcttgctcattttacttgcctggtggacttggccctttccttatggggaatttatattttacttactatagagctttcataccttttttttaccttggatttagttaatatataatggtatgattcatgaataaaaatgggaaatttttgaatttgtactgctaaatgcataagattaggtgaaactgtggaatatatatttttttcatttaaaagcaaaatttgccttttactagaattataaatatagaaaaatatataacattcaaataaaaatgaaaataagaactttcaaaaaacagaactatgtttaatgtgtaaagattagtcgcacatcaagtcatctgttacaatatgttacaacaagtcataagcccaacaaagttagcacgtctaaataaactaaagagtccacgaaaatattacaaatcataagcccaacaaagttattgatcaaaaaaaaaaaacgcccaacaaagctaaacaaagtccaaaaaaaacttctcaagtctccatcttcctttatgaacattgaaaactatacacaaaacaagtcagataaatctctttctgggcctgtcttcccaacctcctacatcacttccctatcggattgaatgttttacttgtaccttttccgttgcaatgatattgatagtatgtttgtgaaaactaatagggttaacaatcgaagtcatggaatatggatttggtccaagattttccgagagctttctagtagaaagcccatcaccagaaatttactagtaaaataaatcaccaattaggtttcttattatgtgccaaattcaatataattatagaggatatttcaaatgaaaacgtatgaatgttattagtaaatggtcaggtaagacattaaaaaaatcctacgtcagatattcaactttaaaaattcgatcagtgtggaattgtacaaaaatttgggatctactatatatatataatgctttacaacacttggatttttttttggaggctggaatttttaatctacatatttgttttggccatgcaccaactcattgtttagtgtaatactttgattttgtcaaatatatgtgttcgtgtatatttgtataagaatttctttgaccatatacacacacacatatatatatatatatatatattatatatcatgcacttttaattgaaaaaataatatatatatatatagtgcattttttctaacaaccatatatgttgcgattgatctgcaaaaatactgctagagtaatgaaaaatataatctattgctgaaattatctcagatgttaagattttcttaaagtaaattctttcaaattttagctaaaagtcttgtaataactaaagaataatacacaatctcgaccacggaaaaaaaacacataataaatttgaattctgacagtgaactctacttttgaattctaattatagagtgaagaatcttgatagatgaaagccataaacatgtttgtcgaaactagaaagtacccacatatcataataagatgtttctaattccactttgagactcagtcaaacagttaatatcttggacaataagaatttgttgaccaataatcctatattacaagaagccttctattattttaatcaaaacattgaagctcaagctcctcgtaaggtaaagagcccacaaaattccgaaaaccatggaaaacgcgagtccctgggtttgcattatattttctatatttgtttttcttttctcctaaaattatggaagtgattggaagatacaagaggttttgtccaaacaatttaaactcgacgactaaaaacgtaggatgacgcgatacacacgcgcggccatatgcatgcaaacccctatatttctttttaaagtttttggctctttccacatttttaaaaataaaaatatttttggacatttttgcatggcatcttcacctatctctcctccatttgtctttcttttttcagttcagtgtatcatcaacaagagttcacaaacttttattttttacacattcatggcttgtttctagttctagatttggatttttctagcttcacttttgatagaattcgggggaaatagaaattgttaaaccaaaaggaagagttaacgttcgattctgtatcagataaatctctataaaggattatatcattgtattattccagctagcacatatccattttcgtatttgtcaattaagagaatttgtatttatttgtttattataagacgacaataagaaagacgacaaaaaattttattcgtatgcttatattttgtatgcatctatttttctacctcttacctatgcatttttattttaatgaattatcatatctgtttgtcaatcacttctatagcaatatgataatttggttgaaactgtatttatccatacgtctatctaaacatgtatatataccatttgaatttttcaaaaacataatatatatacatataggaattaggttattgacttattgtttatcttacaatatgttaagttatttgatatagaaaattattgtacaactttatacaggtcttctaaattacctgaaacgacaacaaatttatttcatactagtatatatcatatagcatatatagctttcacattcgtctgtaactggtctttcagaaaaattgactctatagagtctactagctatagttatgattgttcgcatgattatattattagttaaagtggagacaatcgtattaatcgtgtgatagccggcagaagaaaaaataaatcgttttatccgttaaaattatatatattttgttttactgtatttttctagtttttaactaagttttatctttatataaataattataaatgtttatataatgtttgatatacttaaataaatattttatctaaactttgtttgcgatttgacatttttaacatttttgatagatatttatatattttctataattttaatttttaactgtttctaaaccttaataataattaatagattgtgtgtgcgtttttttctttattttattaaagaagtaatagaaataattcaaacatcaccattcaatgatgggtgtttcaatggaagaaactaccaaatctaaccaataaacgttggcatctattcacctaaaagtaaaaattgtagagcctatattagtcaaagtgatccatgcagataatttattagtaggtctttcgatattaatgttgatatatactagagcctatagaagtcaaagtgattccattaagataatttattaagtaggtatttggatattaatattaattatcagaattatgtatggagctacataatgtgtaaccgctcagaaaacgcggcgattcgaccaaactctgttaccacaatgtctccgccacgcgatcacacttttgcgcttgcatgcgaacgttgaaattcgaacctctcatctctctatttaccattttaccctctagtaatttcgttttcaaaatttactatctccaaatattttggcagtccattattaattgccgaacattaaactgcggtctagacaaaaacaaacggcggtcagatataaacaactaaccaaaaaaataaaatacttgactggttttggacattttcgtcgatgatgatcacgcgctacgaatgagagccaaagacaaagctcaacgggcttccatatatatttcatatttattagtaactattttccccaaaaaaaaaaatatatattattagtaactacaaacaaacaaacaaaatgtataaaccatgaaaattaaagattttaaaattttataactatacaaatagtatgagaagctttgtttatttttataaacacataataacagtttgaaaaaattacttacctaaataaaggtaatattctcgtaatttactaaaataattcatacaaaatataaaaacaattacaaaactcttcttttttgggctctttacatcttatttatactttgaaaattacgatatccatttagagaaaaatataacatgcacgtcacaaatttatttattttttgaaaaaaattacacacaaagaaaacgacaacttcgttccttgttaattgttatgatctctccgaccaaacccaagcagcttctccctcttaaatacctcttccttcttctaagatctctggaccattctgtactttccctcaaacccaaaacacattttgttttttgtttcccatctaaaatgcgtatgagttgtaacggatgtcgagttctacgaaaaggctgcagtgaaaactgtagcataagaccttgtcttcaatggatcaaatccgctgaatctcaagccaacgccaccgtcttcctcgccaagttttatggccgtgcggggctcatgaacctcctcaacaccggtcctgaccacctccgtcctggtattcaaacttcccatgcatgttatgttttttgtttgttatggttaattgcgaagttctggacggaatctctcatacatctttttaggaaacgtaggatcctgtttatttttctaacatgcatctaataatttggtaattttgtttgtttttgcagcgatatttagatcattgttgtacgaagcatgcgggaggattgtgaatccgatatacggatccgtggggttattgtggtcaggaaactggcatctttgtcaagcggccgttgaggcagtaatgagaggctcacccgtgactccgatcgcatgcgacgcagcggttactggtcaagcacctccttttaacaacaagctttgcgacataagacacgtgtcaagcagggacgagaacgttaagagacggagccgtggtgcatgcaaggaagagagaaacgtgaggtctttgagtcatgagtcgtcactgagtcacgagtcaccggtgtcttctgaggagacgacgacggaggaaccaaagacttggatcgggcttgagctgactttggggttggagcctttagcacgtggaaatcacgtggtggtaccgatgaagaaaagaaagttagagaggtgtggcacgtctgaggatgaggacacgtgtaagattgagcttggactggtgtgcagtgagtgaatggttctttttttgtggctggtcttaattacaagttttggtgttgagttttaggtgtacaaatagagattaacgaatctctcttttttctctttttgagttttatgttttgttttgttttcttttgcatgttcggtgttcttcataaatatgtatgatgaatgataaagaggtcttaacttaacaaatcttggttcggatcgacataacaaacatttcttctttccattctaaattcttgattttactcatgtacttaaacaaacgatgcaattgatgtaaacacgtttatcccaataaattttgtattttatttatataaaaaaaaacttaacaaatcttctatttcagaaatatctggggttagattacaaagaatctaagttgcttaatgatgaaatctccatatgatgattagtcattcatttataaatattttgtctcaaaaagcccttttgtatgtgaaccgtgttaccaaatgactcagcagctaacatgcatgtgtgttagatttttgttctcgaaggatatgtgtaggaacttaattagctagagaaaacgaaaaggatgaattattttaactaattgggtcgaaatgtgtattcagcagaaaacatagcccaactctttcggacttgaatcctgttttgtccatctatcttccccccctatacactcaattctcatactatcagatatgctaaaataattaatgcagtttctagcctacagatattttgggctgttgtgacttactttttgataaataagaagatacttttgtttccataaattttgatttcagaaactaaaagtattataagccaaaaaaatcaataatatatgtaaaattatttgtatggtgagtctgttttaattgtaaagctattcagtaaaatgcagtttgccaaagttaaatcattaattaatatatattttttcggttaacggataaaatatatattaaactgcattttatacttttgtttttccgttaattgccaaagtataaaaatcattcaaacttttgtttttccgttaaatctagagaaactaattaatatatattttttcggcaaaatgatcgatttgtctctttcttctttcaatattaaaaatgaagatgatgtagagagaaagtgtagaagtagaaccaacatttatcaatacagaatgatttttttggttaaaggatatcaatacagaatataatacgttcatatacggtgaacgtccatgcatattttacgattattaattcatatttctaatttgatggtacttttttttttttttttttggtatgaatgtaaaatttagtcattaaaaaaacccatggttacatgcaatatatgcttttctgagcaaaattttaaaaatgaaaacaggagaataagtgttgagagagaaactgaagtttagtgatcgagaatgcaaacagacctcatgccctcgtcctaaaccattcacgcaggcaatcattgaacttgccctgacgttgtaacgttgataggcgattccaaacagtactgtcaatgtccttagatggtagctaaaattagatctttatctgtattctgcttttaaactacgtggagaaataattgaatgaaatcgttgaaacatttgttttgattatacgaatttttaaagtgatttttgttttgaaatctgataactcgaaaatatgagttggatagttctactgctacatgatttcagaatgtaaactcatagtccgaatggtgacgacgtatttgaaaagtggtttgatagtgcgatatggtccaactgcggtacatgtgggaaaaatatatttgcggaataagtacggtttttataaaataagcggtacgaaataatgtttgattggtgaagaatagtatttaggatacatatatatatatttttataatattttattttataaaaattattattattttaaataaaatgatgttatttggtaaacttaatacatactagaaatttcagaattttttaaatttaaaaatatatatgtattatatgtatatatacacatatatagacaaaacaaaaaacgcatcataattggtgatacacaaaacatgtgcggtattgagataaaacagaccaaacaaaaagaatttgatgagtgcggtctaaaagttaaaatacacgatgtgtgacttgaatggtaacaagttaaaaataccgcatgtaaaaacgctataacgcgtcgcacaatcacaccctcaatcaaaatttttaacttgtgcggaatttgattctttgctatgggcaatggaatgcatgatctctattggcgatacttctggcgcttttgcttccgattgttcagacctgatttctatcattgacaaccaagacgattggccgacattcgcagcggaattggcatcctatcgctctttagtttgtttttttcctttttttgtattagatttcttcctcgtagttctaatactcgaacagattgtttagctaagaaagttcgggctcgtaatagccttttcttccatgtaagcatattggttcctgaatggctctctctaccagaaagtatctttccgataacttaatataaatggtgtttgaggaaaaaaaaatataaaaaaatcacaccctcaatctgtgtgctttaatgggtggggtgacatcagccgcatgatttcagagctaaagatctctacaatgtgatgtgacaacaaactactttactttatttttcataaccaatttatgcattataaaatcaatcatattatttcaatatcaacgtcaagtcatcgatttaccctgtaaaagatagacctgtagtttacgagttggagttaagtggtttcaaatttctttttctcgtcagtggttacaaacttacaatttaaaatttttatcttaagctctcctctcttctctctccaaaatctttcagagaggagagcttgataatcgttttgtctccagtttgatccggatttgtttatattctcgtctctatgcgagatcaataatttccgattacatatcggatcttctgttaccgactatgaccggtcttttctccgtttttaacggaacttgatctttatctccattgttgctcacccatcgatctcaacgttttcttccaagatctttgttgtctccatttcttcgtggattaacatcttcgtcacctccgattgctcaagacgcaagagcaaaaatggactttagactacatcaagatagatgtaatcggtggtggagtctcccgaaactggtgattccaaagaatttgtgaagcagctctaccttttaatccggtaaatgatttcgatgcttcttttgattggagtggagatcggcaggaaggaacagtctacccatcgcactgatcggcggtggttgatcggagacggcggtgtttagcaacgtgaagacggcagcgctcgattcctgacgcgtggataggtagggtacacgtctccaacacgtgtcagaagctagaattataatttttatggaccgttcttctcgcatgtacttgttattgggtttttccttactgtacttgtcctatgggctttttaatataatctttcgccggaaaaaaaaaaaaaaaaaaaatcttatcttaaaacaataatattatatataacagaatgaggatttttgcgtctaatcattttgaaaggatatatcatatgcaggcgtcaaaaaggtgacccatgtacacaaacacaactgcaaaattgatattttagtcatttatgccatgtagacaatgattatttcgtaagaaaaaagtgtgtacattgcatacaaattgcaacacacctccaccacgaattacttctacaattataatgtcaatatatagtatcgcatcctgtaatgttggtgtaacatggtaaattcggtacattcactcttttatgtagctgagaaattttgtaccttggatttgttgtctttggaatcatggaatagaagattaatgtatacttggataaactatcaattttttgttacagttaagttattagtcacacaaaataatattgctttccatcatttacacaatttgtttgtgtctactgtttacttacgtagaattgtgttatatattaaatgaaaatgtgcgtaacatcttttgtatcaaatgaaaggttgtagatgtgacacaaaaaaaaagaatattgtttacaaaagttttctttcaacataaagtaactgggttattgctattttaaaaaaaaaactatatatcattttctcgcaaagtttgtgagaaaattactatgaaatactcggttataattaatatgttttcttgcagtttacttttaaacttatcattgctctttataagtgtatttaattttatattttataaatactaagattgaatgattgattagcacgtaatgtactaatggctttaatatatgtgcacctttaatttagtcttttcctaccagcaatttaagcactagaggtaatctagtttccattacctgctaatcaatgtcacggttacctgctaataaatcgtactcttgaaaacatatagattattattgacaaccattattttcaccatgtcacgcacggttcatttaatcaaatttcatgtagtatcttcattatttatcccatgtgctaagtttttactgattatacgtacatacttaatactctttgttttttgagcaaagacgcacatacttaatactttgatacggagaaaacgcttattactaaaatttgactctctatagaacttcagttgggtgatattcaaattagctctcattaattaatatatatggtgcaaaacatataaaaaccaacaagaaaatcaataagataaaaatcaataacttttttgtagaaaatataaatgaggaatggacatataagagttaaaagttggcattaattatatagaattacaagttgacattcttctccgttatgaaataatgtgctttattgattcagacacttaaaatattggaagataagatgcaaaaatcaagcttataatcattataagtgctgacctaaaacaaaaacaaaataaatttaattaaaaaagatcaactagctagttacccccatcacttatcattcctattatttgtcatgtttctttattatttaaaggcctatctagattgaacccattttactatataattatgagtttctttattcttatattaaaaattcacctttttactctatagagtccaaaaaaataagattaagaccaactgtttttggcttaggtcagagaacataatgtgaccttgaagccaaatatataaacataatgtgaccttacacagatacaaccgtcaaaacccttcatgcgtttttttaaatttattttatgaaaagatattttctttccatatatctccaactaaagtaatagaaattagggagaggaacttctttttatactttaatttgacattggagcaccattttatttttggtttaggaaacaatcttcttaaatcttacgagtgcactgtccaaatcgattatatataattgtaatactcgacatttctctgtttctgctggaataatgttgttaattttagtttaagtttttatgatttagtgactaaattaacatattgaatttaagatgttggaattatgatttattaatgcattagagttcagatatataaaacaaatcaaaattggcaattgaaaatgaaaacagtaaacagtgttttacagagaatacttatagaaacaaaatatattacaaacaacaacgttgatttttaaagtttctgatttttttatgaagttctgaaaatatgtgaaaatttataaaaatatgtgaaagtttcccaaaagacgtgaaattttcaatatcttttgaaatttcttttcttctcctcaaaatgtccaaacatgctgtaaaatatggtaaccaatactcataaaaatcaaatgttttagcacacgatgaaagttccaaaagagaaaagttaattactatgaattcatgatggtttctgttaacaaaaatgtgagttatttgagtacattaaatttccaaacgaggctatctaatgaaataagcatgtcgacaaaaaagtacatagataaaagctccttgacctaaaatatatacataagtctgtggacaaaagaaagtatacatataaactgtttaaaaactggtagccatcaacccacttttcaccctctttcctatgaattgcaatgtggctttctattagactcacgataaaatcattcgtcttggtaaatggtttaaaaaaaaatagttctaacgttaaatgttgattgatgcagtgcatttccacttcgttttgagtttgtatcttaccattatttttttagaagttgactttgatttccatgcatattttggagttcatgagtctcgatagattcttttttttctttctctcaaatgttattaattagcaccaaaggttttctcctcaaatagagagtaattaaaggttacagattaatccccaatggagtaagaccaaaaattacagattagtaatcaaatagaatttcaatagagacattgggggagaagaactttaagcaatcgctcttctcaagcaaagatcaaattcaatggaaacaagatcatctctaattaaaaaaagaaaagaaagacaatctctaattaaaagtaagaagtaaacttcatgtatatgagacaaagaaagagtatcattttgtttttgttcttgtagatgagtcaaagaaagagtatcatttggtgtcatgcatggcgaaaggagaccgaccagagtgtcatctgctttcagagtgcacgttggatagaggaattataaatttataatcatgcatgttgtacaatattactacaaattatccaaatattgtagttaaaagatattttgttgttttgaagaatatatagttttgaaatgaagataatggatatgttgttatataattaattacgaacgcacaactcaaaatgtctcgctatgttttaattaacttgcaatctatttcaatttacaattatatatataaaaaaactctttattatactcatttcaaaatcgtttcagttacaaatccctcatgtcactcaaaaataagtactctctcaggaagcttaactagataattctcccttcatagatcaagtggcttcaaaactaattgaactccatacttaggttttatagtaagcacaactataggagcatgtctatagttctccgatattgcaaaactgaatttggaaacaagcattgctaatattatcttcgcctccatcatggcaaaagtctggccaatgcagttcctaggtccagccgcaaaaggcataaaatggcgactagatgcaaaacttctagtagtaaatcgttcagggttgaactcgttcgcatcttcgccccataattcattactatgatggatcgcaaggacagggatccaaatagataaacctttagggatgattaggtcacctagttttatgtcttcaaatgccattcttggtaaaagtgtggcaggagggtaaagtcttaatgactcgtttatcactttgtttaactgttgaaagaagaaaaataaagaaagagagataagttagttgaatattaaattacataaaacccttttaagatatcatatctaacaatcttgtgaagtgccttatgactctttcacaaagatcccttacttggttttaagaattgcctttcaagctgtccaaatcgtttaatgaatgatttcttttagtattttatgcaaagcatgttgtagtgctaattttttcaacaagtggaatattttacttatctcattattaaaatatgccttagttcgattttaaatgtagaaagccaattcatcatgagtctctctattggtctatctaatcaaatgtcgaagcaatggtaatgtaaatttcactttagtctaataattaaatacctgaatttgttatatgtcatacatttgaaatgaattatctgacttgaaactacatatcataattaatgggataacatattaagaagattttctagatatatcatattaaagttgaccggatatgtactaattgagatttagttacggaagaagcactacgacttagtggcattgcctgtaagtgtgttgaatgaacgtagtaccccacccgcacccataacaattggcgttaccatcaaatttttattttatttttcaaatgaaagatataattgtgattctatcctaattctcgaccaaagtcaaaactttactagacatgtgtatatgcataacaacgcataagacattaacacatagtatgtttcaattttttaaaatgttatactattgtcttcacttcttttaaaatctcagattttttttataagattcttatcttttgtaaaactgtaatggaaacgtgaaactcgtatgatctttctctttccgtttgcttttaaaacattcaaaaagagttcggagtttttgttttggtcaactagatcacctttactcatttattttattatttacataggtttgaaagcgaaccaaaaaaataaaaaaatatagataacgaattctaactttactagcgagaaaattacctacctcacgattagagaaggaaagatatataacaatgtggaaataagaaagactctaaaagctacgattttacgttcgagaaggacataacgcctaattaacgattaattgaaattttatttttttattattgatttttaatattttgttgataaaatttaaatatgatgttaaaaaatttctagatatattttccatattctaagtattttattaaaaccaattagaaatataatataaggatgtctaagctaaaaaaacaatagttgaatttataggtttctaagcggccgatagaaaggtgataagaattaaccattgttccattgaaaaaacaacgaagaaaggtgataatgtgagtgaaaattaagaacgtaccgaagtaagacttgagagctgttcaacggaagggacaccatcttggccacaaacttgccggacctcatcgcggacattgtcctgccaagtgggattatgagcaaggagcatgagagtccacgtgaggagaagagaggttgtctcatgaccggtaaagaagaaagtcttgcactcatccattatcatttgaacattaaggttgttcttgttgctatccatctggttcaaaagaagccctaagaggtcatccccgtatgagctactccgaccgatctctacactgtcttttcggctgtctataatctccatcaaaagacgttccacttccgttttcagagactttatttctctattgtatttgctaggtagaaacctttgagacacaaaagattatatagttacacgttaagtcatcaattagatccatgcaaatagtaaccatgtcaaatatttttatctttccaatttaatatgttagtggatagtttatattatcaacgtttcattaaattaagtaccactatatatagaatcgtgaaaaccaaaacaaaatatattattaacgttttattattcttttaggaaaatttatttaattaaaaaaccgcaaaatgacaaaaagttagtagaatcatagaatgatttaatataattacttgcagttcgtaacacaaaacaatcaaaagaaagatttgtgaaaaaagaaaaaaacttaccggctaccgggaaaacagaggtggcgagtggcttgagcacaaagacgttgaagtacagtgagtagactaaaaagctcctttcctttatcacaactacttccaaattccgtcctcgatattatatccgccgtgagccgccgcatctcctcaccaatttccacctcttctccaacctcctttctcagcctctcagccatcatcttcgtgcattccaccatatgcttagcgtatcctttgagcctatcacgtgtgaaagccggagctgccatgtgacgttggtggtgccaagcctcgccgttggccatgagaagcccacgccctataaaccctttagttccttgttgttgcagccatgatttcccggtgaccggattgtgcttcgttagcaattctttaatcatctcggtctccgttaggcatagtctcggttctgtcccgttccacattataaatctcttccctgcaaaaggccatttcagtcatttttgaagtgtgtaataaaatagaaaatgcattgtaggcatgtccggtccaaagcataagcaaaggaaagaaactataattatccgcttcatattttacgttaatatttggggaaaacagattttatgtagcataagaagagacgtttaagaaaaaaattaaatggacatccgaaaacgttgaactggtcatgggtacataccatattgtttggaccaagagacgtaatgaggaagaaggcgtgggacgatgttgtggtggatggaagagcagtcgttagaagcggagtgagagagcattttggagatatcaatgatgtttccggtgaggagacggggtttaggccccgtgatgccttgacgttccataaacttcttgattcgtcttggtgtgaggaagtagcaacaaatggagtcgtataggactcttaatatcaaggtcatgactatcacgaggacgtactttagtactaatgtaaccatcatctttttaatttctttgttttattaaaaaaataaacaagattttgagaaagagagaaagagatggtttggtgagagatacggaacaaccttgcagagtaccaaagcatatatttatagtgctgcagaggaagcagtggagttaaaacgataattcttattcttgttattttatttagtcatttttactttttcaaaaatgttttcagctttttcaaaacaaatacttatttatttgtattcttaacacgacttccattttaacatagaaacgaatattcaagaaaattcgtcgactaatggcagatcctaaattcaattattattattttaacagatactgtggcttctagtttatgatttaaagattttatttgtaagtaattcctcaaattaagtatgattggtgaaagttggttgctatctagaaaactgtgaaatttctttaaaatcagattttcttgtaaagagagtatagttgagaaagtagtagatttttaataataactttttaaatatacatatatgtacatacatatatacatatatttttagtaacgagaatatagcatatacaagctggaaatattatttatatagaaaatgataataaattgcaacatagaaatatttatccactaaaaatgttggggacaaaaatttgcggttcacaccaagcattaaaaatatttatactttcaagaaaataagatctgttcaatcatttatggtatgatatattttattttggtctatatgggaattttgttccatagttactttttcttttctttgggtagagtattacataagaactatttaaacggctttcttgttttttcaaaaatgcctaactttattcttgcaaaacgtatctgagtcagatccgaaaattcattctttttcatattggcaataaccagatttatgtttacgtgcttatctacttgggtgattgaaatcaactaatcaagggcacttgtttgagtgcattgagctgctccatttcctcatttaagatttataacactttctaaactttcataattgttaggtttaaacgtttctgtaatcttttactgttattatgttacatatgaaggaccataaaagtaagatttaataagtatattaaagttttaagcgtacatgcaatttgttaaaattaatattttggtgaaacaaagaaaatcttgtttgatattttgtttgtttgattgaagttttaacaatgcgtaaatattgtttcattgacattttcattttttgcaacaattttgtgtctacattatcgctattaccacattcttttcgctatatcgccgattaattgtatcaaaaacatcatatatttcgtttctacaattgtaaagtatgtaaccaacaaatccattttttcatgtctaatagatggtacatctcagacttgaattttactattattattattattattaaatatctcaatctaaagcgattcagagagatattcaaactcagttttaggaagatttgttagttacattgcagctctcttcttcttcattttttttccctgtgattggctttgttcatcttcgatgatgggagtgggattgacaagtcgtgttctttagaaatcgtatgcttctttcataattttaatcaaaacaaacagtaaaaaattgactgaaaaataacatattacttgtgtttgtaaaattctaaaaatggttttcaaaattttccccaaaaatggttttcaagaaattggatatatcatacttttggatcaactgtagagaaagcaataaagaaggaaaggacacaagagagattgggtggagtttagacaaatttaagggtctccaaaacattaggctgaacacaatagatatggtgatgcctactgtttgaaaaacgactagataagggattatggacttggatgacttatttggaatgaatttagccggcttgggcattgtggaaagacgacggatcaggttcaatgctctcccgaagaaagcagaatgtgccagctaaacaaactgtaatgtgactgttgttccaaatcaatgttaaaatataataaaaaatgacattaagaaaaaatactgtttcattcgcacttttaatatagaaatgtatttacttatagcatttttaacttgtactctagtaatttgtaattgtaatattgatgtttaaaaaatattaatttgatctaaacaattgatgtcgttacaggtatgtcgatttatatactttttatgattagaaagaagatttgccgtcaattacaaaagcaaaagcagtgatgggtaaagattgcgtatcttgggaaatgaatatgaaaagcaaagaaaacttatacacatcataataatctcgagaaaacaagcttgccaagatttcaacaatccacttaaaatatttaaagagaattaaaagataaacatatctgaatattctttctaatattatctccactgttttatttacttttctcgtcactttcttctttgaagaacatgtttggtgacaaagtcattccgtaacaaccggttatatggatatattgtacacgttataaataagaaagagtatgtttccttcactttgaatatacatattgagcttaattcgtgctatttactaaccagtgttgtacaaaatgatttggatgactgtttgtctagacggacggacattctagacaaacagttttgtgacggttgtgtatacgatacctatatattcgatcctggtaactgttatatagatgttaactttactaaaaataaaaaagtgattcaaaagttcatgatatacttttattttattttgagtatatttttttccttatgactgcatagttttcttaattttcatgtgaacaagttagtgtgtgagaattctgtctgaaaacttcttaatacaaccaaaagatatttcaagatactactatgcgaatatgtcactagagtaactcatttaatagtttatcaaatggacatatctaataaagaatctagcggatccttctcacagtgagtgacatccaaatagatatcgttgaattagatacataaagattccatttaaagaagatcagaatgtaattaatatacaattagtattatttagtcaaagattgtagaatcaacaaagaggatcagaaaaccttatttcaacttttaaatgagactgaacattctttttcctacaacgtgcaacacaatcccatggcatgccaagtaaaaaagtggaaacttgtagaacaatcaatccccatattatcatgaagtttcaaaagaaacctcagaattttatttcttctgaatacatacccattttgtttggtcaagtcaacaaatgatcattctcttttctatgccatgataaaattagtcggcaagtacttaatttaatcctccaattagtgtaccaactactaatgcatatatatagtatgccgactgttttcatagacttaacctttaattgttagattttttttggatcccaaaaacaaagaacgactaactttgtttctattatgctgctaacagatttgccttgttcatattcatgaacatttctgtgttaccttttgttgtcaatgtaacatacgaatttgaatgagatcgactccgatcaaatattaaatttacattaaacgtatatttagatgttgaaaaaacttgtagcacagttaatcacccgattcagcatttacattgcccctgtagtgactaactttgttactgaaaatttttaaatctggttaaagtaatttcttagtccactgaatttttgaaatttgtaattaaaataaggtcgagtttttaactcaggaaaactgggtgaccgaaagtattcagatgaagaagtcatatatcactgttaatgattaaagggctgctgacccaaaaaagtgattcatgtgactttattacattttaaattgtttacgagaattttcttcttcgggtcaaaagaaaaaaaaacaaaagtgatgaaaaaaggtgagcgataatataagattgttgataaaaattaacaaactgaagtaacatataaatattcgaccttttgttttacttataacgagctttttacttatgtagtaatgtatacgaaaaccgaattgcagacttaaactaagaaatgtttgaatgggagagtattaacagttgtgagaattcgaaagagaagagaagagactttttttatcagatatgtatatactaaagagattgtagcaataacagtatttgtggtctgatgtgattaactaaggttattgcatataatgtgtacaagtctaattcacaaactaagctaagctaagtttttgtaggcctcgaccctttctcttccaacaagtgttcagtcccgcgagctttgcatcagctcgaaccactgcaaaaacaaaaacaaaacttgtcagatatctaagtattttgacagtgtagaaaacagagaatggatagtgaaaagttacctgtctcaacacatcaccaagtgttctgggtaaggcttcgatgtctcttagcacaatgtagtatgggaaggggaaggaatccaagtaattcattttcttataaggtctcctttcaccatcatatacatagtcctgattagagaacaaaaaaaagatgtagtttttttagaatcattcatgataactactcgtttcaatcttataaatatgtataggaagtaatagaattggacataccgctaaatcaaaaacagattgctctgcgtcatcgagaagcagatataccaccatacgtttttgctggagaaagcttctaacagttcgtttcaacttctctcgctcatggaacttcccatcgccgatgattagtacaagttgttgaagcgggttgctcccgtaagactgtcgtcttgtgctggccaaattctctagcatttcattcatgtttctcagcagattgacgactggttgatcttcaatgagattttcttgtttaaatgtcaaatttgagatcatctgcatcacagaaacgagaaaagatgtgttttgtaagcaatcagaagacaatccacagtgaacacatgggaaatgaaagatttaaggccactaaccttaatgccggattctgtggtgaaagactgaccaaaatcatgtaacatctttatgctcccttgcttcccgaaacttgccacagccaaacttcccagctcaagctgtgacatagctcggcataccgttgccaaagctctaattgcaaaatcaccacatccactttctgacatgctacgcgagtcatccacagcgataacaacttggtaatcacgcttgtttggttttgtcctcctcaaccaaattttatctttccgatagtgacttgctatgtatggaataaccttcttcatgttgatccttttacccgttctgtagtcaccactgagcttgctagcaagcgtgggttctaagataagacgtagttgctcagccagctcctgagacggttttgcagtaagcaattcacatctcctccaaagaacaacagcattgcttctggcatctggatcttcctgattatcctgattgctttccgagtcattatcagtcacttgcatccggtccagattacatgcctcttcccccaagaaagtattgtcgacagagaccatagagtccatcctactgttaccatcaccaaaattatgaataggagagttctcttggtgggtcctatctgtatctggttcttggacctgttccgcgatgctattactgatcgatggtttggattggacagcaggtttgttttctgggttcaagtcatcaatatccattggagagacatcatcctgattacctgcaagtttttcttcttcggattccccttctctcatatctgtgttcacttgctcaggcaacgcaggtcctagagcttgggaagttcctgcatcaaactgagaagcaaatccatattcactagcatcagggtcttccatctcattttcagcctcttgcttttctccaaggtcagaggagattctaactctttctttccactccttcaaggcatcaccaacgttcctataaggattgaccttggtttgttgagcagtagatgactggttttgaggaaattccatctttggtaagttgtctgtcaatgtctcaccgttggccatgttggtcatcatgaggttcatttccgtgttactactcgaaggcagatccattgaatcagtgagttcatccgtaacatcagtagcagacaaattttcttgtggtgctgtacttcctgcacccagcacattagacccatggggattttgtgaaccagactctacgccagaaatattatcattacggaagttcggtttcatcatgtcttctgacataacttcttttccttctattggttccgtttctggttcctgttcaagatcatttccaggttcttctttttggggtgatccacacctatcttcagcctcagcctccatattttcctcagatggctcttgagtttcttcttgatcattttcaccttcttcaggatgcttttgatcttctgaacaaggttcttcctgctgatttgcatcttccttttcgacctcctctgttttgtccatctccatgtcatcatcaatttgttcattatcgacatcaggagttagtccaccaagtgcttcttccttggtctggattttttcttctaaattatctgtatcatcaaaatcatcctgctccacattctcatcgtttccttcttccggtttgtcagaagtattggactcctcaggctcatcagcagtttcaacaccatcatccttggctcttagctcccttgatcttgtgtccttgtcgactatagatggtccagattcattcttctcattcatattttcttcctcatcttcttcatccttgttccatggcttttcatcggctttttcggcatcagatcccacatctcctattccattatccaacggctcatcctcacttccttcgtcttccttgtcttcttcttcatcctcactaacgctgtattctttgccatcaaattcgtcactcatctcaatgcctttgtttttacccagcacatcatcttgctctttctcttcctcttcctgcaaagacaacagaagaaaactcgattggtaaaatcccatagaaaattcaggatgagtggcaggcaataaggaaagaggcagtataaaccttcttatctgtgccatgcagttggtcttcatcttctatttggtcacttacatcttttgcccccacaccatctcccataccagtaccttctgcagcttccgatttgtcaactttagagtcatcatcttcttcatttttggagatgccaaatccttttgtaaatagatcggcaagaacacttgcaaggacatgggttatcagtgaaacctacagaccaaaagcacagatgttgttgtcttattggaataaaatagtagaaggtgtgtaaatgccgagatctcttcacactaactaacatgcttgacattcaggaggttgtttaaagaaaatttatcaattaacaggatcagtttaaagagatgattgtcccgaatgactttgaaagaacaacataagataaacacataccgttttgcttatcgccaaaaactctttaaggtaacaatccccaaagctcaataaaagatccaaaaatgcttgaagttgcttcaactggtctccaacaccagctgaaaggacgcctgatgagttcaacagttgttcctatgaagataaaagcctcagttcaacataagcttgaaaataaaaggaaaatagcatccgcatacatcaaaagacaatccaacttacaatggaaccaaatgattcggacaggagtttacacaggttatcaaggttcaagtcattttctgccttcttaaacagaccatcccatgtagtaatattcatttcctcttcttgagaaagacttccatctttataagagcaaagctttccaatcacatccttaacatttgcaaatatacttgcaagattttcttcaagaaatagtcgttccttgggttccattccagttgactggtctctcacgttaagtaagcagttcagattttcagccaacaatttcccctgcatcaaataaagttcttcaatatgactctaagaatcctaaacgcaatttatttgctaggcttgcatctggaaaaagataaaactaatccaccaaggctgaataaatacctctttaaacacaggggaaaattgactgagaagaacgtctctgcaatagcttttctcattgttttcacagaaacttgaaatttggttctcaaggtccgtaagttgatcaaagttctggcgtagcacctgaaccatatgctgagtgacaaactgcttaagactgctacttggtgtgatgataaaaccgttgcaatcaagtagaagcctatccagcgaagcctgatgacaacaacacattcagactcttgcaagaaataacagagcagaaagatttaaaagaagcccaaggataccttggaattttgagcgatgggaattagtatttcaataaagctgagcaaactccgtgatgaggttttcacagcttgacaggaatccaagtgtgtacttccaactgttctcagtaaggccgactcctcaagaagcattgcagtaatgttatcaaagagttgctgtcatatcacaaaaaagcaaaagcttaatccagtgttgttgcaacagacattcagtgcacatcattcaagttagaaagctgaaataccttctgtagccacaagcaattgaagacagcatgttgattttgggggaaactgaacacagaatcatcctttctatccgcaccaactgaatcacccagtaatctcgctagagataaaacacattggcgaaagcggttgaaaagttcggcaaaggcatacgcagatttcctttgttgccgttgtatttccacaagatgattgagaaatgagattgcccgtttaacctgttaacataggatggtttgcagaaacaactggtttaaaattgagactcggtgaagcccagatataaattacaagcttcaaagtctacctgctcagctgttacatcggagtgttttcggtcaatatttaacatgagttgcactgaagccaagctcttaaagtaaaactcatttgccactctccactcaactagtgaattttccttgttttgatcttctacacccatggaaggatgtatgttacttttggtatgtgttagcagtaacagatgctttggatcgtatgctggctgataaagcaaccctttaaagtgatttgacatctacataagaagatgatcagagaatatatatgattaataaacagagcatgactagaagaaacatacacagaagtatcgacaagcaaaagtatattacctctatattttcaaacttgtgtttctgcaaaccactactttctaataacttgagaagttcaaacagggccctcttctttgcaacatctctatcactgtttctccatagatctgaacagccagctatggtttcaccaatcctagcaaccgtactccacaaatttttccaatcaccctgatagacaggggacgaatactgatgctctgcaaatatattatgcaagcttaagaatatgcagactccccaaaaataaaggaaaatcaccaaatagaaccaagagagaatggagttagtgtacaaacgaacctgcacccatcagcaatgttttatagtgcatttcttggtgaaagcgtcctaccgattcctttaatttattccaccagacaacataccatgaagacctaccaagaaagtttaaagcatatatgatggagggttcaacttccataaacttctcacaatgcatgcagaaaggcacaggatgcaaatgtatacctgtccctcaattgctctgcatctaaagcactaactaggacctcgatcctcatgtcggatgctccatccataagatctggatctagtagagggagaaattgagctcgttccttcgtcaggtctggcttaacaagcattacagggaggcgtagcatgtcctgctcaacaaaaaagatgccaattagaaaactttttaataaggtcccatcattcagactcatataagccaacatagataactgagagtcgtgtgtttatataatagtcccccagaaaaatgaagaaccaataacttaccgtaaacttctgtatcagtttcttgaccttttgcctggtccttttagtggtctcattgtacaaataattatctggcctctcccaccgacaaagtttaagaacctcctttaactcagtttcaacattttttctattcaaatctaactgctccattacactggtaagagaaatttaaattgagaacattaccctggcaaaataatcgtgaactaataatcttaagacagaattggaaaggagcttacaccggtagaaattgaatatagaatccaaaaatattgtagcacatttccaccctcctcttgtgtgaatcactgtcaaagtaaaagcgggagtcaaagacagtcaagttagaagtcaactgtaaaaacagcggaggagcaatcaactgtgaagacttaagtatataatgctgaaggccctttaaatccttcaagaatgatactgacgaggaaagaggaaaagaagaaatcaggcaataattcatacgcagctaaccttgaatatatccccaacgagctacccatacttaattgaagaaggaaacaaaagagaagctgaagacgtctcctaaattcaccaacatttgacgtttcaatgaactccaccaaactgcaacaaaaatatctgttagatgaccgaatacatgcaagaatggaaatgtaagcaccacatcatttgtttggtgcacacctttgtgaaatggactcgttttcatgttctgaaatttccacagcatccttctgaaacagaactgaaaacaaaggaagccacaactgcaacaagaaacaaaaagtgttacccttaacattatttttgttcataaaacaaaatcttctaattataccaaccttcctagcgtttagttcatactgatcctgaacctcatcaagcaaagtaggccagcgctcaaattccaccttctgccaagagcttgctagggaaataattggctccaaaagatctgtaggataaaaaaaaagaaggaaaacacaatgtgacacctgaaaatatcataaataatggcaggaacgaatgtttagactgagaagagtccataatcaacccattgtaaggagattaaaaatcaataccagagatgggcaatttacatccctcttcctgtaacttgtgaaccttgcagagcagaaattgcaatcctgagagagccttcacaaaaaatggcaaataagaaagtaatggtttagtacataatgcttatgatgaactaacaagatcaaacaatgacggcaggcaatgcaaagaaattaattctgtgggtacaagttaccactgcattaatactttccataacattgttaccaaagagttactttgttagtcattgatagatcttttgttgagtatataaatacctttgcgagaggagtactggagggaatagccaagagcatctgaagtacaccagaaagtttctgaagaccaggatggtcctcccgttcttgcaatagagaattaattctttgttgaagaggagtgagaaacttgaccattttccccagctcaggaccatccaaatcctatataagaaactgtcagaacacaggcggacagacctaaaactaaaagcagataaacttcttaaggacgtaaaagctttcgcagaccttgtaaaagttatatttactggctgactgatagtttgaagtgaagttttttttgttttccaggcaaagacgaagtaggtgttctggaacaagttttgcatccaagctcgatgtaaataaaccccttagccctggaatcaagagataaccctgtaatagcattaataaaatgaatttaactacgttaaacaatagagagaaatagtgtctaatcacctttgatcatactgactccaagttcataggaatcagtgaacgaatccagtcttctactgtcagtaatacagaatcttccagactgaatagaataaattgtcttgttagatacaagagaattgagagtgagcctgatgcaacaattgcagatttgagttccaataccttttcagagaggtcacagaaaccaaataactcattatgtgtgctatatatactatccagatgctcctgtatcaagtcccaatcatcctccaaattttcctcatcctggtcaatatgtgtctgtggagaggaaacagaaatcataagtaataaagatgagaattcacaagttccagtagaccataagactgaagggtttaccatatctttcacattcttcgtatcatcatcagccagatactcttgccactcagagaaactttcgtttgggaaatacttgccaagggcagatatatctacttccatgacactatcaattttgaagtcccgggaacgaaatttgtacagcccaggaagattgtcagcctttgttttggcttgaaacttcatctccatccaaattctcgccaattcaacatatatcttgtccaataactgcggatagaactcttgcgacattagataacatattaacatattcatatgcatacaactaagtaaatattttacctcaaaagaagcttcatccagtagcccagtatttgcgacaaattgtaaaacacgagcatggagatttttataaagagcaactttgagttgcaactctgaggcctacaagaaataagcaaaacataaagaatacatgaatagatttcaaaattctgacaatctttttttattatttgaacggatatcatctctaaagactggaatttcatgaaatcatattaaacattacttttctcgaatcttctgcacttgaaacagagataagtttgtgcaacaagccaacatccaaacctaaggacttagcacgagaatttgcaccatgggaaaggtgcaaaggtggcaaacattcggtgtaggtagttgaagctatcgacgagtcccttggaaatctcattaaggcataaattgtttcctgccagacacatggagtcattaagtttgactacacgaaatgacatgtttaaatatttccgaaagacaagaggttaagtaccatgactgagtcaaccatgtctatgtcaaatctgttgagaagttttcccaagagagcaccagatacaaagagtgataaacccaatttcatctcgtacactgaaacttgaattggctgagttatatcgacatattcagaatagtcacttgacatccgatcaataaaagatattgctgtctcctgcagaatccaaggaattgatatttgaaaatgaagcttgatggctaaagcaaaaagaatactaatgacagtcatgagataaacatacctgccagttgaaaacctgctcaacaacctgattccaatcaagcacttcaatatcgttgaccagacttatgggacgtgtgagaaatccagcaaattcatccagcgcccttcgtaaatcctggtacttttttggatcagatctaaaaataacctgtttcagaaggtaagaaaaaaaggtgagcatgaaaatgggataggtcagataataattatcacacagcgaagaggtgaaaaacctatggtagctgctacatacctttctttgcaatcttttatgctcagttttgagcttagataatgtatgttcactgctttcgtcattgtttccagagtaaagcaatccagacagatacccacattctccccggacctggtaatacatgaataggccaatcaatgaaacaaagacggacaatatgcaactgctattgtgaacctacacaatacgaaagagtaagcaccttgatgtttagctcaagtgatgagattttctcttctagctttaacagcttgcaagtgatcttcatggctggatctataacatctaagctattcaaaagatggaagcgtagtcctccaagataaagccacgccaagccaagattgcagtagaattctacaaaagttgggcataacgctgtattaaataattacaaccgtcgaggaaggtttgccttgctaagaatcaaacttctacagctcatatataaactataaaacaataccatttgatgagctatcggaataaagacgttttgctaatggtccgacaaatgagtgagtaacggatttcaatttattatggcttgatgagccaatcagtgagataagattctgtattccatccatctgcataaaggataagagatgcgtaaacttggagatgtagctatgtttcacaaagaacataaagtactaagaagattccaatatttttgacaagaaaaagggaacgaaaaatagaaaatataacttagaatcataccttgttctgctttttctcaattgcatgaaatacagacttaattgccacaaacgtttctgactcaaatgacttttggtgcgtatatattatctacaaaggttaaaatcaagaataaaaaagtgcacaatggacaacgaaacagaatatactattcaaatttatcacgatttcagtacctgttggaaaagggaacgtgcaattgacaatagagaaccaggcatttcttgatagggttgtgagcttttccatagatatcgtgaagcagaaagaagtttcattgattgaacagaataatccttaacagaaaatacattttccctgcagaaaacattattaaaaagagcttcattgtatggttaaatggaatcacagtttcccatcatcaaacattaaaagtggattatcttggagggtaaagcattgtagtcatgaatatatcaaacagaaaggaaaagtatggagcgtttaacatgttcttagttgatcagaagaagcgagtagcaaaacaaaataaaaaaatctcaaacataataaaggagatacaactcttacagaatctgagcaacggtagctgttttcacaggctgaatcagcatagaaggtgacagaatctgacagttgccagtgtctgagatattctgtaggccccgtgaacatgagatgaaagaaagatgttactaaatgcgcaatctaaaaagtagcatgtgaacaaaaatcattaagtttactatcttataccatgagaccaatttgactatttttccacaatacagaatgccaccagtaccaaatctcgagagcaaaaccagcaattttggtgtccactgcaacatagccaaagttaatcagcaagtacaccttagtacacagaaaaattgttgaatattcaactttgtttacctcctagttcagaggcatgtgcatcaattgcccacaggagtttttgatgagctacaagagtctgtggaggcctggttgaggataaagaatattctagagccggtttgagcagttttcgaatgtccacaagatcctgcaactcaaaaaggtaagaagcaaacaggaaaatgactttaaccaggctttacatatagtagttatcatacgcacatcttctccattaactttcaaataaaaagaagacattagcttataaaaataaaaaaataaaaaaaaaattccaactatctactaacctgatgttcagtaggtcgagcaaccaagaggtgctgaagtgcagcaagtaactctacgtctagagaacaactttcactgctagcaataaaacatgtcttcacccaactgctaaatccagaccctgtagtcacaatctctggacagaacacgcagcaggaagcagttatattttcagtattgtcaatctcactgaaacccattttatcctccagtctcttcttctctagtttcagcctctccaaaaaagtctggtgatgatggtgaaattgtgagtagcagatagagactcattcattacacacagcagaaaaaaaagataacaaacctggtagatctcatccagctgaacagcagctacataatctacatcgtcttcgtcagcaatgtatgatgaaatgcaaagacctgcagagaaatacaacaatttgaatcacatcacaatcatacaatcacaacaactacgaaattgttattaggtttcccataaaaaaaattgttaagcctgttgttcacagaagaggtttttgggataagggaaaaaatcccaagaggataacaaacgatcagtattctcggtattctatacagtcaaagaattatgattcagtttcatatacttctacgtttaaccatgacaatcaattatcccttggttgaagacaaaaatatatacacttaaaatgaaaccaaaaatgagcaatattgataaggtagagttaccttccaaggcaagcaaacataattcagggccagaaaatggaatggctttggtaagatgatcatttcctgccaacaaaaacagctatcagaagacagtttaattttctctaataaacaatcagacatgtagtactgaacgctttagatatcaaaccgtgttcatctgattctgatttcaatggccaaactgtgctgcacagctgtagaaactcttgctgcttgtggaacagctctgcagataccggcaaggaaggatgtcccccataagcccacagcatagacttttcagggtgaccatgcaaaactatgttgttaatatttttgctttcctcctacagaagaaaggcaatgatgttattgagtaaccagtatgataatttgagaaaagaaactggcataactgaaaggtacccttaccagaaccacctgaacttctccagggaaaaaactgtgcatctttttgatagattttatcagtgaccaaaaggaaaacaatagatactcatctgaagaagagaccaaaccagaccaaaagaatgaatggttgtcaataacttcggtgtacaactgaatcaacacactgaaagatggtgctccaacaatttcgcaaagaattttcttctccaatacgcgaagcgaatccaaaaaccgagtaaaagtggatacatctgtgtggttgtcgttgctctctacaagccactgctgatacgaacgacgaagaacgccaacagagttgagagactcaaagagggatttactgtaaggtttggactggtcatttgatgcggctacatcaatcaatttggaggacagcataggaattggaacagcatctggatccaatctgcagaggaatttcagatttttccgacatctagatatatgattccaaattggatgctcaaactcaaccttcaacgtattgagaaaacaaagcagaaacggacagtgttgttgcagtctagaaccaaaccaactaaaccacgcaagatagagttgaatatcctcttcggttgcctgttctattgtccagttggcagcaaacaatagcatttttgaagccaaatcattttcaaaatttgctgcatctggtgcacagcttgacccaattaaggctttaggaaacaagacttttttaagcgtccaagaatcaatagaataaataattcttggttccccagcagccaactccctatctcttgatttgacattgtcgcttattttaggctgatgtgaggcatactgagctcctaggaactccagatacatgcaattctgtcttactgttgtttctcttgagtaccatgtcaagtctctcaagttgaaaggctttggccatcctccaggcaggtacagatccccacccataaatgaatcaagctcagaaagttcaacatctgataaatatgtctcacgcacaaaatcaacaacttcttttccatcagttaccccaagcgaagagagatagatgtgctcccaacttagctgtaagctccacaaaagttgattaccattcatgagcagcaattggaagaggtgaacccactgttcgagctcaagatacgtgatccgtacaccaaagctttgaccgtttagccatgcatgaacatgtgctttggccatggaagtaaccagcttataacctggaatacctgacagagcaagaaacctttccacacctctcagcacaagctcttcacagtttgagccatcctcattgagctgccaatgtggccccatcataaatacctcaacgcctctattcctcattgctcttgatacttccccaaattttggatttacagacaggaacaaacgaaagtttgggtgcggaaccacagtgacaggttcaccattaacgatcccgcattcatttatagtgattgatccacacggttccaccaatgagttaattctatcaagtacctgaaatttaagttaaaaatggaaattagctacaagggaaattatcagaattgtttctaattatcagggttaacgcaaaaggaatgtaaccagtacatgatattaaaaagggagattataacaataccgtgggattacagagattagcatttttgaggacaacccactctcccttttctattgcctttatcagcattcctgtcacccattcaaactttgtagactgctttttctcatgagtttgtaactgcaatatagtcttcgagatttgttccagatacttttttgaccaactaacgggtaaaacaccttctttcaagacctgttccaggtcttctacaacctcttctaatgtagacagtgtttcagagtcgttcaagaagaataatgggttctccacgagagaggaatcaatcttatttaaataggaaagccatctggaaactaagccactcctattgctgaaaagggcctcctgggaagactgtaatagcagactgttatactcatcgacaaggtgctcaactcgagtcatcaccaatctgaaattacggaaggcattgtactgctcaaagcatccgagtagatcagagctgtcagtcgcagacgaaagatttaattcattaagaggatatcctgttaactgagccaatattctgatcaccgaagtctttccagatgacgatggtccgactaggatgcacaaccatttattctgcacacaatgtgcaacagcttccagattttgacggatttcaggcaaaagtttcaactgctcactggcaatattagactgatttaaatttcgtttaatggcagcagttccaacaactaagtacgcaggatttagctgaacccgaggatacggatttatcgacggggttttatcaaaaatagccttatagatacgcagaacttctttacggtcagttgcagtacgcattctttgaatgtacagaacattgagaaagctttcaacttctaagtcatgtatcgcctctgaaacgacacgagaactcaatttagtccaagcaactgtcacctggaaaaaatgtattatgaaaaatttaaatgactctagctactaccttgcataaactggcatgatcttatcacatcccgtagattgaattcccatggtgagccatcgtgaccaaactttcgatataacatagtaccatcgtgtaactgtctgttgagagcaataagctttgaaagcaatggactaggaacagatgggtaaagtgagcgacagatgaagaggtaatcatcttccactaactcgtccacataaacctgaaaacatttgaggcggagcagatgaaattttcatttggaattataataaaaatttgacatgtcatgagcatccaggaccagaaaacgaatagtagaacatactttcgtgaatcggttaaggaaagacttgggaagacctttcctgccaccaccttgagtggaaggattctgacatgcaaaaactctaaatgttggagggcattcaaaggtacagcccagttctgggatgaagacttgagcacgatgatccaaaatcgcattcaaaccctggaaagatatataaatatattttaataaatctcaccagaataatatatgtggaaaggcaacagaattcaacatattctagcgcaagaaaatttctactgaaataaaattagtggtttgtcggctcacctctagaacagattgtggggcaaggttcagttcatctaacaaaacccacgagccttcttttagagcctgtagaaattgcataattgaggatctgcaatttttaaattgatacatacttttagataaaacaatctttaacctgcaagagaattccatcagaccaagcaaacttcatgtcctcatcactttcaactggtaaatctgatcccagcaaatccatcatgtcagtctgcatcaacaaaaccatagttatagtacccaacagattaagtagcatacacagtattgaaggcctggtgacgaaatcgaacctgctccgatagatttatgcgcacaaccttgtggccagaatattttcccaacgccaatatcagactagtttttccaacaccagggctaccttctaataaaactgcaatggtaaaatagaccaatattaaagctgacatcaatctccaaaaactaccatgataaccaaaagtaatgagacatacttggttttgaaagctgcattgcacgcaatactctcaagacattcctgtgggtagttggtgctaaaaactcgaatccaccaatctcaggattttcatcacctgaacaggcaggttgtaagttccaaacaaaatctcataaatgctataatcatagttgctatactttgacaatattaaacatatcctctgcagaaagaacacgagcagctcacctttgcttataaaaaatggatcgatgccaaacatgccctcatgtcgaacactcttacttttttcacaaattgctttggaatcaccccagccatacagctccattcttgaaagctccaaaggtagtgtatcgctagcaaaaagctgaaccagaaaagtcagatactcagatggatgcgacatgatgagacattcgtagtcgaacaacgagcatcactatgtgttgaggactaaagacgatataagtcacacagttaagaatttaaagatgctacgaaaacgtttttgttctatagcaaaccgaactgatttactggaataacattcaacatatgccactagagaaaacttggcgagtttgtgttgccagaaaacaacaaaaataaagagatatattgtatcatcaagattgaaattacctcaagttgttgtaacaggaaagcgaagcatttttctctcagatcttgaccatcccttccagagaaaccagttccttgcaaaacataaaaaaaaaagaggttaatcaatcatacacgctgggtaaagatatatgaaagcaataccactcaaactcagctaatgaagatgaaataccaataaagttggatatcctaaactcagtaaatccaacgacagaaactacataacacaagttgtagattcagctagtgaagatggaataccattatattcgaatacccaattcaacaaattacatgaaacgatatttgcatgaatttatataacaaacgatcaaggtagacctattcaaacttttagatgtttgatatattccagtgtacttatatcattacgtcaaagacagaccagtcaaaaaatgtaagactgtagatgacaaaggcatttataaaagcaatcaatctaagaagcagctagagaacctaacgaatatgttttactggaccaccaggcaaagagcatcttttcatagggatgtgagggaatcactagagcataagctacagtgaaacacccggccacagatatacacgactaattttattaccatgtttttggacatcgagaagttcaaaaaaccacattgttcataccagaatgcaatcaaataaacagaaagctccccagtgcagataaaaaatggttacagaagggaagaataagagttgaataagtgagtatagcaataacacttcaaacctagacagaaagattagaattacggaaaaacataccgagacttaaaccgtcaagtaacacgagaaatgctccatgaagaatagcatatgctggtcctaaactctcagttgccatgttgacaaatgcaacccaggagaggagatctctgacagtaagcgttctcccagtatgcaacctgttgaaccactgcagcaaagaaactacattgaatctactgatgcaaaaaacatataatactgtacaattataaagtatcatgtatcattgggttggctgattttatagttatgattataactataaagctcagaacagtttgtgcctgacgagagagcatggaaaagagagagatggtatggagccaagttttaaaaggttacactaaaaagtaaagcaagcaaatcgttttccaacagcacaaaaccttgatctgtgtggtcgtgttcatgttggtaaatggagacactacaaaacactaagggcatattcaagcttctatattataaacttcaaagcatgtattactttcagagttacagaaattgaaaggaaataaaaataagagtaataggaaagggaaactacctcccagaagttgatgatgggatctacaacattagattccttcaaactggacaggctacaaaacaagaatattatgaattagcaacaagaaaactattgacaagtatccttctgagcatttcagggagaccacatacccagaaaaggcaatacttctgagctcctcagtatctgtaataggagggacccatatctcagtaaaacgattacgaagcgcaggtgacaattccttctttccataatcaccacccgggttcatggtggctagaacaaaaaagtcttcatgagctacaacttcctccaagacgggaccacctttctcagctaaggactacaaagataaagtggaaacaataacatacgagaggacaattaaacagaaataaaaactctacgaagaaaatggaaaccaacatggagaaatgatgaaaatgataaggaatggctaaatgatgaacatgaaggcagggtagctttactcaccaatttcctgtctgtctccaacacactattcattctttctaatacactgtcatcagccaaagatatctcatccacaagaacgatatttccagctctcatagcttccacaaggggcccatcttgccaaacaaatattgcacgccatttttgatacagcatcaccatattgttccttattttctcaagaaaatcaacatcctgtggcgtggcggccactcctataactgaaccatttttgtacttctccaaagctacctctactgatttgatcgacacttcagctctactaatatctccacaaataacctgcacatgacatgttcaaggaaatatagcatccacattgaacgaaagacgggtgaaataccaacatcaatggggtattggatactaacaatatcttggccaaaaggcgtcaatgcctgagagagctccaactgtttgacttgattctcgtattctgtgatcaattttgatctgtctctcacaggaaagaatccctaaaaaagaggcggacattagaaattgtaagatgaaagaagtaacagtttagcattggagttcggaatatgtaagatgaaagaagataagcctacaccaaggaaatcagatgtttcggtgtattgatgacagttaaggatgtgcaatcttttcttcttaacatcgcttagtatttggcagattgttgttttgcctcctccagtgtcaccaacaagaagaacaggctcacgcagtttataagaacggtcgatgagaaaaaatagtctccgcatactttgagtccaggtgaattttctgttttgtctatatagaaattgaaaatagcaccataaaatttagccaagactgttcaagataaaacaaacaagctcgaagaaaataattcaataaaagagaattagaagaggaaaggcatttacatggaatccaaccttggaagctcctggggtaagaaaacaaaagcaaaaaaaagaacagaaaaccattatttatatcagaatagtgtaagaaacagcacctttgtaatgatgcagtaatagttaaacttaataataatgcagtaagaccaacagtgaaaaacaacagagcaacaacaagcaattttcatggaacaggcagttcactgtatgacacacaactccgtcaaatggatatattaagttaaaagacctacaatataaacaaatttcaggaaacctaaaatgaactagttccaataagaaaagacatattacatcaattatctgaaactagataacataacttaccatattgtacaaatcatctttggcaagactgacacggaaatgtctctccagcacctcttgaacaactaccttctcagtgtcatcacgcagcctttctgcaaggatgtaatacccttctctggcgagttcttcatgagatgtaccgtcataagtcctgaaacgataggcccaccggaataaatctcttggagttatataaccatgttttccagcaaaagctttgctactctgcctattgcgttgcaggtctttcatcacttcaaccatttttgaagcatgactgttagcaatactacacttcgtagtaagaatttcactcagttcatcttctggaatttcatcaacatgaatctccacaaaccgattgcgaaaagctcgagacagtattttgcgtccaccatataaagtaggagggttctgtgtagcgaagagcataaaattaggatgcgctgagattgtttcactcagctcaggcacaaaaagctccctattgtcatcaagcagcctgtttagtgcctctaagacatcagatggagccaaattaagttcatctaagacaatccaatgcccacccctgacagccttcaccaacgctccttcgtgaaatacaagcttccctgaagaatcagtcatataggaacctaaatactcttggatatcagtctgctcatgattattgattcttacaaatttgtttccacttattgctgcaagatatttgacaaggcttgtttttccactggatgttggtccttgtaagagcacaggatatcttttaataaaaatggcatgcgccaaatgattaagatgatcaattacactcttcgtcttaacataactgccaacaaatttatcagaactgccttttaattctcccaagtatctttgaagtggttggcttcggatattttccccggagatacgctttattatcggttccacgatcttagcactggaagcatccaataaggagaggaaaaacatggaaaatccatcatataatgctttctgaaaaccaccaatagcttctgcttttatcgcatattctagcgcacggtatagagaccttaagctgtactgtggcttctgattagcaccatcctgcaagctttcttcagataaccttttagcttctttgtaaaaccaaacaatgttggctactaacttactgtcagatccacgtccacctaaaaatcgtctcacgaatatctccaggtcatcatcacatatgtcatcatccacagcatactctgtaaatctgcttcggaatgagaatggcaagtctcgcttaccagcatctgtggctggattcatacaagcaaacaaacggaaattcaaatgtctgggaatgcccattacatcccctctctcagctaaacaaagtgatcctctcactccttcaagaacaccaatcagcctgcccaatatctctggtggggctaagttcacttcatctagtaaaacccaatgcccctccctgagggcagtcacaaacgcaccttcaacaaaggtaaaaaccattccacctgaatggatctgttgtcgtatcttattcactttcgtcctcagacacgcacagtttttgagctcttcttctggtttcttcctctttctaccagatctagaccttgcttccccaattttaccttccatgcgttcagtaattctaccttcaatgcctttaataatgtccaataacccagtcaaaaatgtatgccacttcttggctctaaaattatcttgcagccatttcataatttttgaatcatcctgggtaccaaaaatgaagaggactcattactcaagcaacatgctaaattcattccataacatatctcgttaggaatgagtgtaggaagaaattcatgagtgactaagttttaaatgtaaagctaccttaatcttcaaatctcttgccaattcattgaattcattgtacaccattgtgcacataagctttggatcaataggcttaaaaccacccaatagatcaactatatcactttgctggctcaaattctgcagaaaagtaaactagaaattatagaaaaccactacgataactacgtgactacaagaatgtaagtcaaaacataccaaaacagtgagtttctgtccgatccagtgtgcaagattttgaactagtgtcgttttcccagtccctgtttctcctactaagagaactggctcattgtactcgacagagcgagctattttctcaagtaaccgtgtagatgtgcgtgtttcaacaaacctagaccgatcatgtgactgagataaaaaaaaagcagatcaacaagaggcttcaatagatgaataattgtataagaaagaagggcgtgcttataaactaaccgcagtttcaccaagtggaagagaaactctaccaatttttagaatcctggaaaattcctgcagttcaatgaatatttagaaaaaaaaatctcaaagcagcaagctaaaacactgtcaaggatacttaggtacctgaattgggggcttatcctgagattctggaacagcgacattccaaatactagccacaatctcacttactgccactcggtttttaactgacatattagacgcagagaatatatctgctgcctgaggatatagcacaaaacgccaaattaattacagaatattagaataagactctaatccaagttaactttaacgaaacagacctcctgataaactgcatggccatcataggagggcaggccatgaactcgttcacaccacttgagcagatctctggaaatgatgacaattcagaaagaatagaatgaaaaatccattaataacaacaactcacagtcatagaaatatatatgcctacctcagtgaaaatctacttggagaactgaaagtagctgagttttcagttgttgaactagaaaattggggacgaagagcagagttgatggtttcaaatgtttctgcaaagatggaatagtttcactgttagtacagattccatgtaaaggggtgtatgtgcaagaggaacctaccaataagcttctctgcaacaggacctaggttaggatacctagcacccaggatactttgcaagctctcacgatctggtggatatacaacaattctcctccatagaggactcaacgaatttccagctacatccaagaaaaccagacataaaaataataaggtgttttgaactgaaccttatttgcagcaagtaaaagatgggttttcttcagctcgataatacagatagttataagaccacataagagctttagtgtagtaaacatcaataaaattggatatttaatctaccatgcactttgagctaggttggttatttgcaaaacggccaagctgaataattattataacagtcgtttattgagcctctgatcctactagcatttggttttacgcttcaagtaataaactccctaaagttgcaggtttcaagcttatacaactacaatatccttcaacctaataagtgtctgcaagacataccgtctctgatgtgtgacacactgcattcaggtgtcgatatagttgaaaacagttggaaagtttctgctatccgtatctcctgcaagcagattaaaagttaagaagctctgaaaattgaatcaatctctcaaggaaatgatacgagtacctaacacagagttattcaaaagttgtggccctagaatatatttaggtatatgataagtaacagagcagcaaaaagagagtgtatacctctccttgactggtcaagaatgagcaagaccctcccagcaaagatgacaagacgaggggaacatctgatggagctttgtctatgtcctcaagaaccacccagaacccattcataatcgcctgccaagacagaaaaaaaaaaacaaaaaaaatattgatgcaatcgtaggaggacggatagatacaaaaaataggctgccataattccacaaacctgggtaagtgagccaggctgccatctgaattcgccaggttgatcagtacacacataagtgccaaccaatgttttcccatcaagttgatcatccatgtggataaatacaactatcaaaattataagagaggcatgaagaaaaacaaaatataatgagacataacatggtttaaggccttcattttaacagtcgaaatactcaaatgtatttactatgcatagcaacatctcaagatagttatttttcccttccaaaaaactagaaatttctctgaactttagccaactaaaaaattatttgagagcaatatacgtagatattaaaattataacataccatggttaccactttcatcagccaacttcctaatgagggcagactttccagaccccgagggaccatacagaagaacaggtcgcttttgactaacagccaatgagaccatttcaaaagatttcttcaccctagagtggatttcaaatggttcagagaaagaattgacatccctgaattgaagaggaaggtggaattcaacccaaataagagaacaatcacattaagtacaacggggataaatggtgaaaatgatgggaaggaacacaaagataaccaaccaggtgtccagcctccgaatcttcatctgtggctcatctgcttctaaccctgctgattgtcgcttgttaattccaggtacaagggtattaaattgttgcaaagacttcaacgctgtgtatgtaggcaattgaatgtataatccagccttctctatttctatatcctgacaaaattcctcccagctgaatgtatcaaaaaaattaaacccttagaaacaaaacttcagacgaaagtgaattagaagtcttgagtatagctaaaagtggattaccgtagcaagcacgaaagtgcttcttcctcttcaaaaccaaaacatcctgctaatctgtcactgcatctcaaaacaacagaaagaatttgaatcccacaccacacagcatctcgatacttttccaagaaatgcctttgttgtctaggacattctgagagccttttcatggagtccaagtaacaagaccaatcccacaacttagagaaaacttcaggtctaatgacaagaaaacgatatgatactcgaagacaaagcaagtacgcatctgtagcctgattcagggggaaaaaataatcaatgtaactggccaaagactatgaagtggataggaataataacatatgatgctctgacaccaataaacgtcaaagataacaagcatacctccatgcgcgactcagaaactatatctttcacaagaattcgctcgtatggtggtggagctttctcaaaataatttagaatagacctacaaaattaagaaagcttccgttgggagactattcaagctgtttcaattaaaccaatttaacttctgatctcatcatgcatattctttctagcttcggtaacaaagtaaatagtcatcttaccctaacaaagacgtattgaaatgaagcgcacgactgaaggccaagcaagcacactcatgaagctccaacctttgtccacgccggacataaaaatcaatcacactaataccttccgtcatagcattatccaaaactgatgacacatcgtctgagtagtcaatacttgacttaagatcatccactagacgaagaagacccaccactctatctacaacatttcttattattggaaggaagcaatgaaccaacggaactgtaaactccgggtgaagaaacgcatcccctaaagcatgaatcacctcttcgttatccacaacttctcctccctaaacaaaacccagtagccataaagacaaaaaattgttcaaaacaaagtcaagcccataattctgggtcaaatttgaagtaacaagtacaaaactttaccttgctgagaatcgaagtgaaacatggaaaagctgcgacctttggacaacgtacagagaacgtctccaaggcaagtttaaggttgaaactcccatcaatagccattgaaacctgttgacaaacaaaaaaaaacaaaaacagagagatacagagcacgaaattagggtttagggtttaacgccgaaggggaagatttaggtttattagtctcttttcgtcaaatcctccattgacggtgaaacttgaaatcgacacgagttgggatatgcaggcccggcccaaatagcgtgggcagagggaaacatttagataaaaaataaaaggcccattatgtttttgaaaaagtgtaaattgacccaaactttttaaataaaatatttaaagggcctttgtattttcagttttttcaaaatatttttttcttcttttacagaaaaagaggctttatattttaaaaagttcggtttccttctctcttctctctctttcatctttcagagagaaagaagttttttcgttcaggatttgccggcggttattctccactgatgttggttccgcttgaggcacaattctcgtctttctgcatcagctttctcagtggtgtaggttggctttgcttccggcgtagatggctttcatagcatcttcgtccggctttgtttctggcatcggtggttttgtcaacaccggtggttggctctgtttctagcgatctcgtcgcttatctctctagcgagtattggctagcttttgctctagcttttgttttttttctttagactctttcgatttccaattagttttggttttctttggctctcgctagttttttctctttctattgatctaagtttctaattcttcaatccttctttgtttaaagggcttgattcgttcttcatgctttctaggttttaaaattttaagaacgaagttgtattgttggattgatgtttctcttagttaatagttcatgttgaagtaattgggagctgaattaaagatcgatactttggattcgattgaattttcgtttttaggtttgatgacctgcaattgaagattgaaagcttgtcgattgaagaagaagaagaagaagattcaaagagtcatattctcatcaaagctaaaattggaatctcgccatgatttctttgggcgaagtttgagacttgtcgatagatcaagttctctggtgattttggtcggattgaagattcccgacgacacacaattctgccagtgaacggaaactcctatctcttccacttcccacgtgtctagaagtctggttaccattggatacgtgtttcatgtgctgtctacaacaagctttccttcaatttagggtttttagttgggcttttcttttaatttagtgttatgacctgttaattttggctctgtattatttggccttatataaataaataaaacacagttgttacacaaaaaaaaaaaaaatttaaaaagttcaaaaaaaataaggtcaaaactatatttataaaatagtccagattttaactttaaaaaaaaaattataaaacaaaattgatgtacaaaaaggtccaaaaaatgatgaagcatgtgtgtgaagaaagaataaaatgatgaagtaggttggagatgggatactaagtcatagcacaaataaataattttattgtaattttgttgttattaaaattatgttttacatatgagagggttgtatttttcttaagaaatatttgttatgtcgtgtttgaatttggcttgtgacacaacgacacaaattaactactagattacaagttgtaatggcgagaaactttttatattttcaggggaagtcaaattatttgaagtgttgtagaatatatattgtcaattggtaatggtccaaaacagctgaccattttggatagttaaaatagataattttttgttgtgtatttgtataaaggtaaaacttacaattaaaattaaaaatgcccgctttttatatatacttttttgtagtgaaaaggttaaaaagattaaattattttggataaacagatttaaaaagttaccaaaattttgtaagaacttttttatgattaaaagtctacttcttatacatgacatttgtattgattgtacaacacttgattgtaaaaaaaaaaaatgttgtttggaaaaattaagaatccagaggtagtgttgttgcccaagtgaggacatagtacaatagtagtattcaaaatgctaacatgctaattttaaaaaaatctaagaaatcaacactcaaatcacttagtctcatgcttgtaaacacaaaaccaaatacatcaaatctcatgctcattacatttcatacatcatcttagtcctgtgctcttaatagtttgatgttttatagaaagaagtttattgtaaattctaattatcaattaattcaagactgttttaagagtgaaaagaaaaaactaaaatcattacttatcatgacatgtggctagggatgtcaaaatgggtcaaaattcatgggtcaactcaactcaactcaacccatgaaccctaatgagttgaaaattttgactcaaatgagttgatgagccaaatgagttgatgagtcaattggtttgatgagtaaaatgagttgggttgtaatggttaatggtttcaatggtttacccaattaacccatcaagttttgtaaaattgaattaaaccaactaaaatctctaaaccaatgtcaatttaagtttaaccaacatatttaaaccaatttaataaaattaatatttttccaaatttcttaaatatacaagcgatgaaattgataaaaagtaaactcgtaatttttccactaaaaaagataaacccgtgattttcccgccaaaaacgtaaatccataattttcccgccaaaaacgtaaactcgtaattttcccgccaaaaacgcaaatccgtaattttcccgccaaaaacgtaaacttgaaatttcccgccaaaaacgtaaacccgtgattttcccgccaaaaacgtaaatccgtgattttctcgccaaaaacgtaaactcataattttcccgccaaaaacgtaaatccgtaattttcccgccaaaaacgtaaactcgtaatttttccgccaaaaacgttaacccgtgattttcccgccaaaaacgtaaactcgtaattttcccgctaaaaatgtaaatccatgatttttccgccaaaaacgtaaacccgagattttcctgtcaaaaatgtaaacccgtaattttcccaccaaaaacgtaaacccgtaattttcctgccaaaaacgtaaacctataattttctcgccaaaaacataaacctgtgatttttccgccaaaaacgtaaacccgtaaaaagtggaatccgtaaatattctaagtttgataatgatgaattaataatattaattatttattattgttttataataataattaattaaattattacttaaatgggttaacctatttaacaactcaacccatcaaattaaatgagttatgggttgacccaactcatttaacaaaatgagttgggtcaacccataactcatttaactctaaactcatttgattatgagttgagttgggttacccattttgacatccctacatgtggcaaaaagaataaagtgttaaaattgtttcagtctttaatttagattattttcatcttttcactaatttttattgtttcctctacaataacaatagaaaaataaaactactcatatacatgaattggattgtctttccagatcagattagcaaccaacatattaacacgtcctcacactaggttagctaataattcgtattttgttctttacagcctcacaggtagagcatagttgcagaggaccaactgaagcaatcaggtttagacacctgagaattcttcatcactaaaagacacagagcactaaatttgttagttgtacgccgatcttgttgcgggcgagaaacagtcgtcacttgctgattttttctagatgatatcagtgtcgtcctaacatgatcatcatatttagatgatattgatatgcttgtgggtttacgcttctgttctggtaggtttatagatgtcttcgtattatcaaactgatgaagatccttcacatgttctacaaagacgtagactctctgataattgctaaaccattcagagtcttctccaacaccttgaatttcaacacttaagagagtgttattttcgggattatagtagaaaacataaaacggtttacatgcatacatcttcgccaaaacaatttcacctctagtagtaaccccaacaaaggaaagattataattaaccttaacaacattattatcaggcttcaaagtgtaggcatacttcgaccattcctctttctcgagatcctctaaaacccacatagataactcaagaggaaatccacctaatttgtccttatagtttatcaattcaaaaaaacattttaccatatcatgatttacatggaaaaacttgaatttctcaaacctaacatcaaaacaacctatcacatcattcgagctgtcctgtgtatcgtaagctatgtaatacaaaactccattaatgcatatcgggctttgcccacaaggacgataccttaaggaactttggatactcctccacttatcattttctgttcctaatgtcagaatataatgattgtctagaatgttaagaaccaaaaccttgaattgcttgccaatcgggtcaaaccctaaatcgccaaagattcctgacggttgaggtggtaagatcgcatatactgtcctgtgctaggtttacatatcacacacacttcatagttaccctcttttgacatccacacagtacgtaaatatatcaaaccaaaagcatagctagtcccgtgatgttgatgttgttttatttcagaaagcttcatatgaaaatcagcggctacttcaagagatgacttctcatatggattcttaggctgaggcgacgagtagaagctccactcaccgcctcgaacgatcccgagtaagagacgtggattagatgaggacctgttaacgaacaacctggtgaaatcttgactggcaagcatggacgaccatagcttcgaaacgcagtgaaatctcgcgatggactttgtaggcagtctcgagagtatatcaagaatcagatcagttgggatggaatctaaggtttctcctctattcatgatcgttgtattagtttgcttgcggaagaaagagagagagatatgaatacaaatctgttaaaatttgacctaattagattatgttaaattgttaatcaatctcatttatggtcggcactgaccaaggcccaagaagccatgagtgttaagttttaaccatcctttttttggcagcgggccttaattaaccatttaacttcatcagaacttttaacagtgtgattagcacttgcgcggagattcggagagcttttttacaagaaagcacagtagaaaaatcaaacaatgtataaaaccaatttcaacttttatccccaaaccagtaatcacagcaattgaagtgacgcataaagacaacacaaatgaatcataaatgttttacagtaaaatttatatataatccacgtcgctcttattttcagcaattgtctcttccgttacaataacatcagctccaacatgttccttgctagattcatcctcgggtgacttttgaatctgttgcggttcaagatcatctaaggctggtgactctacctcagttgaagcaagtttgatatcagttccaatgttttcagattccaaattcttgctttcaactgattgttcgtttatttcaacaggatggtcaccagatgaggttttgtcattctggcttgtaagcgcgtcttctatgagacatggctttactgtttcctcttcaacctctttgcttttgtcaaccgagtcttctcttgtggtgaaacatggctctactgtctcctcttcaacaacctctttgcttttatcattcgagtcttctcttgtgatgtctgtggcatggtcagatgcaagatgttgatcatcagtttcttctgcatttgattcatcatcctgtatagaagacctcccaggaagatccggctcctcttcagcaacactttctgtcttagactctgacccttcaagatttgtggaagcagggaaagactggaaagtgtcccaatcatcatcatcatcatcttcttcttcttcttcttcttcgtcagttccactttctactgtgctaacctgattgaaagatgttggcatagtagacaacgcttcttctttaaccatattagcagtagaggtaactttttcaggcgttgctaccacaggtgctggtagtttgatatccatggctggaaccaaggattttggcttcgcaagggcactatctttagagacagaagcacgaataatatcctaacatcagaagaacaaggacaccaattagatagttatttcaaatttttgcatgcataatgcttagccatgacacatttaaggaaaatatagagaaagatcagatgattaaaaggataggggatttgggatccattagaactttcgaacacactgtttccaggcaagtaaatcaaatcgaatgcatataacaacctgaagctgctgccggtgtgttactggaagcgacagcaaaacatccttaaagtgaacagccgaggaaggcaactgagctagatgagaaacaagccgcacagctacatttcttaactcgaggacttcctggtattatccataaaacaataaaaagaagacatttaagccttaagagggagcaacaaaatttctaatacagaatttacatgtcgggctaggaatggaacctgagaaacgccatctgaagtcttagagaagacgacaagaaccacttcaagaaaaaggctcatgaatcccttctgaagttcatctgtaattgagtgtgtctgaagtagcattatgaaccgcaagcattcaccagctatgaccaccgattccgtattcacaggtttctatccaaaagaataagaatgaagtcagttatcatagtttttacatctaaaaagacgtcaaaattactcttttcttctaaaaatgtaaattcagtgattttggaaggaagaaatgagaaaacaaccagaagcgccctctgcatcagactgacaatatctccaataagttcgccgacaaataagatcacaaaacttttctcctctgggttgttgtatcgctgtaccaagctttttagcacttgtaagacagtagcttgaacctacagatatttgaacttatactattaagagctcgataatcaacagttgaactagcatatgacaaggaggcaagtctcagatacctgaacattggaatctttaacaactgctgctatactaatttggcaactcttcaacatgacaatacagatagaattggtattagtttcatctactggacaatcaaactcgtaggcaagcttagccagtgaaaagagttgttccagacagaatacaagcttcaactgaagtagcttgcgtaaccctgatctcttgctgtccacaagctggataccgttgatacaatctctagtcagatccccaaccatatgcagacaagcaccaaaaattgctcttagatggaagccactatcggcagcaaaattagtgccatctgcaataaaatcattttgatcaaacagtttcaacaaactttacaatgtcccaataaaggatgcaaaatatttcagttgcacaaatcgacttcacaattctgcatttgcaacttcggggctcacataaaacagacataaagcatacatgatctatactgaatgtaccatcaaaacgaatctaacattctaccctctcacagaactttgacaccatctgataaccacccttagcctagtagacaaaaaattaacctagcaccaactctatataaacttactatctgttcattctatacaaactcttatcattttagcttcctaaataacatcggccattgcttatcatattttcataccagtataaggcttttgcgatgaggctctggtaagctcaagcaataaatcgttggtggacttcacaatctcaagagctttgggtaggtatgcgtcagtggggacttgccggatgcacttgtagccacttaataaaaatgccaaaggcgccgaatttaaacgatgctgcattttacaaacaatcatcagttagatgtaaagagtacaacaaatataacagaattcgagaaatgcaacaaataaagcaaaaatccctcaaagtttatatgttaccttcaactcaaaacgtttcactagcgtctttatggagataaataaaggggaaagcatattgtcccaaatgccatcatctggcgaaatttcattatgtctgaaacagaaaggaatttttggtaaggtcgtttccaaatataatgcagtatatttctctctacataattttaaacagaagtgaacacagcttccaaaaatctctttaatgcacacctgtggagaattttgaacaggtacccaagacagagttcaatagtcgaataggcaaattcctcactttcaagaaaatcttttggacagttttgtgagatctgttggaaaaaaataaacttcatcagaactcgcatcttttctaacgcgtaaggcatatatagtcctggaaaattaatcaggaatcagtgttacgaagaaattcatcaaacagtggtattatgaccatgaagtacataatatctggtgatatgcctatggcagggtaacagaaacaagggtaactgattatttctcctacagtggaatagtatatcttggttccaactaactaaagataaaagagaacagagaaggaatacatatatacaaacgttcttgaacctcatttccaatcttaagaaaagtcagtaaatgcaagccaaaaatgatgctttagggttcaataacatcaacgagttgtgtacctgttgtactactgatactgcaagaatatcccatgaactgtccatatgaaaggaatacgacaaaacctggatgagttacaaaaggaaaatgaatccaattagagtagtgtataactaatcaaagctcacagcctatggcgcttggacattgctaaagcagaagccagttaggaaaaataagaaaaatatggggtgtagtggatctgcacaaagcacaaggtattatgtgttccaaagaagaagcatgtggctgcttaaaccaatatcaaatacgctttagtagctgatgataataagaactaagatagaatggcatgagaagaatttaaaaggaaacaaaatatttgaagtggctctacctgcaatagctcttggcagaggtctatactaagaaagccactggaaaaaaatcttccagcagaaagagattggaaaactggtaatgcaatttcatataactttaggccctggaacgaagattcgttgatgctggagtctccactagatttgattttagctgagctaaaaggtattacttgcatactagaggctggatgcatcccttgaaacaagacaagtacagcgaagccccatagaaactgaaaatcttcagcctctagtgtaaccatgcgatgtgtagatatcaaggacctatcagaaaattcttcaacactatgattcaccggaattgcatccaggactaaagcttgcaggatgacaggccatgcctcttccagacaaggctgtagccttcttgacacagtatgtggcaggatttcatctaagaatgagcactgctgcggcaagtttaagatcttattagaagataggggagcacaaggatagaagtgttcagctaaagagagaaaacagaactattaggagttgactcacacttttcttgaggttttgacataagcaaatataactgtagccctttaggacctgaatccagtacctcccgagaaggtctgaactcttggaaaacattggcaacagtgcttcaaattctactggcacctcaccatggtgttttctcaagaacgtaaatatataacacttaagcgaggcatgtgcagcaagaagcctgatcttgatctacgttgcaagaataagtatactcagtgatagccaaataaaattagaaaataaacccttttgttgcttatgcaccttgcttgtgacccattcagcaaacgaaggataatataattcgttaaagtcattgagtggacgtgaaagtagagaaaatatgcgtttgactgcaacttgatcacttcttattattccactggtcattatctggaattaaacacattaatttagtaacataatggccaaaaatctgaaggaagaactacgacagatgtcatgctcacctttgtggccaattgtaacccagcttccagaagaacagggccagaatttgcatccaaggcagtacgaacagcagacagaagttgagcctaagtgtgaaaatagtcggtaactattatgttcattaaaaagtttaattagtctttgttcgttgagaaataattttgaatgggagcacctgatactgttccagaagaagatgtccaggaagttcagggtcggctactaatttaaactgcatcagtatcagacaattacaaattatgtttactgcaaactaccacaccacatcaccaaggtgaatatgacaaggaggctagcaaaatattggcgagaaacacacatgtaactagtacaattcagaaatcttccactaccaaaaagtctcaccttctcaagaatagtactaagaagtccaactccaattggcctcatgttttcaaactgaatagtgcttatctgaataatttggtagatcttgttagaattctctcagggcattttccagaatacttgaaatggttctttacaaagtaattccttttgtttacctgataagcaagagatattagctcttgtagttgaaggactaaccagtcacctgagctttgtctattagaagcaagattcctcgccaataaaatatcaaaatgagcagcatcattgcctacagcctctggcaaaagactcaaacacctacagttgaaaatcaattgggctaatttagaacacgaacaaatataaactcttatgcagtttgactgagagctgcaaccattaagttattaagtgctcaggattaactaaacgttcagatttcatttaatattggctcaatgctgaaacccttgaagaacttgtgaaaatttggttctgcgtcaacatacatttttgaaatatcagttgaaattttattttccatcaaattttagttatggtcacaaactacttcagagcattagttaaaaaatatttatgtcaacagtattcactagagaggtagggtaagaacaaagaaacatctcccacttactcagctgcaaaaactctggttcgatatctcaaggttttgtctttatcaggattggcccgtatagatttcccactagagctagaaaccatgtcttcatcatcatcgccaaggttctctcttgtgtaagcaggatcattttctgcaatgctcgtttcagcactccttccagcggatgctgcaagggcctatcagcagagtaagtaataaatctccattgattgtgggaataaaaggcagatctcgagatataatagcagatgaaaattcaaaactgctagtaacattttgaacaaacggcagcaatcatgagaaaacaaataaattgccatggtcccatttcagatagttcatactgcagcatgaaaagtccatagaaaaccaagattttagtatgaaaaactcattgctattaccatgttgcggcatatcaacatccatcgagatgggcgtgatgggcatgttgcataaagcaggcgtatcaaggtactacggatcaggttcccaatcctacaagagcacaacatctctaggtcatcaataaagcaagttaatcaaaaccttacataagaaattaacattccataaaacaacaacatttactgaaagaacaatttcttactcagaatcagtttcttcatccaacatctgaaataagttatcctctatttgctcatcaatgacagaaacctaaaacacacaagaatgcgataaattccgatggtgccattaattctaagacgatgaatctggaaataaaattttgggtcaaagcatgcggtttaccgggtctttctcaaccagatgccgaagagttgacacagatagacgcctaattattggctgttttacaaaaaaatgtaaatagttttcataaggggaagcccttgaagactaacctatgaaaagaagagatagcaaaaatgaaaaacctgtcttgatgccagcgtcattaaaagattttttacatgtatatgtactgaaactgcttgtggagcaaaaagaataagctgctgggtaaaacagacgcttctgaaaatgtttagatttacaataaaaattaagcttgatacaggatagagataattcatatagtagtaacaatggattaaaatgatggtggcaaagagaaaagcattcacatactcaagtagtgttggaatctcttgccaggaactaatctctgcaataacagactgcaaaaactttattttagaatgagaaaaacagatggccttacatacgaatgcatgcaccttcctttatttaaccaacaaggccagacataggatgcataatttactgaaatggaaggttggaagttttgcggtaacaaaatttcaaatgagaaaacaccattttacatactgcatgcatcttacttttctcaaagacaaggttggaaggtccagaatagtaccttgcagcgtgaaaacagaatgctgccaggagaaagctcagggccaaggacagcaacaatagcattaataaggcgtccaatgccttgagaaagatcgatccatccactttcttcagtcaacaaaatgtccaaggcaagtcctaatgctgcctaataatgaatacagaatgggaatgataacatgacacaatggatggagatatcaaatcaagctgggaaaatgaagttagcagttataaccatgcacctattgtaaggcagataaactttcttaaacattaaaaaagttgcagctattgaactgcaccagagaatttctctctctgtcaagcattaacagattcaggtgataaccaagtaactcatttagccaattttaaagatacgcagaatttcattttagtttgccgaactggcaacccgaacaccaaaataagatcctttaaaacgaaaaagcaaaatatgaaaactgtgcattcaaagatcttaatgaaccacgaaattgtttacctgaacatgagatacgaatgataaaccagcagcttcaatggtcaaaagaagcccatgcaaggcccatatcttaagaccaagaacagaggttttggtcaaagatgagactgaattaacagtagcaggtactaaggacgacaatgccattcctcctgcactgcacaccatgtacaaaataaattcaaaatataacaaatcaacatgtcatagtagccttcaatatgtaaaataatacgtatctgcgaagattgataatattttaacttaattgttgttaaagcatcacaaccagacacatattagcctacttttcaatttttattgatattcacaacatatcaaactagttagaagccaactccacctgtgatgaatgcagccaagtgcaagagcaattgatccaccatagtttggatctgtaactccacttaggtcgccaagaagaactctggtctatttatcaccatgcaaaaacatatgtgagaaataaaggaaatgtttcacgtcctatcactataaataaataaaaatatctagaccaagaaaaccggtactgaattttttcacatttaggaaacaagtgaacaaagcaaaaacagagacatgctatactttaaagtagagtccataagcatccaattctaaggagcataaagaaagtcacaaaaggtttttacgtagagaattgcattgtggacagaccattcttgctgtaaagatgtcatttccaagacgagctagaagacctagaccctcacatgctgctctgcgttgtgatgcacaaatgtctccctctgttagaatattctatagcaacagaaacatcaaaaagttatatataagaaaacaagtgaatcaatcttgagattaggttcactattctgaactaccatccttattgaaataaaatacctgaaaaatggcttgccctgagcttagtacttctgtcgttagttgctgaggacgtagagcatgcaaagcctgtaaaaataaattaaatatgaagttcttaatgtaacagaaccatattatgttcattaactacaagcaaatgatctggattcagatacagatgatttattcagcacagcagtcattacattgcataggcatggtagcacaaccgttccatacccagagaatagagcttggttcattcttcaatgaaacaaaacttatccgctctatatatagaccaaaaatgcgtatgatcctttatataatgtcatgttatatgtaaattttataggtttccaacaccacctgagttcagccctcagtacacttctacacgaggtagacaccatgttcgtacctttaccatactgctatcttgaccgattttttcaatacagtttgttaacaagcaaaaaaacttgtatacaagtattggaagcacctttaaaccggcaagaagtcccgcacaaatgttagtcaagctggctgtacgccattgttgcttttttccggctttcaaacactgttgtatgaccgaaagaagtgagagcatcccttggctatcctgcgaagcaaatgttacaatcacttcagactatcaaaatagcaaatgtcatagcaaacaaggacctatcttgacatatagtaattacaaacctgagaagcaaacatgataccaaagcagagaaccatctgattcaccaatgtctttttcacagtctctggcttcatgattacggaaattttgcataagagttgagcataaataacaaagacaagccggtagccaaataaaaaaccagcacaaccactaaaaccaaatttcaccaaaaagccattgggcttaccaaaggaaaactagaaactttactttcccatacacttggtgctagaccatcttccccaccttgaaaatagcgaagttcatcttcaaaccaatccctggataaaaattcataaaaagttacatctccctggggaggactaggtttctgcggcatgatccggaatacgtgaggatacaaatgcagaaaaattccttaaggaatgcaaaccagtatatacagatgaacatatagtcacctgccaggaatccaaggaccaagccatgcatctcttttgtcaaggagcgacttcaagcacgagctttcctcgaatccggaaggatccctttcaattaaacaaacatgaaagaatgactacttcagtgattaacaacgagatttatcaggccatgtccttatcattcatttatgacaacttcagtgattaacaaagagattttagaaaaacaagcagttagggatgaatattgttacctatatggtgtggtgcatagctgaataatttgctgatgctcacttttataggccaagggatctgggatggattgataagctatcaatattcttatgatgagtatgtcgaccaaagttttgacatcagaaaaccgtttgttggccattgtcgatacacaagacaaagcgctgtttggaataagatgctgtcaactcactcatcatacaggtaaaggatatgaaacttattctcaaatggaagtagccaaattattaaaatggcaatcacatgaagacaaaaaactgtaggaagcatcagtaatgttgtacctacggaggtttgccagtacgggttgaagtagaataccatcattacaagatacaaaacgtcgcacaaaagctgtgagtgcatcaattgcggcggaccacacactacaacaaggagaagactgatcatgtacttgttatcaagaacaaaaaagtggagtcatcacttttattgctcttggacctgaagtaatcagggagaagtgaggacttagccctctcaaaccagccactaatgtgtacaaaataaactacgaccgagtttggagactagtatatgcgagaattatgctaaaagcgtgtgcattgtttagataaacatggtttgcttccaggagctaaattaaaatatacaacatagggcaagaatattcagaccttggcatttcaataaaagcttaatgcatcacgggccagttaccttaacatagattttaattctgcctgttgtttgatcaagtgttctgggtttccagcaaagacgtcagtccacaagattaatatatcaaaatcttggtctccaaactcctatataatcaaacaggattgcataagaaattgaatgctccaaacacagcagttaaagacataaggattatattacctcctttggcatagaatttaatagcgatgataacaataaccatccagcttccttttcacttgaggcaactgtaacatttctccttgattctgttagcatcttctttgaaacttcaagcaccgaccttggcaatctgtgaacaaaacattacaagaaaagtattgcaactgattaatggaagttctgtattggctattctacaaaagtcatggcagattgagaactactctgactatctagcacaaaatatatcctctgtaattttcatagtacgtaaaaggtgtattggccatgagctagtttgattaggtaaggagcaaatgacaaactcccagaaactattgaaagtactacgagtttgaaggttcatctaattgactaaggtaatgagaaaggtagtaatttacaagattaatgggaagattagaaatctcacaaagataataataactatgcagcctaaatgtaagaaccaaatgcccagtaactaatttgttgaaactagcattaacgttaagtttgaatgctgaaacagtgaataaagatgtgatcatggggagttacgaagactattacctagcagggtaaccaagtgagagtccaggcgaaatggagactagagctgccaaagttgctgcttgcccatgtaaagaagcaagatcagttttcaatttgtctccctacagaaaatgacaatggcaaagtcattccccgtcatcaagttgctccagcttacaatagagactgtctatttatagagacttaaagatgaagaacttcaattagatgaaggccaaggacgtcataagcatatgaagggaaactatgatgtctttcatgatatattgatattcaatttcaccatattaattattagtaatagactttcttgttctgcatttggatcagaatgtcacttcacatcttcattaatattcggatcagactttctcgttttgttgccacactctcatacaatactaagatatgccagatcatctaatacccaaaatctcttgcttacttctgacagaatatttagtagaaatacatattacaaatgcagcagaccgtgcatgcatgtgtaattaaatatacaattaaaatacatttcaaacttaaaagaaacttaaataaaaataaatggcatatcatcttactaaagaagaaaaccaaactcagttgacataaattgaaagtcatagtattaccttttcaaaggataaactttcccgtagagcattaagagttgttacagcaaaagatgtcaacccaccaacgcaggtaggatcaacctcagccaaagcacgtaaagttaaagcggcctcaacacgtacctaaaaaacaagtttaagtttgtaaatatgcatttacaattaccatcgggttgtcatttgacccaatgtacccagacattcatgttagcatgacacctaaaactaataaacactgcataaaaccgaatttgtttcaatatatcaagctactaaattcagaaaatcaatcagaaaatactgtgatgacggcctcttccaaccctctatttctatgcataaaggtcttatttacgtacctatagattactgtgatagcggtttattccaaccctctatttctattcataaagatgttgtttgcctagcttttaaagcagatgaaacaatttgacatccagtagtaggaagaaattcaaacaaacatatctttctgtgaaattactagacaaaaaaacacgtaataataatatctatatgctgaaaagaaatagaattctctgataaatgctgccaagaaaagtaaaagggatgaaaaggactcgtgttgagagcaactgtcaaacaatacatgtgaaagcttacaaggtccaaaaaatgtgacaatgcagcacccactgtatcatcgaaaaattccttgaattcatggggaacctgcaagcaagcaagaaaaaatcgagcttaaaattttctttagggagttaaagaaaacagaagtttcatgacataaattaatcagaagagtttacgccagtagggcctcacctctcccagtgttttcaacgtgtatgacaaagcccgcaaagcaactattttcattgatggactggcatttgaagactgaagctgcaatagtttcaggaaaaaaaaaaacgtaacttacttgattatgatgtagaaacattaattaaaatatttaaatatgtagctctgacttgcaaacctgctttccgagaaaaacggaaaagcttctctggcttggttccatcatttgatcaattacgccaacccgtaggatgtaaagaacacatgccttcaaaagtgagaatatagattaaggaatttgatcagcagaacatcactaatgttttcataacagttagcaatgtctcctctctttttataagctatgcagagaattgatatgaatgattcccaacgcagcaatagaggtgcaaggcgaaattttgaaagacagaagtatgtaagaaaaacttatgcacgaccaaatgaaaaggttgggggaggcattgcaagaaaatgaaagaagcatgacttaccagtgcatgggcatcaattgaggagtcaccccgcagcatgtccatgatgggcaaagaatagtcttgaagctcactatctgaatccaaataccttatcctaatggcctgcaaaatttagttcactttgtaagtttacaaggccatgatgccgtattggagatatgcgtgtataaaaaaaaagtgaagatagtcacaagacttgacgaaaagattcactactagaaaaaaatgcaggtcttttatgatatggcaatataggaaatatgcagatataacccttgataacaactggtgtgatttcctaacaatgctcataaaatatgtaattgataataagtctcaatgtcaagtctgacatgcaatatctaatcaacgaacaaggaaaaaaataaaaaaaatctcgtttgtttacctgtaaaaagaacacccatgacagagccaaaccaaaccgtgtattctttgcccgagatccaaccgctgcgattttagtattattttttttataacagaaacaaaaattagtgcttcgcacaaagaaaaacgaaaaaaatctactacaaactttgtagcaaaaatttatatctatcccaagtctgaagagttaatgaaccaaaaattttcgcacagagatcttgccaaaaaccaatctttcaagaggccgtaacaatatgctaatttctagtggcgatatgaaattactgtaaaagaacaaatcaggtacgttttgcttttactatgtgagccattataactgctttcttatttttactgtgcacgcctctatatagtggctagggactaaaaaggttctcccacaatttcaaaggctaaatagaaaaagtataaaacgggtggcaacaacatgattgcatttataatgtcatcatattgccataatggcttgcaattctgtcttcaatagctcataagtcataacactaccttttgtgaagggtaaaatcagatgcctctgcagaccaccttccagtttctttgctggtggaaatggacctttacctctaggttggacctagcaaacaaaaaccaaattccataaccacaaaattatgaagacaaggacgcaaattactagtaaaataagcctacatgcgcttcaggatgcattcctagtgcaagcaatgagcccaaagcctctgcaaatgcatcacggaccgatgattctgaatcttcaataccctacgttaacagaggtatgtatatattcagagatagacatcagcccaccaagaaattgaaagaagagcgatttaaaaacatacaggtttcactaacttaccttgacacagtaagaggctaaagtatcaaattcgctagtaccaagaccaggtcctccaatgttagaaaaggccttcaaacaacgagcagcagcaattctcacaacgaatgatttatccaaagtggaaaatctagtgatgagacggtatgcttctgagtatgcagtggcagcagctgtaccaccgcagccttccaaagcattgtgaagcaagataaaggcttcttgtcgcacaaaatcctgaaaacaagggaaatgacgcagaattaaatcagtattacaggtcagttcttcacagaattctagaaaattatgactgggtggaattaaattaaccactgaaacagcagattcagagactaggaaaagtaaattggtttataccaaactatatcaaccatagatattaggacacagtaacaatggttgcagagcttcaatgccccatacctatttgatattttcacagtgtatagttctttctaaatagcccaacagggcaaatgataaaaagacatgatctactgaggtcgattaaaccaatcaaatttactgttccacatgacagaaagaacttaaatgtaacgtgaactgtgatacctcgttaaacttcactaattttgttacaatagatgttgtttcgaacaagccagaagtaatttttttcccaaaatgacgatacagctcccccaagcattgggcagcacctaaaaaaagaattgcatctattaacttaggagcacaaataaacatagaaaaacttccacatggttgaacattatgaaatgtatagatgcttgatatgctcgatagaatgcataccaaacagcaaaacaaaactacagcctacctgcaactcgttgaggatcactccgctttccatccgaaagaaacccttgtaaactgctagctctagagtatatcgaaatactatcaccatttgatataattttagccatagccactgacgcaagatgacgcactggtcttcgagcaccaagagtaaccaaagaatacaaggcatcttcgcattttctttgcgttactaacaaagactcctgatagacatgatcgttgagaaatccaagtatcacaaaaatgtcaaaaatatacaaaatttacagcagaaaggtacttgaatgtaatgttcctagttagaatttcatcttcacagttttctaatgaaaattgcataacgaatacggacaatctagaacaaattcgtgaagcgatgctaaattaataacagagcaatggcctgtgaaagtaagaagtctactagttgatcaatgtttatgaataacaaagattcatcatcgttgttccagagatagttcttcgaattttcagatacaaaaatgacgacattgacgattatatcgagattttaaagcgaaacggataaataataagaaggatcaacaaaggaaagaggaccttgggctcttcatcgatggcggaaataagatcagaaaggatctcgaaacagaggagagggtcagggtttttctgtgaagcagaagcaacaatcgactcaagctgggcgacgagaacgccgaatcgcgacagaggaacgttgtcgcttgcaatattcttcgtcattagcagtggagaaacatagaacgaagcaagcccagagttgaggaggaaaatgaaagactagtgtgagagaaagaaagagtcggaaaattttgatttcagtcagatctattgggggggtcggaggaaaaaagccggattttgtttccgggtcgggtaaaaactaaaaaactatggtaaatcaaaaattgtttagctgtttattttgtagctcttttttatcggcccaatatgttttaaagcccaaataggcaaatattcggtacataagaaggctcgaaagaaggcccactaattgcaaacattacaatgaattgcaaaagatgttacaatttttgtgtttagctgttattagtgttaagtctaatggagttaacatatttttaatttatccataaaatatttattgaaataaaaaatgatattaaaaaaaattaaccacaaagcttgtttttttctacgcagaaaacataatatttttgtttttaatgtgatgttgaccacatgtcattatatataattgatacatgtgagcttgcaatgcatttaaatttaactaatgtagttggttggctagctacaaataatttaaggattagtttgaaggattttaaatttggataaatttaagtgaattttaggaagattatgaattttaaagttttttcaataataataacctaagaataatataataaattatcattggctgacatttatttttgttaaatttttggatcattttggattgttccgttacgtgtgcttgccaatctaaccaaaacaatcgtcatacgtcaccatacttcattgtcccatcgtcacttccgtagatactaaagttccacaaataattcatttaagtaaagtaggaaaataaattgctctttttattgaaatcttaatcaaaagctattgactggctttaatctgcttaaagaacaaactatagagctttttgtatgaaactgcggatcattttttccggttaagatctctctagttatatgaagggttagttggttgatatatcatatttgctccacatagtgatagtctgacccgccgcattttgcactgcaaacggtatagagatgatatcaccttacatctcgggattcactagtttacttatagggagataaagacaaagatggtaggtgaaaactactcgagtgcataatacatgcacaagtcgatgaatctgaatatgatccggatttgtctaattaaacccaatatactaagccaacgtggtacaactctttctttaacgagaaggggatccaaactttcacttagttactagttcatgattattctagagagcataaacacctttctttatcttcgctcgcaaaacctcctttagttttcactcatacgtacttccgacctatttcggtcacatccaaagaccacttctaggtcacgccttcgtctacttaacactttcatttttacttatttcaccttatatgcctcttaacttaacatatacatcgttgaccatccttcatcggcatggagtgactatacctcctcttctttatgttatccgacattttccattctactctctcatctactcacctaatagtctttcactttattatttttctatttctaacttaagagtttaagagccactctatatcgtgttttatttgttatatttacaggagaccttgccccccaataatcaattcaagataacaaatttactaaaaaacaatcatatatgataatccggataaacgtttgtagtaaacttatactattaaatagagtattacatcattttagattattggcgagtataatctcaacacgttaagttcttggtttgtatatggtagtacactttctcataaatctatatttttatgaataaacaagtgtggtttgactttgtatgcaaaattgcaaaccaattatgagtcgtgtctctaaggaaaaaacagtagaaaattatatatatatatatatatataggaagatcgagcatcatcttcaaaacaaaaccaagcttcttatcattaacgaatctactcttctcacaattccttgtttagttatttctcaactatggattcttcctctggtgcaccaggtgtgtatatatataggagttttggttatttgagattcatgtaattaactaatttaaccttgaaggaaattaacatatcttgtactcctcattcagttcgtgggtatccggcccagcaaggctacgccaaaacggtatagaaataatcagtcattaactgtaaagatcctgatttaaagaaaaatcattctaatttcttgattaattttcttcatcagattaggaccagcaatataaaagggacaaaagaacaagagggcgataaatcaaacacggaaggttcgaagaaaaaaaagataccaatcaccaaaacgtgagaaagtcgaaagatgaggatgcatgttttcttatgtggttattgtggattttccaaagtaccctttgtataatattgaataatttgaatctacgttggaagaatctttcttcctctaatcttttctggatcatatttttacttattttctgcaacttttgtaccaagtatttattgtaactttccatatgttctcctattttcttaatgctcttcctttctctatcttccattcccccaaaacttttataatattacaaattttctattaaaaaaaaaacaatttccacaaaaaagttcttactctttcatttttttttttcggatctagagagtccaatttaatttcttattgtcttgacgtgtagcactccatttgtacctttatctaaagatgaacatacggtatatttaattatcttattaatattaaagatcacaaaaattactttaggagattatggttgttgcctattggcatcgcggtaataaacaatactagtataatagtaacatgagcaattagcctctaaataacattagttaagttcactagctactttctttcttattttagttaatacgaagttgcctatgttgactaacttttaattattttagttaatacgaagttgcctatgtcgtctttgttaaggaagatggtttccagtacatatactataaaattttgtgatgatacaaaatttaatatttgttagtactatctatagcaaaattttgtacgtgatagtataaattacataagcggaaaattgtactattttttggcaacacctttcgtaactaaaatggttcaaaatttaaagcggatatacaaaatttacttgaaattaaaatgtataactaaacgagaaaaataagaaaaacaaattgcttattgctcacgaactccgttagtagacaacatacatcttcaccgattcagaacagtttgtggcaaatgctattgtcatcttttgttgatcgatcagacagtatataactgatcaaatgagtgcagtctaattcagattatatcggagagaggcttcttcgtttgttttgagcttctataatggatcacatatcttcaaagcaaaaccatttcaaacatgcaaataagtttgtgttttttttccaagaggcatctactagcatatatatagaaacattatatgctctaattagttatttcgttgtttgcttcgcagttcaatccgaactaaaaccaaaaatatcaatttggtcagtttggtttgttctggttttacctaatgctgagggctactggctaggtacacttcctcaaaaatttctattttatgaattaaaaagtatggactgtatggttgaccaaatcagaggcttctgtgagggaaaaaataatcacataattaatatctatatatatggtaacagcatcataaaacaaaaccaagtttcttatcattaacgaatctactcttctcacaattccttgtttagttatttctcaactatggattcttcccccgttcaaccaggaccaggtacgttcaagctaattggtacctgatgagttaagccaaaatagtttgtatattgcttttgattatttaagattcatgtaattaccttatatgaaattaatttatcttcttcgtcatttattcagttcatggacaggatgacaaacccaaaacggtatataacctatcacatacttatgaactgttaggatccagcaactatttgctggtttttagaaagatctgagaggaaagactaatcaatttcttgattattttccttcatcagattaacaccagcaatatcaaaggggcaaatattaagaccagcaatatcaaagggacacaagacaaaggcaccaaataaatcaagcacggaactcgaaagatgatgcatgttttcttgtctaattattgtggattgaatcatttggattgggttaccaaaaaaaagagagaataatttgaattgacgttggaggaatctttcttcctcttatcgttttcttcatatttctactttttatcattttatgtaacttttgtaccagtatctattcaaatgccattgaaataaaaatatggtttcgtattccaatgttgttttactcacatatatattaagaagactttttgcccaaaaaaaaatatattaagaagacttttgttttattctaatttttttttaacatatgtagctataaagaaaaactacaaaaacttgggaaactatataaacttataggattgaatgaattttcatttattcgatgagaatcatagtatattttctttctgtttattttattaatcataatttatttaaaatagtttgacatgaagtaaacttatgagattactattaattattaaagttttttaaaattaatttagtgaaacgattgacaacgcaccctcttatgcaagtataatatataatagataaaaaaatataaaattataaatagcgcactctcttgtgtaatttttatttttctaatcccaaattgccattttttaattcgaaattctctctttgttatcagatccacatccttctccaatttgtaatttttttaaaaaaaagacttaaaaatcctacttccatagctcatttacatccgtatcacagtaagcttgtgtttccttaattttgtgtcttaaatctcataagcataaagacgaacttttacaacaatttcttttttttcttcggtatctctttgatttttttttaactattattgatgttgaaaatataaagctcataagcaattggagatgggatctcaagacccttgtatatacagagtgccaagccagttgcgtgaagtgaatccagaagcttatagacctcggatgcttctcatcggccctcttactcattccaagaaacctaaagttcatacggattcaaggtacgcagacatagcctggacgacctttgtagcctataatcaatttttttttttttgcatataatcatcttcttaacatttatttcatacaacgtatttttttttaatcgtaagaaagaaaaaaagaagaagaggacttttgttaagtttttggctgagttttaccctctttgttttgttagcaaaaaaaaaagtaaaaattctgcaatataccactttcagtttgctattgttcatatatttcgtacaaatttgtataatctatatatatgtaagtattcatctctattgttttgtggtacttttgagaatatctcaaaacataacaacgaaagtaacattaaatccggtaatgtcaggattttaattttgttccgagagctttttacgaactacattttacaatcaaattaacatttaaaccaaacaaaaacaatttgcagttatataaaacagaaaacgtaaacagattaatgagtctcttcaagaaaaagtttagtaaaatcttgattaaagtagaatccaataacatcaaaatttaacagagcttaataacatattgattgaataacaacaaattcttcataacattagaacactctgtaaatcacaaaccaataacaccactttagtctctttagctcctacttcatatcttttgtttaatgattaattacttacacaatatagatattaatgtttagatgctttattaggtatctagaatataagatgatggaggaccaaaaggtgttgtacaaagacgctttcaccaaaaggctagatactgatattgctattcttgaggatatgaagaccaccataaaagacgaagaagtaaatattcgagcaagctatgcggtatcgactgcatggatattatccgatatattcgtggagcttatacttaacgattcaatttttatcgtggagttcattctcagaatgtatgaaagtcatgaaaaaattggtgacatgattgtggacaaacctttttacacttccacggttcttgatgaccttaccttgctcgagaatcagcttccttacttctgtttaagtaagttgttaaaccccattacaaagagattttgtggagatcagtcgctggaccaagtcatcctccagttattttcagtcaatgatagtggcatgatcaatgagaatacaaagttcaatcacttcacagatttattccggtgtgtttacaaggaatcacttggccagaatctagagttgaacaactcgaaaagccagatcgtggatatgaagagcgcgaatatgctatacagtgtaggagtggacttcaaggtagtgaagcgtgagtattcactgaatgtatcattcgaggaaggttgcttaatattgccgagttttcctgccgatgaatcttctaatatcatccttagaaatgtcatcgcatatgagcaatgccatgatcctgaaaatgcctttactacaaattacataaatttcatgaatttccttattacctccgatgaagacgtggctatactcacttcagcaggtacaaacattataacacattatctctctttcttttttggctaagttatagtatatgattgatgaatatatccacaggagtgctaacaaacggtgtggggcggtcaagcatggtactgaagatggtgaataacttagctataggagtgttgctatcgaatcagagccaatatcacgacattgttgagaaactcaacattcaccatagttctcgtaggaaaaggatatgggcgaaactaagaaaagtctacttcagcgacttatggacgacaacagctacgttagctgccatatctcttttgctactgactctagctgggacagtggcttccatttttcaagctatcaagagctaatgcagttgcatgcttcgatctcctaaagattgtattcaactcttgttattggaatattggattttccaaaattatatttatttctcacatataattacgcgaaacattttgttttccaacaaatagttcacaaatttaagaaatacaaacagcttgaccgaaaaaacgtaaagcaaaatagtacaatatggatcctgatcttttgacttgctcacttctttccaatcatgttctttcctttggttgttttctctcgctgcgttgttgttccatctacgttattaactattgtcgttttctctctcgtcactggttttgtcccttttaaattgcttttctgaagctgatgaaggaaaaataaacaagaaattagacaagacacttccaaaaaaaacccagcatcgagtcactagatcataaaacgtttatttatctaagtatatgattatatacccctttcaacgcggtccgacctgcatagataaacaagacatgttagtttcatacaaggtagtacttagttaatcatatataagttatttcagctatcttaattattcatcatgtacaaattagcccgaacgtacgtaccttcttcgcctgcagaattactggatgaagaatccatagatggaaacaactaaacaagagatcagagatatccgtgaatacgaagcttgttttttttattttatttttattttttaatgttcttaatttcaaatatatagagagaaaaattattattcttgttctcttagggacgacgccttgtaattggtctgctcacaaagcaaccgcacttgtgttttttgattcattgaatataatttatgagtgactaactaaatatttagtaaagaaagtgggaaaataatagtcaacaaattgaagcgttaaccttgccataaaatcgtcttttcattcaaaaagtgagggattaaattacataagaaaattacaaaacttttatttcataggccagaagtctagaaggtacgtaggccaatattctagtttgttcatcataggctcatcgcgataaactccatatgattaactgcaacactatttgttatgaatttccaaataatgtattttaattttgagctaggtttcatatgaaatcagaataacaaaatagtagtacgaagtacgaaaaagcaattttaaaaaacagctaaaaacataacaaaatagcagtaagaaaaagtggaaccaaaaagctgaaagtatcaaagccgtgttgctaatcaaacccaaaaacaaataatccacccttaccaaaaagacaaaacttgatagtattaattcacaaccatttatcaccaaaagtggggaaaaaccaacgagcatccttgaaaagttttgtcgaggaagtagttagatgttcaaactcttggaccacataatcgcttccgatttggtaaacgcaaatacggtcagcgttataaccatcgcgtagactaatcccacaacatctatgatactgatcattactaaaatatatgcaatctctcataactccatctttggccggaaccgtaattcctaaatccaaaagcaatgcctcgtcccctatagacttgattagtactgtaaattctgatgattttggatccatcttattgacagtgaagacgcatttagcctctggagaactatccattttaccacctacaatgatcaaaacttctccagacaaagtcacagcaagattgctgaaatacttcatatgaaatctatttacacacacagacgatccgaaacttgcacattccatttctactggagaaacaccaccggagaaatcaaaaacagtgagacattgatgtgcactaatcatgtaaagcttgctttctttaaacaccatatcaacacagccttgatgctttattggttgaagaactttccagctattgttgtcatctcctctcttgtgatgatatgctacataactagaaagattacaaaacacaaagtaatctctgcttttgtcatctacccacagaaccgctttgtctatttctatatggctaccgctaatgggtctcttgaatcgcatataccgttctccatcgattgattcgagagacggaagaagaatcctctctcgagtaaaaagattcaaaagatgaaaatcagctctatggtcgaacataaggaaccaactaccggaactcgctaaacaacgactcgtagacatatcaaaccctaaatctctgattatgtaggttttgttttcatgaggatcaaacaacttacatgaaccgttgttttcgacatttttgtttggaaaaagaatgatccatggagttgttggatttgttactccgatgactgatttcgaagcaacataccatgttgaagaaacgcatctcgctcgatgaaaatcaacgaagctcaagcgctccaagattaatctaactaggtccacgatataggccgcttcgaatcgtccttccatattttttccgtcggaatcgctcatctccttcttttgtgctatttcacgattttcaatcttagggtttgtgctcagagacgtgggggagaagatgagtcaataaagttaatgaggctattgggccattatgtaaaataggcccatatattaatgggtttcgttggattagaaatcttaacttgtaggaaaaaaaaaattcacgccggcaaaagaaaagaaaaaaaaaaccttcgccgtcgtttgcttagtcttcttcgctctatcccaacactcgatcaaataatcccagtgagcttcttccattccaaggtacgaatcgataaagtcatcaaacctataccttttcaggatttaatggtaattagtcaggatctaaatcgtttcttcgaatttgatttcggtgatctagaaccctaatttggtcgggaattttcaaatcaattgatttccctgccctaatttaatttgatgattgttctgtttgcctatgaataagtttgatttcaatggcaaacaaaaaaaagagagacattgatttgaatatttttacttaggtgcattgattctgcagattgtgttaatgtgtgtcactcttaatcttctgtcttatgtttttctcagttgataaggaatttgaagaagcctttgtttaatggaaagcaaaggaagaatccatccatctcatcatcatatgaggcgtcctcttccaggtcccggtggctgtatagcgcatccggagactttcggtaatcacggtgctataccaccttctgctgctcaaggtgtgtatccttccttcaacatgttacctccacctgaagttatggagcaaaagtttgtggcacaacacggggaattacagagacttgctatagagaatcagagacttggtggaactcatggtagtttaagacaagagttagcagcagcacagcatgaaatacagatgttgcacgcgcaaattgggtcgatgaagtccgagagagagcaacggatgatgggtcttgctgagaaagttgctaaaatggagactgagcttcagaaatctgaggctgttaagttggagatgcaacaagcacgtgctgaggcacggagtcttgttgtggctagggaggagcttatgtctaaagtgcatcagttgactcaggaacttcaaaaatctcgttctgatgtgcagcaaatacctgctctgatgtctgaacttgagaatctaagacaggagtaccagcagtgcaggtaatggttgtagaatggaagtttctgatatcactggctcccgacactcttcttatagttattgagtttgtcagcttttgtatcatcctcttatgaaggttgggatgaatttgattttatctgattctggcagggcaacatatgactatgagaagaagttttataatgaccatctcgagtcacttcaggcaatggagaagaactacatgactatggctagggaagttgaaaaacttcaagcacagttgatgaacaatgcaaattcagatagaagagcaggtatattgaattatttagttagtttctgctctatttagcttcattgttccacgaacttttttcagtaatttaagagttgtatctgtcaatcaaatgaaggtggcccttatggtaacaacataaatgctgaaattgacgcttctggacatcagagtggaaacggttattatgaagatgcttttggtcctcaggttcgtgagtttctctttgctagctcgtctttttgagacccattatagttttccacattagttgatttagatgtgcttgagctatatacgttttgttacttttgcagggatatattcctcaaccagtagctggtaacgcaactggaccaaattcagttgttggcgcagctcaatacccttatcaaggagtaactcagccaggatacttccctcaaagacccggttacaactttccaagaggccctcctggttcatatgacccaacaacaaggttaccaacaggaccttacggcgctccattcccacctggaccatctaacaatactccttacgccggtacacacggaaaccctagtcgcagatgagtccaccagctaagagtacatatataaataactcaccagctacagattccttcaactgtggaattgttgcctgtttggtcccataatctttatgggtaaagagaagttggtacagtggtgaacgttgagtgctattgtttaactgattttgttgagagcttgacttttgtgagacggttttcaacaagttttgtgatacagagagatgtaacatcgggaaagaaaaaacaaagaaagagaaatttgttgtttgcccttcaccattttgtctctatgactctatgtttcactcagttaaaaagtttacaaatgaatcgaaagttaaatttatctttgtaatactgtagtttctagttttagtttacttttgaagggcccattttattttttattttattttgtgagaagggcccatttcatatatatatatatattatttattttatttttggacagaatacgagttgttttaaaaaaaaaatatttttgaaacaccgtccgataaaattattgaaattttttgatatttttaaattcccgccagactcccatctaaatttcgcttctcctttagccatttgcttccattgtcacggacctgagaaagaaggggaagagagattgaagcaaacaaagagataatcgcagcaactttgtaccaattagaccaggtaattcttctccaataaagaaattgcaatttctaaggtttcattgttcgatttctgtaaaaaggtttttgatttctcaattcaattgctgaaatttggttcagttacctcgattttaagtttagggtttaccgattctggcccatttgatacgaaagatgtaagcttttcccaatattgaatccccttggctatataggggtttaatcgcacaatttgatttagaagaaattgttgcaatccccaatttacgtttttcatttgggtctgatatttgtaggtatggaaaatgtggttgcaactgtgagtggttatcatggatccgataggtttaagctcatcaagcttatttctcattctggagcaagttatgttggggcaatgtcaagatctattacacatttggtttgtgtagattgttctgttctgtttatgtgattcattaccactgtggagaaatgaagacatacccttttgtttaattggttatgtgtgtaggtgtgttggaaatttgagggcaaaaagtacgatcttgcaaagaagtttggtacagtagtagtgaatcatcgatgggtggaagaatgtgtaaaggaagggagaagagtttccgagacgccttatatgtttgataggtatgcttattggtttccggtccttatagcttctatgttcctcaaagatgattgataaagccttaatttttcagtggagaagaggttggacctttgatgattgaactacctgcagtttctgaggaagctaaagtcactaagaaagtgaataaggcttctgaaacttttgataaatactttagtaatggtggagaaaaccggagtggctccacttctgagcttgccacttggatggaggtaatcctcgttctcttattacctatttgcttagatagtagatacaagccgcatctaggtttctacagctattagtttagtttttattgaatttcagtaatagaacaaatgttttgtgttgtatacttctatatccaaaagatcagaagagaattatctttttgcatagtatatctagtatcatttgaaagaccgatgtgctgatagcatatcctcatcagatttcatagctaccaagattagctttgcgtagccactgtggaaagtaacatgttaattagtgtgaatgtaattgcttacttgcatgactgttatgtgtatggtatacttagtttgttttcttcatgtctctgggcttctttgttgctcttcagaaaaatgtagaagcaaacagacactcagtgcgattaagaacaaagaggccgagtagtattcttgaaaacaaggaaaacagtggtgtggcagaatcttcacggaaaggaaaaaagcgggtagtaaagcaacgctcttacagaaaccttatcgaccttgaatctgatgaggaatctgataataaccatcatgacaactctgatgagaaccaaaatgagactcaggatcatagagagcctgctgatgaaaatgtgaggggttttgttttcgaacaaggagaaacatcagctcttcgacatcctggagacttggcaacaccaaactgggatgtagatgaaatagaggagtctgagaattggagtcattcagctgtttttaaacgccctagatcatttagtccagagataaaaccacaagatgatgatgagtcaacaagagaagagacagaagcaactgagaaggctcctgcacaagtttcttgtatcatatgctggaccgagttcagttccagtagaggcattctcccttgcggccacaggttttgttattcatgcatccaaaaatgggcagaccgtttggtgagtttatcttccttgcttttcaaactaattctcataaaatccatattggtaaatgatgcaacttccttattatatctgcaggtttcagaaagaaagaaaacaacatgtccactgtgcaagtccaatttcatcacaatcacaaagatagaagacgctgattcttccgatcaaaagatatactcacaaacagtccctgacttatcttcaacaaataacattcttgtagtactccctgaagaagaagaacaaagacaaactctcaatccactggtaagccgagagtattgagctactacgcgatcttgttcttgatagcaacaacattctattgtgttttgtttttttctcctgcagactcgagcttcaggttgcagcagatgctacttgactgagccagaggagcttctgataagatgtcacctctgcaatttccggcgaatccactcctattgtttagacccttatctgcttccttggacctgtaaccattgcaatgatcttcagatgatgtaccaccgtcgcaactactaaatatatacgtatgacaataatgttttgatatttgaaatgatggacaaaatatcctcccattgtttatggagaaaaatttatttataattgatttaaatgaagttcttggttaaaaattaatataacattaaattatacagatcgaaccatatcaaattaaaactaaaaaagttgggtgtcaaattcaataaaaatttccaaattccaactgtctaaccaaaagtcacttttaagttttaattaaaccacaaaagcaaattgcctagaaaaataaattaagcaaaaagctctctttcagtaaagatgccgtttatttttcatatcccgccatgaccccaccacccaatataatattcattatttattttcttttgattttagttataaaaaaaaaaaaaactcaagtcgtcgtctctctcattttcttctcctctaaaataaccagatcgcctcctccaatcatcttcttcttcctcctcgcagatccaccgtcgtcaactattttattcatcccggagaactaaaatcggtatacagatcttctatctcgcttcattgatcgttttcttccttcaatttctaatcatctctgttaatatccattggtttgattcatatctttcgctgcaaaattcctcaatattcaacacatttacgccattttatccttacgatttcgtctctcctgactttaaacttcgatatggtttctgattctgctgatttgttcgatgttggcattatcttgcttctggtgatttgagatgtaatgtttagatctatgttttgtttaatgtagtttggatcaaaatactattgaatcatctcttggaattgtgttagactttgatgtttaatctatatatcagtgtaggtttcgaattatggactatcttcctgtggaagttattggaaacatactctcacgtctcggaggagctcgtgatgttgtgatagcttcagcaacatgtagaaaatggcgagaagcttgtaggaaacatcttcaaacactttctttcaattccgctgattggccgttttatcgagaccttacaacgaatcgtttagagattcttataactcaaaccattttccaaaccatggggctgcaaggtctttctattatgatggatgatgcgaataagttttcggctgccacagttatcgcttggcttatgtatacgagagacactttgcggagattgtcttataatgtcaggacgactcctaatgttaacattcttgaaatctgtgggaggcagaagcttgaagctttggttttggctcataattctattactggtgttgaaccaagttttcagaggtttccttgtttgaagtctctgtcactgagttatgttagtatttcagctttggatttgaatcttttgcttagtgcttgtccgatgatcgagagtttggaacttgtgagtctcgagattgcaatgtcggatgcgcaagtgacaattgagttgagtagcccgacgctgaagagtgtttatttcgatgggattagtttggataagtttatcttggaggctgatagtattgagttcttgcatatgaaagactgtgttctcgagctttttgagctaataggaaacgggactttgaagcattttaagcttgatgatgttagtgttatacatcttgatatcatggagacatctgaaagccttgaagtagttgatgtcaatcacttcacaatggtttggccaaagttctatcagatgatctcaaggtcacagaaactaaagaaacttcgtctttgggatgtggtttttgatgatgacgatgaaatcatcgatgttgagtccattgccgctggtttctctcacctgactcatctttcgttaagctatgaccttaaagatggagctgctcattacagtttgcaagggactactcagttggagaacgtgactgtattggagctcggatggactgtgatcaacgatgttttctcaatctgggtcgaggagttgctgagaagatgtccgaatctgaagaagctgatcatttatggggttgtctcagaaaccaaaacacaaggagattgtcaaattctggcgacattcacatggtccattgttcaactcatgaggaaatatatacatgttgaggtacaatttgagtatgagtaaacgattcttcttctccatgttgttgaaaacaagtttgaagattgtgtaaagatatgaattttgtgttattcaaaatttagcaattcttttaagaatacaaaaggattttgtgagacttcatatacgtttttagctaaaaagattgacaaataactcacacctattagacatggaatttggagagattgtaaagaacaaaaactctccttaacataaaaaaatgttcatgtcttcacgtagacgatccttttaaatccatctataacttttgaaattcactaaaaccacatcaaataagaaatctttgctaacggacctttagcagtttattaaattcaaacctacttatttttctttttcttcatcgaaacattataaaaaaaatttgatgtaaatattttactttttgttgagtaacaatttcacattttaacaacaaaaaaaaaatataccttttagtcaaacacacttaatttattatatatggaagatttcttcgactagtttgtcaagaagatatatctaaagcgtttaatccttttttctttctgataattttaatcaaaaacgacaattacataatgagacgtatataaagttttttttcatttttggtcaccaaattttaaaaagattaaccttttcattaatattttgttttgttattcaaaagtaaaaatagtcatcactccaaaaattatgtcagactaaattgcatgataaatatattttagttcaaataattagatggtaccaaactaaaataaaatatgactcaaataagcttagactgaggagaccgactcaattgacatatctgtatccctccctctcacaaaacttgtgggttatacgaccaaacatatcatgtgaacaatatttagctagatcatatctttgagtgttcattttcatgtgccttgaagtttcttatttcttcttaagtcctattatatatatagatttgttgtcttcttcaccaattgtggagattgcattggttctgttagatgcatctaaggtggagtaaatggtaaggttttttgtcctcacactgtgtttgtttttgtcattaataaaagctaattgtcctcacactgttggaccttagtgttgtgtagtattattctccattttcttgtccttttatatagtcggggacctatctccatgccttcttccattcctagagcttcttgaatactattaaatacatagttttgtttctataatttgggaacttctataaagaagatgggtatgaattgatagtttaaattatatgaatctgaaatttgtatttgtaagtcatgatatgcaactatttggtacgtaacacaatttttttgtaatataaattggtaattactattgaaattgagcttgtaaaacgattgatggtttaaaacacatactatttgaaccccattcaagaaattggtattgatggtatcatcactatatatatatatatatatatatatgttgaattcatatttttaattacaacgttaataattaaaaagagagaggatttggtatgtaaaatttggtttgtagtaatgtataggcatgggcatgcatgtctcttcacctacttaagaaacctctattatgtctcaacctcttttttaggttctgtagagtcaattacataacgacaccacttatgtcaaattgtttcaggttgcatcaaccttttttcacaaaacgaaaacgaacttcgtaattgttaactttatttctcttcaatttcagccacaaattatacattagatcaaacatcattatttatttttaatagaatgcatttctaagaacttaatcttctatctttatttccatttgtagagtaatagattcaagaagtgtactaaaaaaaggagtcaagaagtgtattcctccgttttcgtgtttcttcaatgctgaacttttgttgatgttttatcgatctatcacatgtattagtaaaactggagcaagattatagatcaactagagatgacccttaataaaattatatataaaatacttgcattttatatgtcaatttaattcatctattttgacaattcttttgaaattaattttgttaggttgagatacagcagatgtactgacaatatatataaaacaaaacctcgattattttttttttcgtcggcaagaatctgtttctagattgtgatatattaccatatataaataggaggaattgtgacatcaaaatttcaaagtgttagttgaacaacacatcataaatatgtttaatctagtggtttaaattaaataaggatttttttccctccaagtcatggtgttgtgttctaagacatgatgcttacgctgaaaagaaacttatctataacaactttcatttatgtgatcgtttattcgtcaaggaaattaaattttatttcttactattagaagacatagagaatgttaatgaaccaaataataaaagacaatgtaaattttattattctgaaagtattttaaaaatgtgtattttttgttttatggttctgaaaggtcaatatgaccccactttagttgttgtttctctacaaaattctgatttgaaatctcattgttatctcccaaataaaatgagaaaggcaacttggcggaaattttcttccaacaataaaaatagtttctattttctttttttccaaaataacaatatttctgtttttctgtaatatggtcaaggatatgaaggtattcaattttaatactttttggggatactttaattcccttaatgtatatgattattttttttcaatgaaaaataattccaaactcttgaattccgtgattttagaaagaagaaattggtaaaagtaaaaaccagacaaacttttcttttatagctgcaactataagcagaataatattgttgcattcacctaattatcatttagccaacataatagccatcacacatacaaaacacacgtacaatgcttttgatagatatgtataacagacgcgtacacgtaaatccatatgtatgtgtatgtatgaatatgttttggatgttaaaaagatgaaatcagaaagcataagttcttgaagtgggagagtcagcaatttgaagggtttcttggataattttgtgagcctttttgcttctcaactcaaatctcatactctcactcttctctatcttctcatacgatgatgatgatgatgatgacgatgatgatgaagatgaatatgatgatgatgataatgatgatctcttccgcatccttagaccagtctttatcttcgacttcaagccttccacaatctttcctagtctcatcctcaccaccatctaatatatgtagaagaactgaagaagaagaaaactaattagatcccactttggagtcggagataaacattatctcaacaacttaattcaagaatacagtatatcccaacaaaaaagttaagagacaaatcattttttttacatgtaaatagttaatctgtaagagaaaaagattgaagtattgaactaatatatatacatgtaataaagtggcaaaagagggcagatagagttgaagaaatattgaaccttaaaagtgtggtttgtagatatgagagaagatgaaaatggaggataatatatatatgtagatcatatatatatattgtgtgtgtgtggcggaggctgatgtcaaaggttgtgtgacttgtgaagctatgtgagtctcgtgaccttattttttcaaactttagccaatgtttattattttctaaaatagctagtaccattgttttgttagtcaaagattcagatttttaagtcatcaccaaatcatggttcttggggaatttgtttcagatattatgtatctccacagtaaagatctgttgagtaatcatttgaatattaaagatgaataccaaatagagaaatctaaataagatagaaaatcttgtgtggtacttgtcagttgtcacaaggattattttaagtagtttgttttgcttcctccacttgaaaattatattatttttgttattccatgactttgatagaacaagatgttatcaaaaacatatatttgttccggctgtgtttaaatatatttcaaagtatagggtgatcattgaaaacttgaacattctgtacatcacatacaattaaaaaggttcgaatagagccagaatatgtgtactgtgatatctagttaatcttaatgattataaacctttgaaaaatattttcttttttcttttgtcaacagctttaaaactttggaaaatcttactaactaaataaatatgaaaggaccacgtaacttagaacatctaactttttcttcttttaaaagacatagaagattagctaatttaatatcggaataattatgtttttcatatttagtattaaaataatacttttaattagtttgttaattttcttaattttatttatttaaacatataagtaaatctaaaagaagtcatcgaagaaaattataagtaaaattattttttaatttaataataaaatatttgttatgatcccgacaactgcctagtagttttgtgaggacataaaggagaacagtgtggacaggaaatgaaaaagaaaaaaaaaaagaaatatagaagttgaaaattgtacgtgatcttgaaaatatctcttacgacgcaacttatgacttatgattccatattcttaagattattttaactagttagaagcatgaaacatgtgtagttgtgtacatcaatatgcaaacagctatctcatacgttttttcttttggttacagatagccgtaaaaaagaaatatatatccatcaagttggtaaaaattggtgagttttctaattcttgattcgatcgtaatttgtgagttttctaattcgtgattcgatagtaatttgctttaaacaaaaactacggattggttgaaacaaaatcactccattttaactagtatttagtctgttgccgagagactttatgatttcgtaggctttgaactaaaagaagcagagagtcataagatgaatttgttggaggtaagtcctcggtcataaaccaagcacaagagggaacaaaatcaatattcaagttcttaatgaaattagggttaaagcttacaaaatcttagaattgtatatgtatttgttgtttaagacaggtttcattttttgttattaatatgcataattactagaaccaaaactctttttaatccagagaaaagcaaatgttcttgcaaactttctcgtaaaactgcttttcagtcttatgactcctattgatgctaccattgtttaagcttttggtcttttaaataaatacggttggtcaatctatatatttatcaaccatcgaagggtctacaaatcaacaagtcatctctgtaaatggattggctaaacctttgactactttgcaatttgcattcgattatatggttagatattccatgttatgaaactttaatttacattggtcaaataattatttgattttgggccttataattgttgcagtggtccttaatactattcatttactataattaagactagcaactgactttattttaattctgattttgttaccaagttaagcacaccatctccaaagttccaaaaaggtaaggaatttattattaagaaactaatataagcatttgattgatgcttcatgcgatcgtattctaatcatgattctaaattgtaattgattttattattgtacataattagatacgatataataattaatgtgtaaactcacttatgttaattttgaaaaattatggagtgtgtgtgttatatgtgtctataaaatttgttttcgtgttattttagggtatttcttttaaattattgaccaaaatcacttggctttgtctcaattgtgatcatgtatattagatgtgcaaaataacccttacttaaataattaactctatctctcgtggtctcatctaaatgaaccgcaaggatgctcgccgcgacatcaagtttatatcacttttcgtggagaacagctacgccacaacttcgttagccatctcgtggaagcccttaggcgaaatgcgatcaatgtgtttatagacaatgatcaagagcttagaggtgaagatatcagcattcttttgaagaggatcgagtattcttgaatctccattgttgtgttctcgagcaggtacacagaatcgaggtggtgcttgagagaggctgtgaagatcaaagactgatgtaattttaccttacttgcctttcttgcctgttggcacaatccattagtcaagtttgatagtgaaagcaatgccaatgatcatcgtcatgttacttaagtcatctcgtatcgttcgattcaaattagttgtcgtttaagtttttgaagcatatactaaaaaaacatttaagttttcagttgtcaattaataataataaaaaaaaaaggaaaatgatgatgggtgagttttataatagttacggtgaacttggtcacattggataatttgtcattgttcttgggcggaccaataaaagcctctcttttgaatcccccacacagatctatcgcctcttcttccctcgtgtctgccagaatttttgtttcccgttgataaaggttaaacctttcttcttcttcttcttgtttcgatttcaagttcttctctttcgtgacctacggtgccgtttcatattccctaatttgattgaaaagggttgcgcaagggctttgaagtgaaacacttttgattcttgttgttgcttcaagttttcatttttatcaattgggttttggagaaaacactatgagctgtgattgaattgtctagctcgaagaatcttgattttgtttacacagagaattggtttcttctttcttgatgatagtacaattggattctgaatgttgtgtagagtttttggaattgctcattggtgtatgcttttgttatgcagggtttatctttggtggatgattagtgaaactttttaaggagataatagttcacatgttttagttaaaaatggcagcttcaagcggctctggtttggaaggttagaaacatgacctcaatccttttgttgttatgtattctttgtgtatactgactttaggaagttatatcgagtttccatttctttatttccgtttcttagagtgttttgcttttacgtttaactttaaataagaatgaggtcttgtttctgagactcatcaatttagagagctttatagggtagctttgagctttgtttattggctttgctgaggtattttgtttgtatgtattgttttgatttgaataaagaagagcttttgggatttattctgttttttgctcttgactatatcagctgaggagggggaaataagtatagacatggaggaagacatggatctaacagaagatgatttcagaaatgtgtctggccagttttcaggacaagcatcgatcgtggaggttggggatgctgttgatgtgagagtcgaaaccgtgaaagtagatgttagttgtatccttattcttcttcttattgttggagcttgctaatgcttgtgttacttaaacacctctgcttcgagtatagtttctacaatcatttgctccaagacttgaatgcttgtgattatgttctctttctttcttttccataattccatgtgtcagctaaatctggtgttaaaagagccagaacaatctctctggaacagcaaccttcagtccatgttacttataaacacttaacaaggttcgatgaaacgaagactcttaactcgataacaagaagcttttaacatttgaatgctcaaaacattgctatcattatatgtgattcttggtgttctacttgttttgattcttattgtcctgcatctttcagagatagtaagcagaagctggaaagtttattacagcaatggtcagaatgggaggcagaacaaaattccttgtccgaggtatctatgatttgaactcttctgtagtgctttatatagccaatacaataaaccttgtggtttgcaaaagtgaatcaatttcaagttgtgattgaaagaacaattgtagacgaaatttcgcaattctgcaagaaatgataaggacacttgtttgctgactatttcatgttattaactaagctagaaacttttcgtttggaatatgatcaggatcaagaacaagtactagaagctggtgatgagacatactttcctgctttgcgtgtgggattgcagaagacatcatctgtagtgagtgaaactgttctttcaagcatatacaatcttgaaattttcaggtttttcgtaatcctttctgatagatacgttcttacttgtgcagtcattttggtttgactaccaaactggtcacagttcttcgaagaagtctgttccagtggaaagtagcactactcctctttataaccgtggatttacaattggtttagattcaggttcaaataacgtggaagggtaaacaaatctagatttgtagattctttttgttgcagtttctagttttgtctttcaatctgatttcgttttaccttgtgacagtgaatgtgttattgatactttattatctgccttgtgcattcttttgaatttttgttgtcttcattgttccagaggcttggagattattgatgatcctccacgttgcttcaactgtggcgcatacagtcattctattagagaatgtccaaggccttttgatcgatcagcagttagtaatgctcggaggcaacataaaagaaaaagaaatcagactcctggatcccgtctaccatccagatattatcagagccttcaacgtggaaaatatgatggcttgaagcctggctcacttgatgcagagacgcgtaagcttctcggtctaaaggtattttttcaaccttcctctgcagtattgaaaattagaccagagaaaatgctattcctgattaagcggtttttatcttgtgtaggaactcgatcctcctccatggcttaacagaatgcgagagattggatatccaccaggatattttggtaagctttcatactctctcttgttatcatatcaaaggcatctttgttcatgactacgttgtctcttcttttttgtttgtatcacttagctgtagaagaagacgatgatgatcactcgagaataactatatttggtgaggaagagactaaagaagaggaagaagttaagactgaagaaggtgaaatcttggaaaaagctagccctcaagagccaagaaagataatgacagttggatttcccggtattaacgcacccattccagaaaacgcagattcgtggctatgggaacagaggaatagtaacacaggacatactaattatcataatcaccttcgaccacaatatgagatgggccctctaggtattcaactgtcttcaagctttcctccaatgcatggcattagatatgatcataggttcggtttatgaccaataagcccgggatccgaaagagttaagatccattttagttttagcagcagaagatagattcattagtgaatgtgggatgtatgataaccattagttaaagagttaaccacaagccaactacggttaaaacattcaggcctaagccaaagtagtctatgcttaaggcagaatcgaacttttacgtctttggtcgtaaaactggaatcgtgattatacacgtttggtgttgtaacatgtccatcaatgtacaagatttttgttttgtttttgtgtttgtctctctactaaaattagtacgtgaatctagttcgttccgacactcattaacgataacataatagttaaactcgtttaaagtataataatgctacactatcacacaagccaccgatcataatgagagaatttttttgtgtatttatatgaaaatcgaaaaagatttggtgtatttttttatgtagaattttcgctatcgagggttgtattaccggaacgttatatgtccagtaataataactacgttttggtaatatgttcctaattaatctgcaatcttgtctctccatgttttcatatccaccatttggtatggattatggaaatcgactactaataagtaacataattcaaacttcatttatgcttcgagctccatttatgcttcacaccataaattatcgaaacactttgtatccatctaataaacttaaaacagataatttggaaaagaataatttttttttttctagctaaatctattgatatcaaatcgagattacaaagttagtatacagaactttcgataacaaattataacataagcatatatttatttcgcatatatatcaacttataattggtgaattcagtcgaaattatttattacaattcttatctataaatttagttccataaaaaatttgagatttatttttttattacgaataacgaactatatatcttattaatacccgcgcaaattcgtgttataacggttttaccaaatcaaatattaaaattaatagaataaacagaaaaaatcacctaaatagaaaactctttttttatattaacattacaaaataaaaagccttgagtattattacattattacgaaaaaaatgctatatatctaagaacaatcctaaatctgaccattaaataaatctctcaaaccctaattaaggtaaacaacagagagcaacgaagtcagaggctttctctttcaactatctttcttttgtctgacgcatagaaggaaaaaggtttcacttttcttcttcgtcctgtctgcttcttctttactcgattagggttttgattttgggttcttcgtcgagcaattcgtgtaattgtctttaagatcaggtgttgaattgtagctgacgtagctaattagggtttcgtcatgcttcgtttgtcgagtatcatcacgaaattatggtttttcgcgatcgtgatgcaatcaattttggggatttcgttggaaaaatcaaaatttttaaatttttgaagaacttaaaaatttggattttggagatcgcagagtgttgaataagcttagattgtgaaagcgatcgattagttttaaggtggttctgttgatttttttgtgtaagaagactcttaatccaacatttagtgtatgacttgagcaacaagctaaaacaaaattgatttggtgtatgtgcaagtttcaaactttattgacaatttttaattccttcttcttcggtgtctttttcaagtttggtgatttttttttttctaatatctctctgttttgcattgtgcagggaacataatctgatggctccaccgcgtaaaaggacaagggacttgatgcctaagtttcttaacaccgaaagttttgatgagttcaatcagcggttgaacaatctacctgcagagtcaaatgttacgtctgatgaagatgcacagtttcttgaatcgagaaaatgtcagtcaaagcgatggagaaaggaagaaccattaaagttgaatcttcgtagtccttggaatgttttatgtagtcctgagtcgattagctctgctaagttcattgtggagaagacatgtttgattccagtaccaagttttgaggaggctgctactaatgctagaagatgtttaaatacatcttctataccgggaagtagcggttctgcttccgagacaaacagcggttctgatataacgaagcaagattttaagaacgattctccttcggatagtaagaaggttcagggttctagtactagcaaatctgcaaaaccgaaggtaatcaaggtttattctttcgtggatctggttactacgacaaagaaaggaaacattcaaaccgaggaaagttctttaaaccatgagaagaaacttggaactgttgtggatattgttgagccgatgaaatgtgatgaaaggagtaaggaggttcagggttctagtactagcaaatctgcaaaaccgaaggtaatcaaggtttattctttcgcggatgtggttactacgacaaagaaaggaaacattcaaaccgaggaaagttctttgaaccatgagaagaaacttggaactgttgtggatattattgagccgatgaaatgtgatgaaaggagtaaggaggttcagggttctagtactagcaaatctgcaaaactgaaggtaatcaaggtttattctttcgcggatgtggttactacgacaaagaaaggaaacattcaaaccgaggaaagttctttgaaccatgagaagaaacttggaactgttgtggatattgttgagccgatgaaatgtgatgaaaggagtaaggaggttcagggttctagtactagcaaatctgaaaaaccgaaggtaatcaaggtttattctttcgcggatgtggttactacgacaaagaaaggaaacattcaaaccgaggaaagttctttgaaccatgagaagaaacttggaactgttgtggatattgttgagccgatgaaatgtgatgaagggaccaagtgtgaggttactacgacaaacaaaggaaagattcacaccgaggaaaggtctttgaaccatgagaagaaacttggaactgttgtggatattgttgagccgatgaaatgtgatgaagggagcaagtgtgaggttactacgacaaacaaaggaaacactcaaaccgaggaaaggtctttgaaccatgagaagaaacttggtattggtgtggatattgttgagccgatgaaatgtgatgaagggaccaagtgtgaggttactacgacaaacaaaggaaagattcaaaccgaggaaaggtctttgaactatgagaagaaacttggaattggtgtggatattgttgagccgatgaaatgtgatgaagagaacaagtgtgaggttaatgctgacacatttgatgtggttattgttgagccaatgaaatgtaataaagtgaccaagtgtgaggttaatgttgacacaactggtgtgaatattgttgagccaatgaaatgtaatgaagtgaccaagtgtgaggttaatgttgacacaattggtgtggatattgttgagccgatgaaatgtaatgaagagagcaagtgtgaggttaatgctgacacaatgtctctgcaaaaacgtagcaagagagctgtctctttggtcgaacgtttcacagaagaagagataaagctgcatataatgagtctaaagaagccaagtacacagagcgcagtcgaaggaatgtgtgacctcaaggaggaggaggaatcatgtcaattgtgtgacgatggcacactcttgtttccaccacaaccactatactgcttattatgcagccgccgcatcgatgacagatctttctattatacccctggggaagaagaactaagcaatgcgcaacatcaaatctgcagtccttgtcacagtagatgtaaaaccaagttccctttatgtggagtctttatcgataaacacaaaatgcttaaaaggagtaactttgacaacgcagatacggaggaggtaaacttcatcactctctctatctctctctctttcttaatctctcatttcatgaatcttactaactacataagctacttttgttggagcagtgggttcaatgtgaatcttgtgaaaaatggcaacatcagatatgtggtctctacaataagcttaaagacgaagacaaaaccgcagagtatatttgtcctacatgtttattagaggagtgtcaaagtatcaacaacatggcactcgttgactatacggattctggagcaaaagatttgcctgaaactgtcctcagctactttctagagcaaaggctattcaagcgcctcaaggaagaaagataccaaacagcaaaggctactgggaagagcatcaatgatgtaagaatatgaagtggtttcgattcatttgagtttctgtttagagtttctgttttttatactgaacttgttactttttttctttccaggtacctgaaccagagggtcttactctcagagtcgtgttttcggctgacagaaccttaactgtcaacaaacaatttgccagtttacttcacaaagaaaactttcctagtgaattc

SEQ ID NO: 122 - DNA, 114738 bp, Arabidopsis thaliana
gaattcttcactgtttttctcaataaaagagtcgcttgaaccgggaaacatcctcaacaacctccgccaatttcccaaggagaaatggctggaaatgtggaaacgactgaagaacgtatctcatcactttgagttccagtacccgccaaagagagaagatgcagtaaacatgttgtggagacaagtgaaacacaagatcccttatgtcaagctcgctgtacatagaaaccggaggttgaaagtccctgattggtggctttgaagaatggcaacaaaaaattctcaaggttgaagtcttttctcattcttcttccctccaatactgtacattagttgattcttttgttacatttgcgtttcacgatccatttataggcatatatactcttaaacatcatttttttaataaccagaggtagtcacataaatttgtattccatctaaagtttcggtttatctgtttttacttctctttaaggataactgattcaggtactcctatagttcctattgttgtaaacttgtaatggaaacaagaggatcaagctgctcctatatcttcttgtgctccagcttccgttttgtaatggaattttgttatattaaaatgtcagattcttgatggtaggagtatgctaagaaataagagactccattgggttatcttggtcccctaaacaagaactttttttctgcattcagactccattgtgcttggactatatggttgaagtctactagttgaattgaaagaaggaatcgttgttgcacaaagagatgatgtgcaacaataggtacattgcatagatgatgaagtcagggtactactagtatgctattcatcaggaacttctacaccccgaaatatcagttcaagcgtcgttaaatctctgtcatctcttactataggcaaatggttccggaaaagtgaagcaaacttgtcaaccgaccgtaatctatttgaaccggagacagtagaaatggctaaaatgatcatattaccaaaactggtccaaaagagtgttgtagtacatttaagtgtcgagttataatgaagggcatatgcgtcattgcgttaactaattagacgaattgtgctataaataagtcgcagtcgccgaagcagacttcgcaagagagagtagtaacaagcacgttctctccgccaaaaccagccggagaaaatatctcagttcaacggagatgcgagttgtcagaatatcatgcgtcgggacacgtcatctctcacctccctcctccgttcgcggttgcgaagcccactccgacgacgtctctgcttcctcagccggtacgttccctctctttcgccgtgttactctgtttcgacatagtaattaatagttaataacacctaatcaatcggaaccgtaaattatcataatttccttatttaatctttgtttatctccttattttgctctcataatgtgagattagatacaatccaaaatgcaaaatatattttttatgttcattttaagaactagtatttctcatcactatttccaaaatgctaactgatccaaagtttgtggtgattaaaatgtttataattttaactgtcattttcagtaatgctactgtagatttgtagcagagttacagtatgtttgactttgaaactcactaacatgtgtgatagtgatgagactaattagagaaacttatctacagttaaatattagtaatgatgactaaagaaacctatctacagtattttattatatggtttatttttgctagatgtgatgttttgggactcttcttggcacaattattaggtgtctgggttagaaggagcattggtttcattgtgtctgaatcatataatctaaagtttggtccatttgtgggtcctttgaattgtatcggtggtcataggattgtaccggctttagtttaatcgggccggtccgagagatccgtgattgattcaatcggtctgccacgtgactcaaacaaactgcagtagatctttatgttcgtaactctcttaggtaaattagtaaactacactatctatgatttaattgtagaattgaatttatgtttggtccacatataatgtctagatcagcttcaagagcaaattttgacagatgtatgaaattgaatctaaaacaaaaagtttataaattggagtgaaggcaagtggtactcacttcaaatagtaatcacattgtttctatatggcaatgggtcacatatatggtctattattggggcaacctgtcacatgagtgtccaatccagtttaaccaatctaaaccgaactaaaaccattaaaaattgatacgaaaatcaaagctaaaataaactaaaccggtctgaagttttccatctttgagctgagctttactataacccaacacaaactatagaagtaaaccgattaaatccttacggtataggaccatagtattaattaatacttaattggttccaaggccaatggaacctttcttaggtacttggcatcgtgttctgtagggatttaaatcttcagaatcttaatatgttcttgtttgtttatacaggactaattaacgcggatgcagaagatgcgagttgtagtagcacgcctagttggagaatcaagaagagtctaacatgtgtttgctttaaccgcaagagagcatatgaacgcatttgctctaacttgacaccattgcaggttaacacaaatagaaacaacagctccattaactcgtttttgtatgaaagcattcaattttctgagtctgattgtttttttattttcataggaagaaagacttaaaaggttgaggaagagaatgaagaattactatgatgcatcacggcccgatcatcaggatgcattaagagcactgtggtcagcaacgtatcctgatgaaaagcttcaagatttgatctcagaccagtggaaaaatatgggatggcaaggaaaagatccatccactgatttcaggttaacctctctcttgcttgagtaaccgaacatgtcaaatagtgcttaattcggttttcttgcgactattgttatcagaggagctggattcatttcactggagaatcttctattctttgcaaagactttctcggtaaacttaactctcataactttctactttgaaagattcataacctctttgatgttttttcgggtggcattggtgtagacttcgtttcagcgtctgttgaataaacaaggaggcaaaagagcggcttgggaatatccattcgctgtagcgggcgtcaacataaccttcatgatcatgcaaatgcttgaccttgaagcatgtgagtgtccctaatatcttgctctttgtttgtgaagcaagaaaacttaatatttactacatgtgcagcaaaacctaggagttttatacggttggtgttcttacaaatgttgtcaggtaaaatatggaaacatttggttatgatgatcatggctctctggttttcttgatttttaactaagtttttggaatatctagaaagcgaatgggcctttgatttgctttactgtgtggcctttgtggtaatggacaagcaatggctggacaagaacgccacctacatggaattcaacgtgagtcgatcatctttcggtttatattgcttggttatggtgatggtgatgtgatgataaatggtatttgtgtaggatgtgctaagatgtacaagggggcagcttgagagagagctgatgatggatgatgttttcagaattgaggatatgccttctttctctcttctctcttagttttttactaatcaattcttgttgtcactttagatcactatcttcattctcattttcctaattagctaattccatcaattcaaatttcgttttattcatataaacattatcaaactcaagtttctcgaaactaatttaattcaattaatcattccaatatcttcctaataaatgattcacgccgttgtcgttttcccaagcatggtatctctaacaataaaatagaaagattagtacggtaaaatactactctctctgttcctttttgtttgatcttttagaaaaatcacaaatattaaaaaaacatattaaatgttgcttttaaatgtattgttttttgtgatttacaattttcaataactttaaaccaatgatattcactaatttgtattgaagtttacaatttatcaattataactaataactattgtattgaaaatctaaaaaatcaatctttttgaaacaatttttttttctaaacaatcaaacaaaaaggaacaaagggagtactattagttttggttttattttaatgtttgtataagaaaattatcaaaagtaatataatgatttttttatttattagtgacaacaaattttttaatggaagcccaaattttcaaaatatgtagatcaattgttagtttttaaagagctcccaaagtggatttttttggaaacgttatggaagcgagattccaagagcgccgattccgactctaatcctcgatgcggtgacaagttcataaaagccattgcaataaaatggtattttttgtcatttaaatttaaaaacattcaatattaaactaaagattaattgtcataaagaaaaatcatcaatataaaagggagaagaaaactacaagattatgttttgaaatttgttttttttcaccacaatcaatgtcacatagggctagaaatattattttctactagattctaaccaaattccatcagaagcattcaatactaagattctcattaccctttggaagttcctttagtttggccacaaccgcttcgttatccaacttctcatttgcaaaaaatgaagacgttttaatcatcatcttcttcattaccgtcccttgcgttacaaaacgcgaagctaatgcaaattgttttttatttgaaccgttgaaatcaaacatccacataacttccacacgaaaatcagcattgggaaacagatttgcctcctcccactttttcttttgtgttccaccaatcgaagattcactatcttccttagagttagggacattgttatcctatatatatatagacaagaacatacataaacatgttgtgttggttatgatagatacttgaaattaaaactcattaaaccaaaaaaaaagatagaagataaaaattaaaataaaaaaaagatagaagaaaactgatcaaatcttctaagtactaaaattaaagcataaaatgaaagtaccttaaatagtatatggagctcttccaatactccattccaagcaactaaaatgtcccttagcatgtggacttctctcgaatttgttacatccacgaccaccttcaaagacttaagcttttgcaagtagctagcatctccactcaccacgaactcatgtccaatattttttttctccttcaattcatgtaaaacaaaatatgttaagcaatatataaaataccattttctatatatatatatatgcttgtacttgtacctgagcatgagatgtaatattgtagttcatgtttggcactttctctagatctttagtccaattattaaacaaaagtcttggtgccttgatgacaaagttttgttccttagcaaacgcaaagtagaaaatggagaaaatatccagaagagctgcagacacgtcaatgcaatcaacatgagggcaatccaaatgcaagaccttcagattattattatgaatcttcaggcaggtcttttcgttgtaccacatgcaatttagcaccagcaccttgagagaaggacatgatgcaataactgtgttgaacacatcaacttcagctaagattccctcaagcttgagaatcttcagattttcacactccttgaaggcatgtgcggttactaaatcgtatcgacgtaggaagagggttgcgagctttggatgcgagaaagtgttaggggaaaaccgaagcacattggttctcctacctttaccaagtttgttacaaagtgagagaaatctagtatttttctcaagagtaagcaatcgaatccaattttcaagcacaccgtttacacaatggtgtgcgaaatgatggattgagcaacccatcaaatgaccattgtgattgtttataaccttgagaacaaaaatagtggttttagttaaagattgatacacatatacaatgtaaaaagttgtcaacaaaagccaattcttttatatcttgtgaataagttgatcaattgttaaattcaataaaattgaaagatatatggcaagagatcattttttatatattttcattagctaatagaataatacattcaaaatcagtgctcactttcaaatatattaataaacaaattttttaaaaaaatactccctccatttcgtattagctgtcgttttaaaagttaaattttattttgaattagttgtcattttcggttttcaatgcacttgatagattttctaattctatctctattctttaagcttattaattgatgatatcaactaaaataatacagtaattagaattaaaacaatgaatgttttcttaatactcgtaaaaaatcttaaatgaaaactattttaaagaaataatctatgttttcgcttgaaataccgttatgcttaccatttattattgcgggaaaataagataaaaccagataatcacctaaccacaaagttaaacatgtgactttcatatttatataagcaagtgcatttgatttcaattggttcacgtataacatttcttctacgaatcaaaatgtaatgcaatctaatcagttaagttaagggaaacgagacagataaaaaacaaaacatttgactggaaactcataagagcagaataaggaaaaatggagagaaacctgggttatcgattccgcaacactattggaaagagcagcgataagtccactctcgtatgtagcacttagcaaatcgaagtggaggtaaggcacttgtttccatacattcttccatcgtgtagacaacacacttgtcttcaaagcatcttcagtggacaaacttgctaggatcatgaccaacacatcgtcggggagtttactgatccggtcgtcgattggatcgatgaggatacgtttgcctcttgcatccgatgatcgtggtgcgttcatggatttgggctgatggtgaggttgagaggttttgagaattgagagagggaattgactcatttcgacttgtagactagagagattagaataggattatagatgaagagaagagagacgaagaggttacatatatatacatgatatacgaagagataagagtgattatagtcagacaacgaaaatatctggtaataattgtaatgaaaccctaatcaaagtttatttttattcttcatttttaattttcattacaatttataacagttagttatttttgttgactatgacatttaataaaatggaaagaatttaacaattaatgcattccgtataaatggcacaggataaaatatgcattcagatttctttccatgacaccagaaatcataacatatataaccatcaccaagttggttatttcaagtctttaacgacttttgaaagaaaaagaaaaatacaaaacgaagaaacaaaacaaaattttcaaaagaacagaaatgtaattggggctaaacccaaaaacaatatatgagcctgggttgggctgtaacattaaataatcaaaaaacaaaattatactagaaaaattaaaatcagggtggggtccagttaagaagagcaacgaacttttggattttggcagcgcttgtacgtgattatagtaattagactatattgcccctactaccatctcaaataccaacgttacccctaaatatcttctggacgttgaaacgaatagacgatattgaccctgcttttgtcactaaataccaacgttaccactaaatatctttcgcgtcgttacacaattagtcgattttacccatgctatcaccactaaatatcagctttgccactaaatattcttctccatttctataaacttcaaacgatctcccagactccctcactagtcataaactgataaacattctctccattttcaattttttttgaaattttctcttccctccttctctctgagaattcctccgacgacgaatctcgttattcgtttcacacttctgcaaaaatggtgagagcagaaatcgccgatcatcaattttctcctctccgtctcgttcttcatcttagtctatgaaattttcgctctgttcaagttctctcagtctgattttagcgtttcgttttgtttcttacctccaggtgatggctcagaagctgaaggaagcagagatcactgagcaggactcgcttcttctggtaagctacgccgatcatcgagcttttgagtttttgtttcttaacgattcgtgaaatttctagctccttcctggtgattttcgtagatattgatctggatttcagatctcgttctcttatacttagtttttcgcttaatctgaagaatcgtgaacagtttctatgtttgttacgcgttaatcagctggagtttttagctcgtttacactgacgtctttgttttggttttcgttttgctgaaatagactagaaatttgcttcgtattgctatcttcaacataagttacatcagaggactctttcctgagaagtatttcaacgataaatcggttcctgctttaggtgagatgctaatctggaagtttctagagctctttggctctgggatctaaagaaatcaagttaaattttcgatttcggtaaatattgtaactaatattgggcggacgcttttgtagatatgaagattaagaagctaatgcctatggacgctgaatctcgccgattaattgattggatggagaaaggttttctatactaatgattttggcatttatcgcttagtttcaattgtgtactcgtttatctttgatgattttgtttcttaatatggaatctaggagtctacgatgcgcttcagaggaaatatttgaagacgctcatgttcagcatatgtgaaactgttgatggtccgatgattgaggaatactcatgtaagttctggcgaatgattgattagcttgataaaaatgtgttcgccggtgggtgatttgattaattgatgcctcatccctccctgtttaattggtgtatgctttgatgattgtgcttttttgcataatcgctttatgctaaaattcaatgctctatatatatgtaacatccattattgattgatgaagggtctgtgttattgcagtttctttcagctattcagattctgacagccaagatgtcatgatgaatatcaatcgtactggaaataagaaaaatggaggaatatttaactccactgctgacattaccccaaatcaaatgaggtgcagtgttgagataattctttcctactttgagtttgaggtctatatttatcttccgtaacaggctttataatttttcatgattgtgtacttaaatcaggagttcagcttgcaaaatggttcgtacactagttcagctgatgaggactcttgacaaaatgccagatgaggtaatgaatattgtagctactcttcagtggagtttcattgacctcagttttcatattgctgattactgagattcctaccttttttgcttctgcagcgcaccatagtgatgaagcttctgtactacgatgatgtgacggtatgattacagccttcctgaattctctgaaccctggtgacattgctatgatctcaatgtagcttcaatagagcttctttcgtttaataacttatagactagcatattgtggtaataagcatccttattttgtgaatgtgacttttctcatttactgattgattctacacacttataacacatacaggctagctttgaatttgttgtgtttgcattcattttctactttcttttggaatcatgtctttacattcatcttatatcacttttctctactatgccaaaattgaatgcccacaagaaagactgacagctgttgtttaaacctttttgcagccaccagattacgagccacctttcttcagaggctgtacagaagacgaagctcagtatgtatggacaaagaatcctctgagaatggaaattgggaatgttaacagcaaacatctcgtgttaacgctaaaggtaacgtgattgaagaataaagcaactcgctatacatgtttcttgtcttatgatgtcaattcattgtggatgatctgtgcaggtcaagagcgtgcttgatccttgtgaagatgaaaatgacgacatgcaagatgatggtaagagtataggacctgattctgtacatgatgaccagccttctgattcagatagcgaggttaacaaagtctctaatttgctcatctgctttgtactcagatcttttacatcctatgtgcattacactccactgtgcctataatgtaatgttcattgttgttttcagatcagtcaaacacaagaaaatcaattcattgtggcgccagtaggtaatgatgagtaacaaacccttgtatgcttatgccagtctagtaatgttttcacttatctgagttaacttaataatctaacagagaaacaagatgacgatgatggagaggttgatgaaggtaaatttactatacaaatattacttcaaaaatttggtttcacggtattggaaaagctttcttctaatttcacctatcttttaaatgcttcaagatgacaacacacaggatccggctgagaatgaacagcagttagcaagggtgaaggactggatcaactcccgtcaccttgatactctggagctcacagatattcttgcaaacttcccagatatctcaatagtaatgagttgttcctcttcatttccaccttagaaagtgtaactgagctcttgcatgtttagtttccgccatttcttaactctaagccactcttttttatgatttcaggttctatctgaaggtaaatcaagcttgatgatgataactaggcaaaaacacgcttgaagcatcatcatatgatgattaataatacagtttgataatagctatctgttgttaacttcagagtctgtcttcctatactaactggtcacaatctgactttcagaaatcatggatcagctcgtgacagaaggtgttctttcgaaaacggggaaggacatgtacattaaaaagagagacaaggtgattcttttatcctgactcctactttggtttcatttacttatgactttcgcctttgcttttaaattttattttctacctacttaccccaaaatttcagacaccagagagcgaattcacctttgtgaaagaggaagccgatggtcaaatttctccagggaaatctgttgctcctgaagactacttgtacatgaaagtgagggagactctgacttcttactctatgtttaacacactagctcaaaggatagatgaatagagatggtccggagatccatgattgacacttggctttttttgttaggctctttaccattctcttccgatgaaatatgtgacaattacaaagcttcacaacatgctggatggtgaagccaatcagactgcagttcgtaaattaatggacaggatgacccaagagggctacgtggaagcttcgagcaaccgcaggctaggtttgctacctcaattcagacccttctctgttaagttatgttggttgttgtgtcattttttcctcactgatgcaatgtttataaacagggaagcgtgtgattcattctagtctaactgagaagaagctaaatgaagtcagaaaggttcttgccaccgatgatatggtaataatacttgaaaaccagaatacctctttggaacagctttctaatgtgaatggtttcacaggatgtggatgttaccgaaactattaacaagacaaacggcccagatgccaaagtaaccgcaggtacactccttatttgcactttgcaacccaagttttaagctgttttaatcgatctgacatatttgaaacaaatagatgtatctacctgtggaggtatccactccataggttcagacttcacacgcacgaaaggaagatctggtgggatgcagcagaacggctctgttctaagtgaacagactatctctaaagctgggaacactcccattagcaacaaggcacaggtagtatgaaatcaccactgagagtgatagacatatcttactgtgtatatgactcttttaagtgtttgctaatttggttattgttgctcactcagcctgcggcttcgagggagagctttgcggtacatggtggagctgttaaggaagccgagacagtcaactgtagccaagcctcacaggacagacgtggcaggaaaaccagcatggtatcttacactaaaccatataaactctctctacgtttttcaactttttagttatttgctgaaagaaactgacatggttcttgtgattgttattcctacaggtgagggagcctattctgcagtactccaagcgtcagaaatctcaagctaattgaagacaccacctctatcagacaccataaccaccttcttcagtggtgatgatattaacctgaaacactcgctttttattgctttatttctcctctgcattcagactattttcatactccatgcttgttattatctctcttaaagtatcatatcttatcgcacttttgggaagataatttattgcatatcaaactttaacacttattagttattactgtgagtattattcactaatgctctacatgcttttatggaacaagtatgaagtataggactatcttcgttttaaattcccctgtcgatcactttaatccaaaaactttaactttagatactaacacgtgttgaaacgtgtactacgccattccacgcgtcaggaaatcgagcaccgccgaattcatctcgccggagcatcaccgccttcgatcagtcaccgccgatccgtctagtagtgatggatagccttctccttgttgtcgatctcgaatccaaatccaataaacgtcgaagatctgccggatagaacaaagaagctgcttcaaaaatctccaagaaacaccagcgccagggaagcttcatctataacgacacccatattggtgaagtcgattctttgctcttcctgagcaaaaggaattgatgaagatattattccttgaacacaacggtgaaaactaagaggatttgtgaagaaaacggcgacatcgacagaaaacatggatggagatctaaaccagacagagccggttacaaaagctgacctaaagtcagattattcaattcgccgtagcgaaatttacagattccgattaacggaaaacaaaagaaaaaccaaatactaatctccgatggagatcggagaacggaggttctctctctctgaagagtacgagaggggtaaactgggccgcttatttcgcatgtacgttattgggcttctctttgtaattgccctaatggactgttttaatgaaagtatttggccgacaaaaaataatccaaaaactttaacgcttatacgttcactactcaatggaaagtatacacgtgttcgtacaagaatcccctagaatattttcgtcattccgagcccacagcttaaaagtccagaaacatccacacacgacacgcctttctagaaacgattctttttttaataccccacacaccctcagatctattatcaaccgttggattacgtggacaagtccaatgccactcgtatttttaaccattcctcacactcctcaacgtgatgtgaagatactttgctgtttcataacgtcataaagaacagtgacaggcgaaatttctcaagaaagcaaatcggaagaactcacaaaaaaaactaaggtaagagattattatcatcacttttgttcttccttcactcaaaactacgatcaaaatcgtgatttcatcgtctttggtgtagatggagacagagaagaaaaatagcaaggaggtagcgctaaaacacctagcgttcgtgagaattgcaacgatccatattctggcttccgtctcaaatctctacgaatacgctaaacaaaactccggtcctctcaaatccgccgtggaaaaggtcgaaggagccgtcaccaccgtcgtcacccctgtctatcagaaattcaaagatgttcctgattctctcctggtctttctagatcacaaggtagagcccaattttgaatttctcatagatttagtctttgttggatctgatgacctaatttagaaaccagatcgtgtttagtttttcaaacatttcctttctttatttacttttgctaggtgggtgaagtttcgtacaagtttgatgagcatgctcctccaatggctaagaaagtggtgaatcaagcacatgtattgatctacaaggcgacagagaaagctcaaagctttgtgaaagaggctcgtaccggtggtcccaaagctgcgtttaactatgctgcaactgagtacaagtttttcgttgtgaccaactcggttaaagtctgggctaaacttaaccagtataaaccaatccatgcaatgggtgacaaagctttgcctgtggctgcacacttttccagtcggtacaacgatttggtgactgatatgactaatatgggttactctttggttggttatcttccgttggttcctgttgatgacattgttaaggcttatgaaaaggaagatgcaaggagaaagaaaggaggggatacggctggaaagaaaggagagactactgatgcggctgatggtgataaatcatcgtctgattcggagtaggattgagacattttgtgatttgttgctgctttggaaagtttggtttgttgggttttggttatgtgtgtaaatgatcttaggacctctctttttttcttctatcacagaactttgaactagtgttttatctcttggtgctgtgaaaatgtactacgtgtgtttcgatctttttaaacaaggatgggtagtgttagctacataacttcgaagaacatgaaaaaattatcacattttgagaaattgtatcagtatcaaaaatggaggagatggagaatcaaaacaactttactaagaaccaatgagcattatttctttctcgttcgtaaacaagtttgaagttattatttgagttttgtaccaagctcccagacaccttaagaacaaatagaaacagaagcggacaaactccgagaaaaatagcttgaaaacaaacatgcatccatccagacagcataacacatcttctttctgcaacaaacaaaaacatacaagtctcatttcctataggaagctacgatagttatgcttaaatgaagctgaaactgtagaaaactaggaagaaagactgtagattccaagcacatatgttaaggaaaagagatgtacaaactcgtcagctccaagccacaatgcgggtaacgaacaaagtattcactactgatcacatatcaatatgtagcttagacgcaagtgcaaacactaatgttcagaacatttcgtccaacccaaaaaggttaaatcatatatcgaccaacccaaattcctctactgacagagacaaaatcatcacatatcgaccaaagcaagttcctctactgactatctagaccaacgcaaattctctaatgacagagacaaaaacagctatagagtaatctagtatagaaaagccatattcaaatgctgaatcaaaatggttccatacaattaaaaactcaccattgtttgattagtctgaagatgaggaagaggaagaaggaggagtgtagttgtcctcgagaagatcatcataaggatcccttcgaccagcaacctgactgatctgaggatcccaacgaagctgagcattgtgacgctcaaatgtccagaatccataaggacgaataggcaatgcccacatctccttaatcttcttgcacctctcatgcatctcatatatgtgttccctcgctttcctgtctcgttcctctggattctccattaaccttaacaccaaattctccgcgaattccattatgaaacccatatttcactgcaaactcaaaaacacacacttcttacattcaatttaacccgaagattggttttttaaaatcaaatcgaagcattgaatccataaattggactctgtgacctaaatttctgaaaccatctcgttatttacttaatgcaagccaacagcttaaccatggaaatcacccagaaattagggtttctatcaaatcgacgcattgatttccacaaattgggttcttaatctagatctaggttaagtttctaggatccatacaataaaatggaacttaccttaatattcgagaccaaacgaggaagatcggtgaagcttttgctttgggatggtcagagagttctggattcgaacgcagcgcagagcgagtgttgatgaagaagaaaacaaaaatctgataggaatagaaactgcgtgttgttttgtactgagaataaagaaacaagacgttttctgtaacaaaaactccaccctgtttatgcctccctttacggaatgccgtggccaaaatttgaccaaacctattcagctgtcaaatatatggctacaactaaactagtgctagactgctgggcactgatataccagttacaagtatttgatccgttatccatttagtatccgtctttaaaaaaaaggtatatataatttttgagtcgggtaaaggttaatatggatctattccggaaaaggttaatacggatctgagattttttgaaaaccgaatttctcccaaaccaaacaaaccgatccgaacaatccggttcagccaaggcctaatattacatgttaataaggatcgagtatcatatattattacaacttttttgaaaattcacaacattgaatttctctttctacttaatatgcaacaactacatatgtgtgtatatcattttgaaccaaaagctggcaaattctaacaactagcaataaatgggctggacctctttgtagcaccccaccctcaccatgaatctactttttatcgttcaaagttcaattaagctgatacatttattttctgaccccaaaaagaaggtaaatgaacagaaagttccaatagatttgtttgctatcgaaagctacttattaaatgtgtcaatattggtaggtgatttagacaattctaccgactaaaaatcagtaattacatactcatgatatataatttaatttaatgcaagtttgttggtcctaaacatagggttttacgaaaaggagcctatttaattcgttgatgaaagcatagcgctagtttgattagcttaagaaaacacttacgcgactcgatccacataaattagatttatatatgacgttaaatagtttggccactttgaaaagtatttttgataactatacttttaaaaatcacggtttaatttttaataaactctttcatatttttttttgttccatttgttatgtttattccacctataaaccatacttgaatcttttgcttcaaaaaaaaaaacaagcatacttgaatctttgatacttgctctactaattcagttacctatgtagttatgttcatgctgtgaccaattggaatagttacgttaaaaaaaatatttatatttagcagcattgctttattctttttttttcaactttttatatcttacactatttaatttctcaaagactatttgattaaaaatgctttgtgggtgggtctaaagttttttcttataatcccactttcctcaaaattcctcattctctcccactaatacactcctctatgttccctaatttgcttttctctctaatgttttctgacaataaaatcataagatacgtcaccaaaattgatccatgtaaaaatttatgctgttctgttcatttggttgttaatacttaatactctacaaatttcgtctgaaatacaaactttaagattgaattatctatacgaaagaaacattttgaaatctattaacaaaatgtgttctcttggttccctcatttagtggtaaaagtatatatgcgcaataatggtttgaaagcaaattgtaaaccaatgatgatggattgatgggtccaaaaaataaaacattggtgtttttcagctaatattgtggttgtggagacaataacgtatcaaagagggtccacgattatttatttaaaatcagaaatttcactttctgttaatccatttttgatttgcagtagaggttttcccggtctacctaattgaattacgaaaaaggaaaacaaaaaaaaaaggcacgaattacatgatgaaaaagaaaggtaatactatatagattgcacaccccatgatactttgttacccattaaatcataaaaaattttagtttaatcactacttattttaattatgaactgttgcctgctgctggtatgagtatcgacaatatttaattttaagatataactttaccttgaaagctaaatctcaattatcaagtcacgttcatgagtttataaatcattgtcctgcggatttagtatgtccaaaccctttgaattaggtgtggtcaatatatccataatgagtagtagtaactccttcaatttattaggtcaaattgccaactatttagagaaataggttagtttgatctacaaaagttcaagaaaaatgtgtaattgaacgttctctataaatattaaagaacaatttctatccatttacttatgaactaggccattagaaaaaagttggacagaaatcttaagtcagttcgcttttttttttcctcatgcgattgagagggtgattcgatggaagaaaatagaaattttaccggtagagtatatgattcatatacatatctaaatttgtctggaaggctttgtaatttatgattggttttgttttactctcattagttaattactgggttatttatattttatttttttggggtcaaaacgaattgttaaatttataatttcctgtaaaattatttgcctaacctttaatttttactaacccctaattcttttctaatccattttgctaacattttcgtttttatctagaccattagattgagtaacaagaacaatcggaaataaaggagaacactaacattctttaagaaaacttgaccaacggttacaagcctaacaaaactttaagggggcatgggaaataggtgaagattaagttaccaccatcaacagatagtaagtgtaacccattcaattatccggaggcaaacttggaactcgagattcgcttcttcggttgtgaagttaacctcgcatggaaggatgagaaacttgaagactgccttgcactaatacttactaagaaagaaggacaaataatgatctagaagtgttcatggactgatggacctgagaaagatgttacatatttctatgaatggacgctttgcaaggccttcctcaggtcaaataagtatgccttcaaggcttgaagatcggggaaatttcacatacacatatatggaagctctatgcgatctttcgtaaagtgtgagcaccattgccttaaaacttcaaatgaattaggacaaaaaatgattgaatatatgaatgcaaaagtctaattcgcgaacatgttgccggcaatagcaacctcaaccatgaagatgttggagtaatggttgtcaatataattgctaattctctccatcgtgcctaacttttcaactgactaagatcatacaaagaccattcttcacaatagtcagacaatcatagatttctaaaggggacaatgaaaatgatattagaaggcaagatgattgatttcaaaatggtgtagggacattatgcaaaccatgagggaaacctaaggcgaaacaagaaaaaactcaacactcaagatatatacgagtcaaaaccttatcctcagctcattgagatgataaaagaaactagcaaaactaaattgtgactcaaaatcaagaaaattcgaatatgaaaaaagaagaataaagaaaattagatcctccgacaaagataagatgcaaactaaagtaagatttataccatgaaaaataaaagccgttcattttataactcttctttacaatagattggaattacaaaaattactctactcgatagtaattttttatcctaatcttttctactaatagcaaaaaaaaaaaaacgaaactagcttccgtttacctcatctctcgtcgtttttttttactattcaaagcagccgttacattgccgttaactcattggaagcaaaacattatcaccgttaccatttccgtcaatctgaacgttaccttcaccaccgtcaccttcctctagccaccgttgcaccggagcacaatccattttatgccggagtttccaatctaaagcttgacaagcgcgtgaacaataattaacaacgccacaaaccgaacatctcctaaactcatgcttcctcgtctccggtcgtccacaaccagcgtgtgaacacaatctcaacccatctccgggacaatctccgccgcgaacagcgaaccaatccgctaaaaacctattcgcgggatgtgtttccggtgccggtacattacatccaaaatcactaagcaaaggacaagtttgttgaccatggttaggaacaaccggaggtggtggctgtgataaagaaagccacgttgacctagcttgtataccggaagataaaacggcggcgagttcacgagcgttggcttgaactaaaaacctcctaccttcagagacgttttgaggaactccataaccatcttgaagacagtgacctagctcacgtagcgcgtcgacgtgtccaagaaaagcggcacgcgcgcataaagccacaccggctctaagatctttatcattctttgaaccaccgcttccgttgaactgaatcactgctaaggaatataacgccggcgcgtgagaactaatcgcggctttagccattaacgacgcgccgtttcctctgttttgtaaacaataaaaccgaatctacacgaaaatggaaatgaatatcaaaatttaagaaacttaacaattaaaatgaaataagttttagaaactaaccattcctagagtgtaacaagcttcgagacttccggcgtcgacacacctttttaaaaaccggtgagaatattccgaccaattatgagctttaacagcgatagctttaggagataatctcgacaacacaataggattcatagctaatccttttaatctcttacatctgttccccaaaagaaaacacaatcaaaattagagagacaagaaccgaaaaccgacaaaaagagatataaccggtgaaagcttacgtcagcaaaacgttgatgaaatcagcaggacatcgagaagtagagccaagtttacaaagtatagagataacaagatcgtctggaattgaatctagcaaatcggctccggttgtgttttccggtaccggagaaacagaggaaggaacaacaacacatcgtcggcgttttcttcccggagtaaagtcacaggagaagactctcttagtttttcttgagggtaacataatcttcttctttgtctttgagaggattacacagactctctcttatctctctgtgtctatctttttattctctttggcttataaatatacaaagtggttgagttgtttctctcttctgcgtacatacgtatgcgaagctgaaaagacgagtttacccttgtacttttgtcttattccccggtcaaagcgtcgttgacacagtgttcgcttttacgtagcttcaagaatatttatgaggttacaataaataaatagagaaattagaggatctttttctataaatcgaaatggtttttttcaaaggataaaaattgtttgaaagtaactaactccgataattatttacttttttaaccgtggaaattgcttagtcgcgcgtctaaatcacgagagtgtaagagcgattaagggaggtatcaggtatgtaacaaataaagggagagagaggtcaaacgtaaggaatcagccaataatattttacaacggttacttcttttttgttgccgtttctcctctacgacgttacttttatttttgtgtaactttgttattttgctattttttttatctccaagaaataattaaagtggagaaaaaagaaaagtttatatttgactcagagataaagtaaagtttgcattttttaaaaaaaaagtggaaactgtttccgaaaccgaagaaaactgcaacagctaaactaatttatatgatttcttgaaaaagtagaataatttgaaatgttaagatgaaaggaaaataagaaagcaaaaatgaaatacaaaaatgttcataatcgcttgagcacaatcaaaagtgatggaggctagaattatgtaggtggcaattcaatataagaagatagaattttaattttaaaaaattcaaaaaagtttgcattgatatgtataatttaaaatatatataatttaacattaaattttttaaaaaattgaaatgtttatttagagttcatcatattttaacctcgtcaatacattttggaatttgagcatggttaaaattagcatcagagacataatagaatgaatataaaaaataagtacatttgacaaaatagtgcgtttaattttatataacagtcaaaagaatagtcttacattatttgattgtatttgataacaataaatcacattaataacattcacctaataaaaaaaaacaggaaaactatgaaataaattgtaggaataattatttgatagtaacaaatcagaacaatattgccacttagttaagttcaatctcattcatttccatctaacaaatttgcagtctataatttaacaccactttcccgaagaagtaaactcatcgaaccactttcctattagcttgtctttactttattggaaaagtcatcccacgcctctgttttttcattttatacctttataaattcttacgtttgtagtgcgttttaatgtcacctttgttttattatgaatagcttaacaacagttaacacttaaaacatgatgcgattaacctatattgtaaatccttttttaatctttattgttcaatacaaaaattcaagtacatcaaatctagaccgactaacattttaaaaatatgacatataagaaaatgtcggaaagttgaaaagacgtgtaatttgacaaggtaattaactaatgatatacgtaattaggacaaataatatagtgattatcaacaagatgttaaataatggttctcaaggcagacgattcgtcggcgttagcttgaaggcctggttaagctattagctgattgacgtgaatctccacgaccacacaaggaccagtcatcttatgcctctttgtacgtgtgggactcacttgtctcccccatcgagttctctctcataaattccatttttgtttaatttaactttcatctttttaccaatctcgtaagtcgtaagtaaaacaaattaaacgataacaataattccaacaaaaaaacatcatcttcccacaaatctcttaaatcgtaagaaaaaaaacaaatcaatatcaaaaatgacgttaacatacaaataggaaacatactatatacgtaatatgtgtatctaacaatctctctatgtaatttgcataggatttgtcatttgtgggtcagtttctgttttttctcggtccgcgatcaacgcaaaaatatacagttggagggtgaaaaagttaaacgagttcgaggataatatcgatgagagaatggttggttataatacatacatttgtgattgtagaacggtctaattatatttgaagccgacgtgatttgacattagtttgtgcacaaacaagatacgtctctaataatattaaattttatttacgtatcagttgaccttgaggcttcattgtaacaagatctatcgttttatgaatcttcctcacatatctaatactttagttgttagttacttctctttagagaaacaagaaattcatattttactactattttctatttgatttcacctttaattactgtaagcttttatcatggtcgtagataacaaatgaacatgaaaggaaaaaaaaactataaacaaacctaacaataagaagagtgttctggatatatgtgagccaatgtcatgttttggctatatattatatagtagaataatactagagtacttcacattttactaatcattatccttcatacttgtatactacctgtgttatatatatccgtatgtacaataagtcaataatgaggccatgattatcctacaaatagatatcacatacatcatatttgaaaaagaagcaattttacagtatccttttccattattttgtgttctaaagatgatttttggtgagtgtttctttattttttctctgtttatttttttttttttgttggtttaatttttttttcttttttttttacttcactttattatttttggtttagaagatagaaaaatagtttgaccttttagttgagtgcatttggccctctcgctccacatgagttcgtcttcttcgtataagaacgaattagtcatatattttcaagatcaaatacataaatcctcctaatcaattcaaaactaataaaaactataaatgacattatttttgtaggtgtataagatataagagtataataaattgttatagaattagtgtgaaatgtatcaaaatttcacttgttttttttaattaaaattgaatccctcagttttaatatattattattttatccataaaaaaattacaaaatacagttatattaatattattacactacttagatatatttatattaaaaatagttagtaaattaattaatatataaaatacaacaataatatatattcaattagaaaatacaatgccaccacaaatgataaattaaaaatacaaatttaacaacaaaaatagaaatatatgaaaaaaaaatcaaataaacttgccgttaaaaagaaccttaacccacaataacctagtgactttaatttcaataaagttaaattttaatactatagtaatttaattggatatttgtttaaaaataaactaagtggatataatttgtagatttaaaagtaaagaactatacatcaaattaaatagaatatacttgaaatatttattttagacgggaaatttccaaccatgttctaaatgatcttttcgtaacactcaacttttttttttttttttgaacaactttcgtaacactcaactagaacacaaagtatcctaagcgaaaatagatatgtatagaattggggatgttgatgtagagatatagtcacaatgaaaagtagaaagatacttaaattagtggttaacaaattagctatatatgttgcccaaattccacacgcaacctaacattttttccttctacatggaatggtctaaaactgcatggctttgtatctagttataggtcttaatcatgatgctaattttagaatttagtaggggtagcgtttatctgacatttttcacgaaacagtaagatttgactgatctagtttcaaactggtactaattaatcaaattattggacgtaaatttaaatagtagtgtttggaaaaaaagtaatatcacatggcaaacatagagaaggcatacaaaatgagaagcgaaggcgtcgtcccgtgccccatttcacactctcgccgccgctatcacgtgcctttgcttcgccgctgccacctcaactttcacggctctgtcgctttgattgttggtgaggtcaccacgtgattccaacaactttcaagctacttatattatattctttaattttactcataatataacagataaaattatacaactcaaaattaagtcgaccaatttattaaaaatttactttatcacaaagaaaagaaaaatctaaaattttatctttttcttttacagaaaacaagaaaagaatttatcaaatacatcaaccgagtacaaacgattttatcgtcaattactaaaactattttatagattttcatctcttattccgacttttgttgcacaattatctttgatctatgtcgtgttaaattttatttatcaaacgatgccgttaaagattggttaataaagtttcaaaattaattacattttgaagtaatgttacatagctcaaaactaccaaactagtaattatactttcaaagttacgtataatttgccaaatattcgaaatggaaaataatgagaggagaggaagaaatggtccctatgaataccatccgttcactctactaaacaaaagaaagatggaatcagttaaaaagatgagaaagaaagggacccatttcttgctgggaagtttgaagacagattttgttgttcccttcgagtggtgcacgtctctctccttcttttgccacgtgtcttcttttattacacgttggacacttcccaaactcgaatctttggatcctttttacttttttgttatcaagtttgaaagatcaaattggaattataggatcataattctctcgttgactgaaaaaaaaacacgaatatgtccaaaactatgtttcgtaaacacatgaaatattacgccgttaggagattatacatacgtggacgatttgtatgttgtacagttgttagagaaaataggaatttcaaagctaactaactcaatttgttatgctgctgattgagtttatttgtggattttagcgaacatgtgactacaaattttggataaaaacttcatgattttttcgcggatccgaatgaaagggaatatgtttctttcgaaagagtctcgaactagaaaacttcttgttaatattttttattttctttcaaaaaccactaaatcaagagtcacttatatagtatattagttttatatgatataaaattatataagattacaacgttaaaagtattttgacccacattaacccgtaaatcgcaacgcctactaatatatgtatttgttgtagtccctataatccatcccattttagaccctatgatatggccaaactcgttgagtagtagtggaatctttgtatttttatttttattgatacctctagccttaacgatttctaaaacaataaaatagaaaaagagtgtcttttatggagcaggcgagtaacatagatcagatacgtgtgttgaaaatacgcccaagtgaagtacgtgtcttttgcataattacatgtatgtgtatgtacgcaatgtttgcttatgactgtattttacagcgtatatctacgaaagcaaaaaatgatgaagtgttgtaccaacaaacccttaattaaatatattgcaccttttaaagatcggccatgcatgcaaaaggtggagagtacgtaagagtaaccaacagattctctgaaaataatttaaaatcaggttttataacaacttttgggaagaaaacaagtaaagcaacctcacacggttgtctgtaaacaaataaatatatattaatttcaaagttaccttcgctaaaatgtgcattggaattaacttagaacgtcgccaatctctgtctctataccttggcgtaaaatgatgggatttaattgatgagtttccttattggcaacgagacaaatttagggggaacattagatgttagttaagtatttggtactattttggtttgtcaaaaatagtaataactttaaatggcaaattttaaagtaaattaacccaatggaataaaaggaaatgaacttagacatatatatatagttagttatgggtaaggccgtgatgattagtaaaagagagaaagatagatatgttgttgcttgacgcatgcggagtccactcaaagctcgcctcgtaactgcagtgacgtgtactaagggactgcctcacgtgaccgattttgttatgttacattgatacgttaagtactgttcaagggtcgaagctatttcatttaaatctgatttttttgttcttcttatttgtaatacttgaaatgttaattaacggatcattgtatatgattttttcttctccttttttcatctttattacatagagtatcacatattttggttaataaatacagcgtcaactctaaaatttagtgttgttaatatttgaatcataattaaaaatcggaaagtatgattgaaggatagatgcgtatctagaatgagagattatgagaaacgtttctcaaatcacacctccacttgcattgatttgattattaaaaatcgattaaatataaattatataactaaaaatagcaaaaacaaattgagataccaacaagagtatctcccaataaagatgctctaaagttattagctaaccattggatttcttttaattataaaacaaccaatttacgtacgaaataaggtaaatgcgcaaatctttgatgtgaaaatgtgatgaggacgatcatatatccatctccatgttaacgtgatttaattcctcaagaatggacttggaagatgtatagagcattgatcacttagaagtatgaaaacaaagttaataggttaaatatctctttttaacgtatctattcggagaggaaatgtattggccgggtaacgtacggtagagaggaagataagatttgattaaaagatatgcagagttggtggaaccacatatctctataaaataagaatccttatagacttatagttcaatcaagtaagctccaagtgttgttaatgcattatcataccattaacaagttttattttataaaaaaaaaccaagttttattttattttgaaggtaagagtgagacatttgttcctggaagatgaagtatcccacacatgcagtaacctacgtgaaaatcaatgcatcgtatttaataaatatatacgagtgttggtgtgtgtgacttaggactatatataaatcgtctgcattaattaatgtaagcatccagagaatccagattgcgcatgcataatcttctttctatattactatttgggtatatacggattaacaatgacatttctatctttgcgcagaaggaatatcagaagcgtgattcttgaatttgcgaaaatccaaagcttggctgatttataatcaaaattaagaaatagtatgaattaactactatagtactatatatatatatatatatgcattttaggcttttaactataaaaaagaaatagtatgcataatgcattaatctaagtatggtttgctccaccggtaaaaagtaattaatttcacattgttatcagattcatatgtgctggtttaactctcggttcagaagttcataataagaaaaagagcatcagaccctgaaagccggaatgagcgcctaaatgctgattttgttagtctttaaagaagtagatttttattttattttgactaatttcttcataatgaatttatctgccgattgcccaatagccttttcattggatttttttatggacttcaaacataacaatatttaactcatccaatgagattacttagataattttgcgattgaggggaattaatcctcttcatcatagattaataggaaaactcttcgagtaaaattgttttctttcttctgtctctttcaattttctttccacataacaataggtcttttttatggacctaaaacataacaatatttcttcttttgtaaatctgtcacaagaattggttatcttggataatgtactcagaaaaatgaggaaatttgaaacatttttcatgtttatgaaaaatcgattcagatgaagaagcatagtgctattcctgaaatatcaaaattgcgagtcgcctgattatgagactttagcaacaacaaaaaagcttgcgatcgaatccgaaattccaataaaaatgttagtttcggattaaaaaatagacaaaagtctgaaattatatagttatgtataaaagtcaggcgcattatatacttcgcttaacatgcacatgcaccacgtattgatatacgtttatttggttatatttttgtccgacaataacttgaagaaccattctcactttggtcttattttaaatgagaattactaaaacaattcttaagaagtcatatttttcttaatgcgtaactatttcaaagaattacgaattgttaaacgcaaaaacacgtatgcgttattcatgacataacgtagaaatggggaattcaaggcctaccctaaatctgatctaactaaacgtacacaatatataaatgtataaacatgaaggcatgtaaaagtgggaatttgtgaaaatttagcgtaacgaaccataataataaatgggattaagatgaaggaaaccaaacacataacttaacgttgtggccatctctctaatttgacttccaaaccaatttttccaatgattaagatgcaaattgtcatttatatacattaaacgaaataatatgatacaattcggaaccagcttatatggtctggtatcatcaattggttactaaatttcaatcttaattttgaataataaagtaattaagtgttggtcccatggatatatctgaaactgaaaagagaagagagtggtacaaaaatatgagagagaaggcgtgcttccttcaatttatgtttgagtaacattgaagttatcctaacattctctgttcatcatttctctttactctcttctttgttttttttttacttttgtgaataaataaataagtaaagttccatcgaatccaacttcaaataatttggccacttgctaataatactgttctctttttctctttttgtacaaattgtacagagtcttcttttgggtcaaagtcaaatttatgtacctagtttatatacagccttttgtgtgtgtggttgagatatttataactcttttagcaaacccgaaattaaagaggatgaggtcaaagatgaaatagaaatgtccaagttttggttttatcggtataatttttttactctttttaaaggaatcctatattttaactttcaactctgttattgaaaaacaagcaaaagaaaaatacatcaaattaaaatcaatatctaatttggaacagttatatgtttttctatctttcatgaatcatagaaattctaaccgtaatctagattttttttttcttcagtaaaacagttacaaattgctaaaaatgatttataagtatagtaaaaaaggacattcgtaatgaatcttttaagttttaaccactggaccaccactatttggatagtggttattcattgataatttttcgtgttaaaaactattttataaggaaagtctaaattatatttggtccattttaaagatagaaatcgatgtccacctttttttttgtttttttcctcatttgctgtatacttctaattatttatagtcatacttcgttgtgtcttaattatgtattagtttagtttaaactctttaacttagatgaagcatacttaattaccaaacaaaccagtaatttgttgaccgacgaaaaaggggaacgtcaataacatctcatcttttacttttttttacgtaagagaagacaaaagtagtaattaaggaaagattgagagaaaacatggtcacatgatcgacgagaggcttagaaattgaagacgtacgtcaacggcattaagtaaagttacaattagggtttccacaagaacgtgatcataaaaccaaagctccatagaagactcataaaacattgcttaatgcctgctacttcttggacaacctttacgtgtatgataagtgaataaacataaccaccttctaagttatccactaattcttccccttttcaaaaaggaaagaagattcattttacttaattagctgatcaaatttgtatatgtattttgatgatgctaattatgcgctatacttctacatttgacatagtaatgctaagaaaaatccatattttttgggtgattaaaatccatatattttgttacactagttttcattctatttgagacaacacgttttgtatgtttacacgattgtacggccacctccaaaccacgggttcgatgacagatcagtgatcacctctttattggtttagcaaacgacggccctaacctcgatcctttctctcggttccttctctaatgggttttttttactttttttgtttgttatgtttttattcactaattagttacaacattgattgtagttaaatattttatatattgggtttctgacatatttacgaattacgacaacttctattttatatataatcactcttaagtttatcttctggtagttttaacctaaacacacataattccgaaaacttgaacttaaattatactatatgtgatatcatctgaaaaatacaatattttttccacacctaaaaatcttcgtttggcgcaggctattaactgctttgccttataaacattgaaccttccggttgatgtaacatgttctagattgttagtaacttctatgcacactacgccaaattgtacttacttactaaaagtaacaccaaccaagatttaacttatacggtgactaatctctaataatcaaatttgattttggcacagaccagactatcctcactttgctgccgttatcaatatatttctttttaacctaaactcatcaaccacttgaaaagtattcttatacatatatacattaacgtcatgatctgaacctacgacaaagtttattaatcatttctttgtaaggtcagctgaaaactacactagacatacagagacccttagcatgttttatttccctttatctttttaatatctagaaaatatcatttttaaataaagtcttttggataaattagttataataatgattaaggtgactagtttctctaaacttaataaattcagtgacgtatatatcattttgttggagtttcctatgaaccgattaacctaaatttagcattgaagaattggtaagataaatgaaaatttgatgcatgggaagtatagataaaaaaaatgatcttttacataacaataaaggatgtgtggagaagatatgagctaatacatagtatagatgcaagcaaaagaaccaacgtccaccacaaggttaaaatgatatgttgttgaatcacatattataaattaagagtaatccgatcttttgaatcacatgttcgtatttttggcaaggccttttgggtatttgagatttacgacatgttcgttggtaatagtttttcgcaaactcaatacccgatcatgtccacctctagaattagtcgaagtttcagcaaaatttgaatactcatggtaaatctaagaaaaatgtattggttttcaggctaatattagtgctagtaatactttaggactgatactttccataccggtactttacgggacatcattacacggactaatatttcatgagacaacacactgaattgatacttttggctacttttagcgtagacactcgagatgttggctggcacgtttaaggccgcttttccagttttgctatcttactttcttgtcattttcgtttttaagacaaaaatgttttttattagcctcgttttctcgttttttttttgtttcgtaccctataaaccttaatttcccaatgtcatatgcttgtagttgggagtgttttagttattggtattttgattgttctcctttttatggtataacatttattttggacaaaaaaaatctaacaattttgattttgtgagtcattagtggtggattaagcaaaaatagtactaactcaacattttttatacgcattgtggtgatcaagtatcttcccatttattttgttatctttgattgtagtagacataaatattgtacaacattcatttagtatctaagctgctgatatgttaatttatattttttccttttcattctcttaaagcttatcaaacgtatcaagatcaattttggatttcgaaaaagcaattgagttatttagtttacgaaacccatgcatgagatgggattaatcaagttgagatgtgactgaaaggtagacatattacgagcttgagagtgccctttcatctaacattaatctactcactaatccttttttacgttgacccgaaatagaatatattatccatttgcaatcacaattagagctaaatgcatttgctaatgacatatgcagccgccgccttttaaactttggccttatgatttgagtttgaaagcgagaggtggtagaacagttagttctacaagccattgttgccctaattttcattaaaatagtccaccttttgttcaaattttagtggtcggtatctaatttcgatctaaataatcgaactcttgttacaagactggtgatttaattttttactaaccatttgtgtatatatgtcagttattatattaaactatttgtctcgttgtgaaaaatattaatggcatgcggagtagtcagtaatcagttgcatatataatatatttgttaaagcttaatattagaattgaaaattatgtcgacgtcaaagaaaataactgaaattatgtcttaactaagttttggaaatttctgatgttaaattatttaatttcaatttttgcaacgaaatgaccacttaagattttactaatccgtcaacaaaaataaaaattccttaaattaggaagaaaatattgattttaaagtttattttcagggcatgaaattgtaacaagtaaaaatacaatgatatttcttaaaaaatatatagttcagtttcgcaacgaaaaaacccgacatgatatcaatttgtttagagtctacatccattcccaagataatatattatgacaataatgtgatgtgtgagcctatatagatattatttcgatattatgtgagataactccaacaacaaaaggttggttatcactgaagcctattcatcttcggttaatagttctttaacccttggtgtcttagtgataacgacataaattgcaaatctatatacgcaacctgccgttggaaatattaagtcccggtacaatgttcttttatataatatgttgattgcctttgtcgacttccttcgggacatatatcaacatctttcttattctatttgaaattgacttagagatattgtattttacgtctatatctcttatatattcgaagttagtatctctcatctatttaagtttttttcttacatggtgtttaaatgacatctataactaaattttctaaaactatgtgcttatggcattctagtaatatattctgcacattagtcgtaaaagagtttaaagaccgaaacatactttggaattagaaacatgccatagatctttaaaccagccatattccaatcaattaaagttttgagtcaaaatatatagcactatatcactaaaattcatggctatcttctcttttgagttttgccaaaggcggctacaattcaaatccgtggttgtggctgtgtgacaaaatcgtgagctcattcgacatgatttttgttgttttctaatgggccttactaagaacatgtttagaagtctagcccaattcccttaattagcttgaatcgcatagtatataagggcctgttactttcttagaagtcaactctcctactacttacttatacaagtcaactccctttggtctgagactctgagtcgtggcagtaatgcattgcgagtacattattattgtgtatatattttggtttatattatgttgttaatatttgatttgataatgagtattcttgtttttatttttgtgattatcggattttaatttaaaaatgtttactgtatgttcagaccgtctttcgcggattttaaatctggtatgtgtgattgtaaagaatatttccttgtactccttgatctatcattgagaatcccggtgagttagctctttggggtgtcttgtccgatccatatatctaatccgaaccggtgcaatagaaatcgtggtccaaaacaagaaaacaaaatgtgacattttcatagtttatgatgatttgaaaaacaaaatcttatacgaaagccaaacaaaaataaataaatgcatgtaaacatagcatacaaaaaaaagtaacgtgacaattgacatacacaccaaaaaaaggaataggaatatgtggcccgtatattagtagttatgtgatatacaccactattttcttacttgaaaacattattttttaaaaacaatttcacgcacttcaaatattgtggttcaaaactcattagattttttaaaaagaaatggccccaaaataaaaaaacaaaatttagtggcccaaaaccttgatttagcctgtatccagttttaccattcatttatgatttttggtgagctaccttgtctcctatatatggaagaggctcaagtttggccagtctaataaacacacaaaaaataatgttttgtttagtttagtttagcacgagtatgattttgatattctatgtatgggtcgattaagatgattatcctttggtacacatatttttgacaatcatattagttatcgggtcttgtgttttgagattccaaaattagttaccaccgcccataaattctttccaatcatatcgttaaatattcatataaatcattcttcacatttcacttaagatgatgccaatccaatttgtgtagcacaagttaaatccagataaattttttcttatacttgtattttttaaataggcaaatgtagaagctaggcctcttaaaacattatgaaacaaagagtaataacgatagaatacataatttattttaatgagaagcctctggatatagtttatattttaataacgatttttaaactcagatcgaactatgcggtgctccaattaaaagaagtatcgaagaacgaatatttggcgcactctagcaaaaccggtcaccaggctggtcggtcatgttagcggcgttaggtatctcgaagtgccagagcctacctacggagttgaccttatacttctcacaaaggaactcattggcaaaagcgttctccactttgcggttaacgtcatgaaggaagacgtgagtcgtgccatcacctttccggttacgtgccatgatggccgaggaaaatatcgccgccatccttcctggcgcctctgggaagtacccttttggtgcgtccaccatgatcagatcccactcggtatcatagaactcatcagggagagaagtcaacgccaagggacacttttcgttgtagcggatcgggaaagctttagctggtaaacacatgggttcgttcttgtaagtcgagagaaggcggccggcctcagaaaggtgggtccggtactgaacatggtgggccctgagggatggggcgtccttgaggacggcctctatccactcaggatcctcttccaagaacacagttgtgccacctggattgagggaggcccacatgagggagtcgcggccgaggccaaagactagaaagttacaagggagacgctccttgaggacgtttaaagagatcgagatctcctcgaaagattgttgagggacggtgtgtgaagtggcgtagtggacgatggattggagttggattggggtggctgtgtatttggctatagacgcagctgtgttcttagccgtggagcagagtgacaaggtgttgtccgtagctcggatgaagcttgtgatgagcattgcgccacctataagaccagctagagccacagcgaggaaccatggccgctctagaagcgtttgctttgcacctttagacttgtcttgaatcatgtttggtttgctttttggggtttggcgagagaggctgatgagtatatggttatacaaggtgaagagatcggatgagaaagtggagaaataatgctaatggtagagtcaacgaatgtgaagcacgtccgtctcaatcattaatggcacgtatgattgatcgatcctcgttgttcttttaatctaatttactcacttctcttaaatatagatctcaactgatcaaatatagtttatttccattttaatgaaaaaagttttaaaagggtaatagtaaagatttatagcaatttaaattatgtaataaattatcaaattttgtaagtaaatttatgacaaaaaatatcatcatacaaaattaaatatcaaaagaaaagtgtactaaaataatgataaacatagtagataatagataattaaccatatataatcatatatactcacatatccaacttagtcattgcctgcacatacagaataaacctttcttaccagcaaacaatgaatgtaaataaaaagacattcttaagagaagaaagagatacttacccttataagaccctgctttccaacctcaatttctatcgtacactctgcttcccagcctctaattctatcgcaaatgtgtgatacacttgtccaaaacagcctcctcaccttcgtttttcacaacttactgcaactcatccaacatatctccaatctctatcttcatcccatgcttgaatagagatcgaattaccttagccttgctgattgacgaactgtattcatattactttatggtaatcaactaatggtattacaaggtgagtttactcttattatcatattcgcacctatatataaagcaaaaaagtttaattaacagcaagtacaaaagagattatcatatatgacaaacagtattacacaaatcacatttgccacaatgaaagtataaggaggctttctttaaaagcaaaaacatacctcatgatgtatactatttattaactaatgtgtttataagatgtataatttctatatgttatccgatttccatcctacaaatctacaatatagacaacaaaatataaaaaattttgtattacgaaaaataggcagaagacaagaaatattatttgactttttataaaaatatacaaactcttaagaatcaaatttattcaaagttctggaaaatctctttaaaatttttgtctgctgtttttctatattgtctgtgattggaactttcaatcttgaatttgattttaactctagacatgattacatatagctgaccaaaataatatattcatttgatgtaggttagatgattattttttttttaaaaaatcacaaaacaatcaacacaattttaaatttttaatagagttttggaagttcaagattgaataaaattaaagtccatttatttttgggtcaaaaacattaaagagttttttttttagctctttaaaaaccaataaatcttcttggtttaaagttttttttttttttttttcatatgagagtaaattagtatattttcatttttatttttctcgttaaaatataaaaacatcttgagctaatttcacctcctatttctcctaccgtcgaactaaatcctagggcacaggtgaaatcgccgagtgacgtctagccaccgcaccgcctccttctccggttatctcgctactaatcagactattccacagctatgtcacaggtaacaacactgcccactatattccttgttcccgtcttatagtgaatatcgcagatctgacactgaatcgtcaccggagctttgctttgtgattgattctatggttacaattactagaacagtatcgaatcattcaatttcttaatcagttttgtagatccttcctcgtatcgtttgatctggttttgattagtgtagttcttgacttatatttcctctggatttttaggtagacaacagaaattcatcagcagccaagcgtgctagaactgacggtatgacatttcttacctttgaatccatatatacccgaagatagtgtttctgtgtgtacattgtttccaatgtcttgcatgcttttagtagtggaaaattttatcctgtgtaacattggcaatgttgtgttatttcggttatattgagtctatagtcagtttctttcagcgtatatgtttataaagggtttttgattttagactaccaatatgaatagttgtttggtttattcttttggtcgtggataggggggcgtagagaagatgattggatctgcccaagttgtggcaatgtcaacttttcattcaggacaacttgcaatatgcgtaattgcactcagcctagacctgcagatcataatggagtaagttattttgtgttgcaatatcgaatatatgtctttctgctttgaaacagttttgtgtgcaaaacagtcattgacttcttggcgggtttagtagatagagctctttgaggcaaacatgtatagagacttaggatggtgagtagttttgattaggattttcaggtgtttgttatgaaaataaggaatgaagtggaagattagccttagtgctttgtccagtctattggcttttgtacttagattttgtttaaggaaatagaagagattctttcaaatctagaacccatttgtttgttatcttccaacaagagcagcaatacgaagattaccagtgggtattcagtttaaacaattatctacttagtttttgatgacctatttgttgcacgtctgtaacagaagtctgctcccaaacctatgcaacatcaacaaggtttctcatcacccggggcatacttaggatctgggggtccccctccagtatatatgggcgggtcaccatatggatctcctctctttaatggatcgtctatgcctccttatgacgtcccattttctgggggttcgccttaccattttaactataatagccgaatgcctgccggagctcattacagaccattacatatgtctggaccaccaccataccatggcggatctatgatgggaagtggtatgtatttttaatcagtttttggtgtctggctatttcccaataggtgtcaagtcttccatttaccatcattgtacctgtatctaatttggctggtgcattgttgggtttcttcttttgtcaggtggtatgtatggaatgcctccaccaatagacaggtatggccttggtatggcaatgggtcctggttctgccgctgccatggtatgtaaaacagtaagatgcttggttttgatcacatgcaagatcttataagtccttggatttgtaacatgagctgaaatcttttcacaatatatgcgcgcttctttgcagatgccaagaccaaggttttacccagatgaaaaatcacaaaagagaggtatgtgctagaagagttaggccttttcccattctagaacatgtcagctgtaaagctggcctttattttatagtgatagtcaacttgatatattctgttgtgttcttttacagattcaactcgcgataatgattggacatgtccgaattgtggtaatgtaaacttctcattcagaactgtatgtaacatgaggaagtgcaacactccaaagcctggttctcaggtttgtgctgcttttttttgtgtttgactgtcccgtagagcgaacatatacattattgtgaactctagggcactggttaattcagatatcataaaacagcttgcttaattaatcgtagttcgtagatggcttacttggatagatcttgggattattttcttgatttctgacctttaaactcttctaattgcagcagggtggaagctcagataaaatatccagtaagcccctaaaaatttagaaatattgcagcttacttgatgaactttgagactgacgtagggatatgtgttgtttaacagaacaaaatgcaccggaagggagctggaagtgtgataactgtggaaatataaactacccattcaggagcaaatgcaacaggcaaaactgtggagctgataagcctggggatcggtcgaatggatctccgtcccgtgcaccagaagagaacgatcaggtttgtaagatgtatctatgtggtcacaactgtttgttaataaaatgtttgcctctgaaactcgtaaatgtaacaacctgtgtagattttatgccttgtgaaagcagaggttatatgtttatgaaaaaattgactccgactacgtttaaattttttgaaacccaatatagagttgagtgcgtctctgaactgtgtgtttcaatttgtggtctgttccagtgagtcgtagacatgtttgggggttgagaagggtgagtctaatccagcgggtgtcgtaatgtcagtcaatgtctcgtcaggtcaggtcgtccatgttgctgcggtcgtcagtcaagttgcttctatgcatttgtctctttacttcccttgcgtggttgtggattgtattaataatgcaaaaattgtttatttactttgtcgtcctcgtggatcttgtcttgctatagaatcctcctccaggtccatactgttttacatcctaatcttaagtaagttggcacttatggttcattctttgtcactcacctggtcgtttttaccttattattaaaattagaaacacttggatacttttgggggggggggggtaatggagtctatctaggggttgcaactggttgttggttttagactaataaactaggtgattctgttgaaaatttcatcaaaacagtttatgtattaatgaaaaacatttctctatttctcggtcacaacataattgctaattattttcaactaaacaatttcttctatttgttattgtgttaagattactgttacatcgggattagacttatatagacctgagtagtaacgaccgatttacaaaaccaacaatttcatcaaagtgctttgacattaaccatattccaatcttttttttgtgtgcaacccaaccatattccaatctattctctaataattgctatctttatcattatcatatgggcccattaataggcccaacagagaaattcccgctcctgagcctgcatctttcccgcgcttttctcgacgaaccctttcttctttggctcacgaatagagaacggtgaagaagaagtagaatcagtaaaaatggaagtgatacgctctcagaagcgaacagtctccaacgacgtcgtttcaactcccacgcttcctctgtatcttacagctccacacatggaagtccgcttagaagagtttgagctcttcgccatcgatcgcttacgaggtttcaatcaaattcaaaccaaaatttcgctgctttcgtgtagaatctttctggggttttgaaaagttttttaaatttctttgtgatagttcttaaaggagtctcagatggattagctcgtgcacgaaaccctaacgaaatggatgatcttgtatgttcataaaaatttgatatttttagtgacacttttcagattttgttattcaaattcaaattctttttgattataggtagagactttgtggaaagaacatatgagactttcgaatgtttcagaaatgatcaataaggatataatctcgcattttgttcttcgtctcgtttattgtagatcgtaagctcttcttactcttgtgcctttgagttattgttttgtcttagattttagtttctatagtttttattctttcttgattttgatttttaagggatgaattgaagaaatggtttcttagcatggaaaccgcgcttttccgccatagattccggcttaaaaagattgaagaacaggtacttctgcctttgtttattgttcgatgagtcgtgatgtggaatggcgggtaaagtttgttttttttgttcccagagagcaattgtgggagaatttggactaccgtataaggcagtcataggtgcagaacttgaggtaatagctcattgtcctacaatatttcaggattgtggtttgcagaggtgaagaaattgatctttgaccatttgcagagtttgaaggagaggttggggctagttgcgcgttcacatggtcaaatttcttctgatggtaatgatactaactaaatctcagatcccttttttgtctcctagttgtggcttttgttctcgtcgtgcatgtgttgatgttatctgttaatattagtgtaacatagtagggacatgtaacatgttgtatttcgatccgatgttcactctgagccatttagcagtaaaacttgtaccttttctaatggaaaaattcttgtctttcttatcctttgcagttgaaaacatttactacaaggtaggtctgcctcatcttttgtatttgttcatatactacaagctacgaattcattttatctgatcaagtttcattttcacctgaaaaaggttccttttgaagaggttcctgaccttgtagctagtcggagagtattattacagaaagggtttgcctttgtagctggtactcaggtaagtaatgctttctatttcaatttgaaacaaaacttctcttatgtagatagtagtgtctctttcgtttaactcatatttccttatgtctttgagcagttggtttcccttgttgtcacacaatttcgatctcatctatcaaaggccctcattctaacaaacaggttattctggtttatatgaatatttaaaagttcttctcatatatgtcacaccttagtaacaagattttctttttgtttgcagaaagtggacaactaccattcgagaacgagaaaaagacagactaactccagtaagcacggacctgaaatcaatcaactgcttaatttcatgtcccatgtttccttaacttatcattgctctcattcagatcgtagaagcgttatctacaagctacttgggtcctgattattctcaagtgaggattgtcctttgaaacttgtttatacatttatagaattggaatcattgaagttgttaatatgtctctacagtcaaatgagtacgctgacatatcacttaaggatattgatcaagtttccaagagttccttccccctttgtatgaggcatctatttgaaaaagtaagctgcttcatggattgcaaatcttctattcttcattaattacataaactgctcctatgcaattgtaacatgtgaacgtttcacatagcttcgagaagatcaccatctaaaacatggaggaagaatgcaactgggtctctttttgaaggtttctccttaaacactactcccttgttaagttttgttgcatttgaatgcgacgtgatgcagatagattcacatctagatttgaggctagaagtaataacatttctattggtcaaacatcatagtaaataagccaccagttctttttcatgtttttctccaatttgtacctctttgaagttgtattgccatgtagggtgtgggtctgaagttggatgacgccttagcgttttggagagaagaatttacaaaaaaggtaatttgattcgctaaagtttctcgttctcctcaccctttttccatgtttttgtgtgtgctagcaaatttgaataactaagtaagtaatactgagctattagatgcatatttctctttccgtttttatcctcaggttggctctgagagatttgataaagagtatgcgtatgccattcgccataactatgggaaggaaggcaagagaacagtaagtacctaactgtcctttctaggccatttttttccagagttctcatctcttatttatgtcattgaaagtggcaatgatcagcttctgataccaaattcacattgcaatttcaggattataccccttatgcttgttcaaagatcatcacatctgctcctggtgctggggatcatcacggctgcccttatcgacatttcaggtcagttttctcagcaaaaatatgttctctttccctgaaagaaaagggtaaccgttatatattattattcaaatagtatctcttatccatcaccaacatctcatatcaacacaaccagcggctgaaaataatggagtttttgtatatattttgattagtgaacataagaagatcatctttatagagacagaaactccttccttggaattatatatataattatgtgtgcaaaagcgaatccgagcgcattgtagcttgcttcatttgctcagcagaagttgttgcctttggcctttgtctagctataaagagaaacaataattacatatgtgtagatgtgtgaatgattaggtgaatcccaaagtaatgtttctgatacattctgctgctttgatgacagtgaggataacctgaaagcagcacttagtagaatgggattgagttctcgtggtatggaagacgtaatggataaagtgcggaacagacattatcaggtgattaatcttaactaagacctcaaatctttttggcgattgtagcaataactaacatgctcttcttcatatgcatttatatggtaaagctcgcatgcaccttaacctttgaagctgtttatggtacatcatgtgatactggtatcaaccatcccaaccaatactttgaagaaagtcagaagattctgaaatccaagactccagctgctccggtttaatctccttatggtttcaatgtaatccgtgacataatattaaaaatttaaatctttaagttgatgccaaacctgtttgatgatagtaccatgtttttaaaagccaagcatacctatatcaagaaaaaaaaacattacgcatatgttaggcatatgcttccttttgttccaatattgtcatgttgtgcgagtttaaatcatgaacatgtttctttaactattcaaagaaatcaatgaaactgaagtgaatctcttactcacactatgactgacacatctatcctcgtgactttttaataaaatattcaactgtatgatataagatttgaccacaagccattgttattgtagttattatggttgttgttgctactactatcttagatgtacatttttgaagtggacaatgtgagtgaaggtgaatatgaagagatgttgagagtggagagaagtaagttctctgttgagttacgaaatttaatctcttggatacactgtaaaaaatgggaatatctagctagtaaccgcggttactaggcgaaacttctaaattacattagaataataatgtctattcaaaatattttggggtatatttcatgtttatttgtttttttctagaattttctcttttatttttttttacctctgttttttaagatgaaaatgaaaaaaattataactactaactttttaatatattaaaatctgtaacataaattaattagaggatgtacctctcattttgtaggtgaaccacttaaaattgtacatattgtttgttttttttttttgctcaaattgattttatgggattgggttttgatccaaattaatccttaaattacactttattaaatcacgtttaactaaatttgtatgagaaaactattttatccgtatgcaaataccaattctcaaagagttaaattatgtgtattttgaaatatttgtacttcaaatatgcaacaaaagagaggagagggtcaccaacatgtaatttattacatgaaagcaagaaggacaagattgaaccgaacttgacagatataaatgattaatgatgtaagttcttactatatttatatttctttgtttgcccaacatcgtacaaaagaaactgctagagaagataatggaatatagaataattattgatggtaggtgatcataattaaataggaagcattgaagatgacaatggaggaaaaacattcaactccatagtatatcgttaaatttatgaacaagctgttgaatcgagttttggaacattatttttcacaattttgggaaacattgtgattatgattcgtgaatgcggttgtttctctctttcaaagcataataattaaaagatagatacttagattttgaaagaatgttacggacgaaacggactaaattcttagtaaactagatcgtaacggattctatttttgggatgtacaataatttgcaggggatcaactttatttttatgtaaaagactaattgatctgtagtgaatttttttcttttaaaaagtacattactacaatagagtatatttataagtgataaataaaaatagtttaatcaataaacatatttatccgctttaactatggtaaccgttaaatttttttagagagctaataatgtcaaatgtatacgatatttaatttaggtgactttaaaaacttcatagatccaaagattaatcttcaggtccaacaaatctatgttaaattgttcgaacctcaatgaccaattttactcgaacccaaatagtagaaattacctctttttaccattgtaccaaagctacttggttcaacacaaaatatgtatagatcacatatttgttgctgataatttttttagtatatcaattcacaaaatagtaaataaagacatttaaaaaaatgcattaaaaataggacaccaatccaattttttttttgtcgatatatcttttgacttttgttacatctcaataccaccttttttattttgtcatgttcttgaataaaaccttatcacccaattcctaattcaagaaaatgctatgcagccaaatatcattttcttggacacttttttctcctttactttgatgtagattacacaaagaaataataacagattgtcaattgtaccctcaagtttttcacaggcaaattgtactacttttaatcgtcgtgccgacgtgctaatttctctacgtacactacacaagtcaaaagtcaaacgacaaagggctaattccgtaattgtcgtctaaaccaccatgatttcacacatgttaattttaatttattttaatttatttttgccgactccatagaaataaaatctgcgacactctaagatcatgccacgtgggtatcaattatagaagaactaataataaaatgagtagcgtcgcagaggataattcctttacctgtgacatagcaaccatcttcgtggctatctgtcggaaccctcctgctaatccttcagattctttatttcgtcagtccatagtcaaattattacaccttcttttgtctctatcttctcttcttctttgtctatcgtactggtttagcaactcctgtctgtctcgagctccgatccttatctctcttccgaaccaaacttgatctcatgtttgtcttgatagattgacttactctacttcaattcgtcaccagtcgttatgcaatctggtgagttttgaggggtttcttcattttcctcgaaagcatcaaactttatgtatttcgatgactaagactacatttttcgtttttttcttcttctcagaatatgaaattagtactctgtatcaagaagctcatagccgttggttgaaacctcctgaggtactcttcatattgcagaatcatgaaagcttgacgcttactaatacagctcctcaaagacctacaagtatgtttggttgacttgctttctgactttaactggtttggtttttgattcggggtttgatttgatgatcaattttggtaaactctcgtctcttaggtgggtctttgttgcttttcaataaaagggttcttaaattctttcgtaaagatggtcatcaatggcggagaaaaagagatggtagagctattgctgaagcacatgaacgacttaaggtattagagatagtgaacttttgatcttagatacttcttacattcttactttagatatgttggttgttcttaaggttgttaatgactatttgattgatgtgtttgtgaaataggtgggtaacgctgaggcattgaattgttattatgctcatggagagcaagaccctacttttcggaggcgtatctactggatgttagatccgtgagtagtcagaatgtactcatatgtgtatacaagttactcctgtttgtttttctcaaaaatgaagataaagtttattgctttctatatcagggaatacgagcatattgtccttgttcattacagggatgtaagcgaacgagaagaggtgacttctctgaataagcaaaatatttgttatactaaagctggaacctgagtttcattgtatgacgttatggctggcttaacttttcagggacaacaaactggtggacaagtttatcagtttgcaccaattctttccactcaaaatgtaagctacaatcagtacattggtgattcttcggacatatatcagcagtcttctacttcgccgggcgttgcagaggttaactctaacttggaaggcagtgcaagttcttctgagtttggacaggctttaaagatgcttaaggaacaactgagtatcggagatgaacatgttaattctgttgatccacactacattcaaccagaaagtcttgatagtctccagtttttagagtacagtgacatagatcaccttgctcaaccaacaactgtatatcagagaccagagaataacaaactagagagatgttatggaggcaattttggagcccaatacagtgccaagaatgattctaacaaactagagagatgctatggagggtatgttggtggagccgaataccattctagcaatctcatgctcgtaaagaatggttcaggaccttcaggtacgccaaagttatacagtattggtttcgatactcagttttttctttctatttcctcactagatgattttgatgctattcaatattcagggaaaatatttatgttcattcacttgagtttcactagtctgtctgagaaggtttcaatggtcattcattgactgtagcaaactttatggacgatctgtaatttattcatctatatgaagtagctttagtatgcccttgtagtcttgcttgtctcgtgtatgcgtggaaatgaagaatggtatatagtttttaggaagagtaagaagcaatctgtttacaggtggtacaggagggagtggagatcaagggtctgaatcttggaaagatgtgttggaggcatgtgaggcttctatacctcttaactctgaggtaactctctcatatactttgtggaatcaaacacggatgactatcttgtatctataaactatgaacagaaagaatcctaacagttacttcatacagaggaacacggtgaacgaaccatatgtgttatgattttctaatctctaatagtagtttaagagtagattttccaaactaataagtaacaattttccaatctagaaatttatttacttttcgtggaagcagggaagcacaccaagttctgcaaaaggattgctagctggattgcaggaagactcaaattggagttacagcaatcaggttgaccaatgtatgttatctgctttgctaaagaatacttttgggcttcgtatatagtataacagcggtctgataaaaagttcctgttgtcttaaatttcagctacatttttgttgcctcaagatcttggttctttccaacttcctgcttcttattctgcactggtagctcctgagaataatggtgaatactgtggaatgatggaggacggaatgaaaatcggtctgcctttcgagcaagaaatgagagttacaggtgctcataatcaaaagtttactatccaggacatatcaccagactggggttacgcgaatgaaactacaaaggtctaatctcttacacttacaccatccgtaatatttcgttgagacttatgtggaagtgcataaatgttctctcatggttatcttcttgcctggttagaacaaatgttggtgatcactgatcagttagatttttccgttttgaaatttcattttgacaatgcaggtgataatcattggatcatttctctgtgatccaacagaatctacatggtcttgcatgtttgggaatgctcaagttccttttgagatcattaaagaaggtgttatacggtgtgaagcccctcaatgtggtcctggaaaagtcaatttatgcattacttctggagatggactcttgtgtagtgaaataagggaatttgagtatcgtgagaagcctgacacatgttgccctaaatgcagtgagccacagacctctgatatgtccacaagtccaaatgagcttatattacttgtaaggtttgtgcaaacacttctatcagaccgatcgtcggaaagaaaaagtaacttagagtctggcaatgataagctgttgacgaaactgaaagctgatgatgatcaatggagacatgtcataggaacgatcatagatggcagtgcatcatcaacaagtacagttgattggcttctacaggaactgcttaaagacaagctggatacatggctgtcttcaagatcatgtgatgaagattacataacgtgttctttgtcaaagcaggaacaaggtattatccatatggttgcaggccttggcttcgagtgggcattttatccaatccttgctcatggagtcaatgtagattttcgtgatattaagggatggagcgctcttcattgggctgcacaatttggaaggtgagtagccgataaagagtagactaacagtctcatttcaactttgttgattcgagtagaaaatagtgtcttgatgttttagcatcataatttcataagtaaaagaatgttatcacttggtcacctgtaaaaaggagtttaagatggaatctttcttagacaatagcttcaaatgaatcaaaataaccaatactgtgttctctgctgtggcagtgaaaaaatggtggctgcccttatagcttcaggggcatcggctggagcagtgactgatccaagtcggcaagatccaaatggcaaaactgcagcttcaatagctgcctctaatggccacaagggtcttgcaggttatctgtcagaggtggcgttaacaaaccatctctcatcgctcacacttgaagaaaccgagaattcaaaagacactgctcaagtgcaaactgagaaaactttgaattccatctcagaacaaagtccttccggtaacgaggatcaagtgtcattgaaagacacactggctgcagtacgaaatgcagctcaagcagctgcaagaatccaagcagcttttcgcgcacattcattcagaaagcgaaaacaaagagaagcagctttggttgcttgcttacaagagtatgggatgtattgtgaagatatagaagggatctcggccatgtcaaagctaacgtttggaaagggcaggaactacaattcagcagctttatctattcagaagaattttcgtggctataaagatcgtaaatgttttctagagcttcgccagaaagttgtaaagattcaggtattttaacagctttagtgagatgaacatagttgtttcccattagcctttggcttctcgtgcagctctttattctcttctaattctggcaggctcatgtgcgaggttaccaaataaggaaaaattacaaagtaatctgttgggcagtaagaattttagataaggttgtactcaggtggagaagaaaaggagttggactaagagggttcagacaagacgtagagagtacagaggacagtgaagacgaagacattctcaaggtgttccgcaaacagaaagtagatgttgcagtgaacgaggctttctctcgtgttctatcgatgtctaactctccagaggctcgccagcaataccaccgagtgctcaagagatattgtcagacaaaggttagtagtttacaagagatgaatcaaagttataaatcatcatagtggacttgctcttagtgtttcttgtcacaagttatatgataataatgaagatgcttgaatatttgcaggctgagcttggaaaaacagagacattagttggagaggacgatgatgggttgttcgacatagctgatatggaatatgacactttgttttcattgccttgagaggggaaagacaggcaagaacatctctgtgaatttagaggtttaatagtgtctgtagattttgtgaagtttcaagagtgaataactgaatagtttagattttgtgaagttgcatgcaaagaagaaaacaaggaagagctcttgttagtagtttctgtaaatggtcttttattgggactaacttgaaaagcttaaaggctttgatgtgttggacaaggaaaacaatgtacatatacaaatttgtgatatcatgtttttttttttgtttcttaaggtgattttactgttgtgttttgtgttctaataaatagttagtcttataatttcaatccaaaagttaaggaatgaaatagtatgaatcttttttggtgcaaatagttcagtttgttcagcaaaaaatatttgaatgaatagattatttataattatttttttgttcaactcttttatactccctcattatcacaccaattaagaagaacattcaatgtttagttataaatgtactatttattcatactgaaccatttctcataactattaaccaatagtaattcatcaaaattttaaaattctcaattaatgatttttgaaattaacaatttattgataaaaatttaaagaaagtcaatatttttgatacaaaaataaaacctcagaaaatcattctttagtattcaaattttggagagaaatgagttgaatgatattccactttagcttttctaatttagtttttacgatcattcatttagagacgaacatttacatctttaatatttgtgttacggttattaaaacttgtttgttgtgaaatagtttgaagatttatttaattatttattatgaatctaaaatcattatttataataacataaaaattgcattatttgagtaaatgataaaaatgaaattttatctagctgaattaattttttgtcaagttgctattagttaattcgttccaaaatatctaaatcatgaaaatgtctaaaacattctccatggtccttccatagaaaaaaaaaagacgtagaagtgacacgtgcgtcaatccaaccgttaaattgacgcaaaggagaaaatttaatgattcagcaaagtttttttgttgtcttgtctctatcgaacccaagcgcactttagcaaccaccgccatttttcacagatgcttctcattgacacagaagaactcagaagaagtagaagaagaagcttctccgatctctcttctctcatctcgatctgtatgtgttcttcttcctctcgtcttctttctctatccagattctcaacaattgttcgtgtttcttcgctgtatctaacgatttagctctcctctctctgtgttcgtcgaacgattcctaatctgaatcatactcagtgaaatcaagcgatctagaagaatctggcaaaatcttagctgacgaatgttgggattgcaacgagaaacatcctcgatgtataagagaacgtcatcgagagattattctccgatgatcgacgtcgaagacagctcaggtacgcacgaaacatgcatcattttgtagaaacgagtttcaaaaattttaactgatgaaatttcgaatttggcttcaggtcttttagagaatgatgtggacaatgaaatggaaactacaaatccttcatggaagtgttctcttccgcatgttctagtggctacaatttcgtcgtttctatttggttaccatttagggttggtgattgattttagcttttcttcttgaatattgttgtgattacttgtgttgagctattttttttggttgctacagagttgttaatgaacctcttgaaagcatttcgtctgatcttggttttagtggtgatacattagctgaaggtattttcattacttctcctgcttagtatttgtcatggcagtggtcatcacatgtactacttttataagttctgttttcttcttatgtgaaaggtttggtggttagtgtatgtcttggtggtgcatttctcggatctttattcagtgggggagttgctgatgggtttggaagacggagagcttttcagatttgtgctttgcctatgattttgggtgcttttgtgaggtaatttgggaatttcctcctatctctggttctttgctagtgttcctttaagctagacttatgaattggtctagatagcactgatacctgcaaatatcaagtgactgttctactatataaatttaccagaagtctcagggttacaacatgttaggtccagattcgattctctgtttcatttctctaagaaagatgtacagtgctgaattatgataaatcttgcagaccaaatcaaataaccaattaagcttaccagtattccaatcccactcactaatgtatattttgatgtggctcatatcaaaatattatgatcctttagcaagagttggcctcgtttctactagtttggtttgttgcttatgctaatatgtgtttctttcagtggagttagcaacagcttagctgtaatgcttttgggaagattcttggttgggactggcatgggtcttggaccacctgtggcagcactctatgtgacagaggtatatcaatgcacaccgaatatagaacttactctacaagaagtttgaaaccgcttgacttcttatgcaaatttcccaattttgactaggtatcaccagcttttgttaggggaacatatggaagcttcatacagatagctacatgtctgggactgatggcagctctgtttatagggatcccagtccataacatcacgggttggtaagttactatcacctgttgtagagtcttaccatactcttttgtagaatcaactttttgtaggactctctatatcataatttaatacgttttgatcatatatgttgttatggtacccaggtggcgtgtctgtttctggctttcaacgatacctgctgcactactcgctctgggaatgttcctctgtgctgagtctccacagtggctattcaaggtctgcttcagaattcacatcttagattttacaattttctgtcgtatgctgagctgaaaattgcactgaattttacattagagcttctttactttccttttgtcatcacttcttttgaacgctcatcatcttatgcagcaagggaagatagctgaagcagaagctgagtttgagaggctgcttggagggtctcatgtgaaaacagcaatggcagaattatacaaactagatctagacaagacggatgaaccagatgttgtgagcctctctgagctgttatatggtcggcattcaagaggtatgtagaactctttgcttttgtcccgcggaaggaactgcaaacatgtatgttgattgttgtgtctatttgtttcctgtatagtactttgttattcacttgttccttttgcagttgtttttattggatcaaccctgtttgctttgcaacagctatctggtataaatgctgttttttatttctcttctaccgtattcaaaagtgctggagtaccatcggacctaggcaacatatttgttggagtttcaaacctcttgggtacagtagccttctcctccactttttttttttttctgtcttttcaatcatatggatcttggattgtaacattgttctgattatcaggatctgtaatcgcgatggtgttgatggataaagtaggaagaaagcttcttctgctttggagttttattggcatggtatgttgtgttttgcttcctttccatttttcttattacctatgctgatatgattttagcgtgacagcccacctatgttttgatgtatattaggcagcagcaatggcacttcaagttggtgctacaagttcatacttaccacatttttcggcgttgtgtttgtctgtcggtggcactcttgtgtaagtgtttattgaaaaactgaaatatgtttacccataatttgtttgttctaaacaaaattgtcatttctgatacaggtttgtgctaacattcgccttaggagctggtccagtaccaggtttactcctccctgagatcttcccaagtcgaatcagagcaaaagcgatggctttctgcatgtctgtgcattgggtaacaatagtaaactcgttgattttatcatcgttgcgttttcgttcctaaggttgcttaacattgttgaatcttgttggacaggtgataaatttctttgtgggtttactctttctgagattgcttgagaagcttggtcctcggctactatattcgatgttttctacgttctgtttaatggcggtgatgttcgtgaagcggaacgtgattgaaaccaaaggaaaaacacttcaagagattgagatttctctactagccaaaccatgaatgtgttttcagtctctcatcttgttggtcactgttgtataatcaaataaaaagattcgagttttcggtagagttcgttaaatgttacatttcacgtaaactaatcaatttcaagatttgaattattcttattgtctctattagaaaactcttgggtttaaatagtcacaatgatacaggcatgtaagtgccaggcaaaatttcaaaagtgtgactaaagcatacatcaaaatcttaggtagaagctttccactttatataatctcaaaatcttaggtagaagcaaacataatctcaaaatcttaggtagaagctttccactttatataaatgtttttttttgcaaaatcattatgttcaaatactatatttttgggtttacgcaacaaatttaacgctgtaagccaacgtgagaaaaagaaaaaatatagccctatcatttgtttttcttaaagaaccaccatacaaaatgaaaggcaaacgtatagaggaaataatttgccaaccactcattccaataaaagaaaggtcaaaaataaacacaagccaaactattcccaagtatataaagcaatgttcactagacaaaccatcatcaaccagtttaaccgtagacatcattccttattgtcccatccaaatagtaaaaaaaaaaagaaaaaaaaaataaaatgaaaaagtcaacaagactcttatggctattatccatcattgttttggtggcagccgtttctaaggcagtcgcagaggtagacaacgatgatgatgacgataatacttcattggaaggcatgacgacggctaaacgtgaaaccctcgaagttgaggatcatacttcattggaaggcatggttaaacgtgaagccctcgaagtaaaaccaccaaaagctggcaaaggcaaaggcaaaggtaaaggtcgtggcaccgttgccgcaggacctgagatgaattggcctggacaatgggagttattcatgaagaattctggtgtttcagccatgcacgcaattttgatgcctttgatcaataaagttcagttttacgacgcaaccatttggagaatttcacaaatcaaattgcctccaggcgtaccttgccatgtttttgacgccaaaaaaaataaagttgattgttgggctcactctgtcctcgtcgatattaacaccggagacatcaagcctcttgcggtaacaaaattactaattattactccctccgttccttttttatataacgttttagttaaaatcacgcagattaagaaattacaaatataattcattttacacattagtaattgttgatctgatggatttaatggaaacatgacagcttacaacagacacatggtgttcttctggaggtttaaccgtaaacggtactttggtaagtactggaggattccaaggaggagcaaacacggcaaggtacctatccacatgcgaaaactgtgtatggattgaatatccaaaggcactcgctgcaaggagatggtactcaacacaagccactcttcctgatggaactttcatcgttgttggaggccgtgacgctctcaactacgagtatatccttccggaaggacaaaacaacaagaaactctatgactcacaacttcttagacaaacagatgatccagaagaaaacaatctttacccttttgtttggcttaacactgatggtaacctcttcattttcgccaacaaccgatccattcttcttagcccgaaaacaaacaaagtgctcaaagagttccctcaacttcccggtggtgcccgtaactaccctggttccgcctcctcggctcttctccccatccgcctctacgtccaaaaccccgctatcatccccgctgatgtcctagtttgcggtggtgcaaaacaagacgcttacttccgtgcagagaggttaaagatttacgattgggccttgaaagattgtgcaaggttaaacatcaatagtgctaagcctgtatggaaaacagagaccatgccaacgtcacgtgtgatgagtgatactgtgatccttcctaatggagaaattcttatcattaatggtgcaaaacgtggctcctctggttggcacttagccaaagaaccaaattttgctccactcttgtacaaacctaacaaacctttaggccaacgtttcaaagaactcgctccttccactatccctcgtgtgtaccattccatcgcaatcgctcttcctgatggtaaagttctcgtcggtggaagcaacaccaacaacggataccaattcaacgttgagtacccaaccgaactccgcatcgagaaattctcaccaccttaccttgatccagctctagccaatatgagaccaagaatcgtaaacaccgcaacaccaaaacagattaagtatggacaaatgtttgacgtaaagatcgagcttaaacaacaaaacgtagcaaaggagaatgtaatggtgacaatgttggcaccatcatttactacacatagtgtatcaatgaacatgaggttgcttatgttgggtattaacaatgtgaagaatgttggtggcgataatcatcaaatccaagccgttgctcctcctagtggaaaacttgctcctcctggttattatcttctctttgccgtctacaatggtgtccctagcgttggagaatggattcagattgtctaattttgatatgcatatattatcaatttattttttgaaacgaaacctatataacatgtttgtaaggttaattttttttctttatacttacatgtatatattctttgattcttgtaattattatattttttgaataaatgtttttttgatagatataacaaattggagaaaattgtcataatgaaatcactatatagaatggttatttattattttatattttttcaacagtcttgtagtcctttattaataaatagtgttacttatgacatttattttccaacatcgattccattttttattttttgtaagtaagaaaaaattcatttcattttaacattacaatacaaaatctaaatatataagttccaataaggcagtaattaactaattaatcatttaactaataataattatgtctaaatatcacgaatcgttcaattttttgtttttgtttttttgttttgtttttttaatgaatctccaaaataaaaaagaataaaaaagctttatctctagtctctaccgttgtcgtcacttaatctccgacggaggaaaagtagccaccgcttgacgaatcattcatcaacacacgcagagagctctgaatctcgaggaagaagatggtgaggatcattcctatggctgcttcctccattcgaccttccctcgcctgcttctctgattctcctcgcttccccatctccctcctctccagaaatctctctcgcactctccgtaatcatcctcctcctttcacatatatcgttgactacacaatatagatacaatcattctccaattgattagtgaattctagaactagggttgttttaaagttcccaaatttctggtttatgattcttgttcaatttgtgttgttgcagatgttcctcaatcacagctttttggtttaacttctcataagcttttgagaagaagtgtaaactgtttaggagttgctgaatctggtaaagcagctcaagctactacacaagatgatcttctcacctgggttaagaatgataagagaagaatgcttcatgttgtttatcgtgttggcgatatggaccggacgataaagtacttcactttggctttcctgtgatatggctttgatgttgagtctcttaaagtcacattaagtttaaaagaatcatctgattgctgtaggttttatactgaatgtcttgggatgaagcttctacgtaagcgtgatataccagaagagaagtatactaatgctttccttggttatggaccggaagattcacactttgtgattgagcttacttatagtaagttatatctgtatcccccttttatgctactgccaagactctgagtattgtagttcatttagctctagggagctcaagactatgcattttatatttatatggttggcttagctttcttagtgtaattttttttacagattatggagttgacaagtatgacattggggctggttttggtcactttggtattgcggtcgatgatgtgagcttctacaatctatatgcaattatgttctttctttgaaacagtgtttgatgtgtatggattttactctttccacttaatggttttatatctaagaagtgaaaatttctttccaaaaggtggcgaaaactgtagagcttgtgaaagccaaagggggaaaagtaagccgggagcctggtcctgtcaaaggtggcaaaactgtaatagcattcattgaagatcctgatggttacaaatttgaactcttggaaagaggtcctacaccagaacctctttgccaagttatgctccgtgttggtgatctcgatagggccataaagttctatgagaaggtgattcctatgaaattgttttgagatgtggtagtttgcagcctgacagtaaatgtttgatctgatatagtttctatctcttttatcagaatgcattcttatcctctgatcatgtgtgcttcctttctttataggcttttggaatggaacttctgcgaacaagagacaacccagagtacaaggtaatttgcaatgcctcacaaatctaattcttacttatgcggccttaaccttccattgtatatatcggttatatgtttttgtataaactcacttaccgtaagtggttatttgcagtacacaatagccatgatgggatatggtccagaagataaatttcctgtcctagagctgacatataactatggtgtcactgaatatgataaaggaaatgcttatgctcaggtaaaagaaaattgacattccgttcgtctatattacttttcaactggagggttgcgatagttttaacttgtttgcttgtatttgattactatcagatagcaatagggacggatgatgtgtacaaaactgcagaagctataaaactctttgggggaaaaatcacgagggagcctggtcccttaccaggtattagcacgaagatcaccgcgtgtctggatcctgatggttggaaatcggtaagatattggtgtgtagagatagattcatattgatgcaaagagctctgaatgtctcgttttgagtttcgacttttggctttacaggtatttgtggacaacattgactttctcaaagaactggagtgagaggagaaagcagaagagaggcaacaaatgcacgaaaatggcttatgagggagacaggaggagaggccttgttgtgaattacatcagtttggggtttgatataatctctctcagtgctgaatatttttatcaaagtgaatgatttgtttttcagaatatagtgtagttgtttaatttacagtataaaagcctatgttgcgtctttgtatattagttccacttaacattaattgccaataaataagatgataagtgaatgatattcaagaaaaaatcttatgcctagtccaagttatgaggatccttacactagaaaacatcgaagcttgacatcaattcttgaatgtcatttctttttcttcttaattttgtttaattcgggattttatttacaaaaaaatatgtatgtgtagattaaacgggctagattttagtgatacaaaaaatttgtgaattagataatcttttgctgaacaaaaaattaccttagacgaagcaaagattgaaacatgtcaaacgacatcgtataatatactaaaggattagcgttagataaacttgtatacgattttataaaactagaagttaacctaaacaacataaaattaaaatatgccaaacgacatcgactatactaatctattcgacatcgtttgacatgtttcaatttttatgtcgtctaggttaacattcttgttctataaaaagatcatattcacagctttatgtatttatatccgccgtattgtttttataacaatatagcgaaaacacatatcataaagaaagtttagattttttttatcgcatcaatgaagaaacctaacattcagttgaattattttgcaaaaggtatgtgctaataacagtttttaagatattttatattcagtcgattttatttatgattttttaaatatttgcatatgtttttggttgtcttattattgaatactgttaatccttttatattattattagtttgattgcttgatatttatgttttgactcctgatttttccaatgaaaatataacataattcaaatttagtataaaaaactttatctaaatttcatataaaagatttcaaaaaaatcattggataaatgtatatcatctttagaggtggaaaaatatctgaaatcttaatcctgtttgaaagatgatatatgaaacttacggatctggatctaattctttttctattgaaaaacaggatattcagatccaacttggatctactcccaaataaataatttttaatatatatgtatgaaaataataatttataaatacatttgttgaaaataaataaaattgtgtggtagttttaaccctgatatatatgttttgttttattgaaaaaattgatttatttttaatgataatacaatttttttgtaattttctaaaagttaaaaaagagggaaaatatttttaattgttttccagattatccatttttgtattgttttcaatgctcttattggcctataatttgggatttgtagaaacaaaatcttttttttttttggaaacaaatttccataacaaaacaaaaagttgattagagagtaatgaagagatatataaggaaaatttggagaattgaattagagaagactagaaaacaaaagttagaagtgagtgtggaatttgagaggtgtttccctctacttacataataggttaaaatttctaagagggaaaacattttattcaaaataacagtgtgttttccattagctattttcagatttttatccttttatttgactcatttgtagtttatgttaaagttctaattggtctaattttagggatttgaagaaacaaaatcttttatttctgttttgtaaaggaaattagcataatgatataaaaaatagaaattgactttgactgaaattttaaataatataatggtgaaatgaaaataggtaaaaacatttatttgacttctataataggaatggtagtataataattaagaaagaatcattatattatgcaaaatctatgaactgtcatgtaacctacttattgttttggtcaaatcatgtagcagtttgtggtgatttgattttttctttattctaaggattgttttcttaattattattccaccatcctattatagaattttaccattaaagaaacaatcttaagaaaagagaaaaaatataatcaccattaagtgctacatggtttgaccaaaaataagtaggttacatgaatgtccatagattttgtagaatcgaaaatttctttcttaataattattctaccatcctattagagaagtcaaatttttttttccatgttcttcatttgaccattataatatataaatttttagtcaaagtcaatttctatttgtatttcatttgctaatttactttacaaaaagaaataaaagattttgtttctacaaatccaaaatttataccaattagagctttaacattaaatagaaaaacagtcaaataaaaagataaggatctgaaaacaactaattgaaaacaaactaccatatgaatattttttttttcccttttttgaactttgagcctattatttaagaagtgagtatggaaacacctctcacattccatactcacttcaacttttgctttctggtatcttctctaattaaatacttcatatattcctcctaaagttgcttcattattctctaaccctttagttctttaaactctctattatttcgaaaagtccgctttctacgtttttaatttactgttgttatggtgagaaagcgtgaaaccaatcccggtgttagagttgtcggaaaaagaatttatgactcccaaaatggcaaatcatgtcaccaggtaaaacataattatgattctcgattttcattctttaatagatgataaaatttcgtttccttttatattaactaaaatgttggtttgtttctttgtagtgtcgacagaagactcttgactttgctgcaccgtgcaaggcaatgaggaggaagaagctatgtcccataaagttttgttacaaatgcttatcaatcaggtccgttttttgtgtttttttcgattctttaatttattttttctgagactatgtattcttattatgtgttttttatttgaatcataggtatggtgaaaatgcagaagaagtagcaaagttggatgattggatatgtcctctgtgcagaggcatctgcatctgtagtgtatgcaggtaaactacatgtctttaagatttgagttttatcaatgtaagaaagctttttttgttgaatgtttgtgaggatttttcagaaaagcccaaggactagagcccactgggattttggcacacgaagctaaagcccgtggatattcctcagtctatgcgcttcttgaagctgaggggcatgataagtttgcttatcagaagaaaccagaactggtactgaaaaaaattatacaaatcgtggttttagtgatctttaggtttcgttttttttttattatgcttacttgatcaatacggtttctgtaggtttctgcttgcaatgaaggtagtagtagcaatagtgaatctgttccagggacagaagtgggaatattaggtgagaatataagatttgtgtttgtgttttgtaaggtgtcttatataaagaagagactaacggtttttacggttatgaaacagatgttcccaaggagaagaagaaagtggtggacaagaggaagagagccaaacccagtgacaaactgaaagaggagattcagcttgaggctcaacttcctgagggtataagcttgacttgtgtttcacgcattgatataccaactgaagaagctggaaatgtatgtcagcttttcgagttttgctcagcctttggaaaggtatagtattttctctctatagcttgataatcaagttatctatagatatttactcttaatctgatactttttttacttttatgataggcacttgctttgaaggaaggacatgctgaaactattgtccgtgagctgtttatatgtgggcgtaacacaaggagacaacaatactgctctattactcagatgatgatccagttgttggatttaatatcaaaggatagagagatgtacgagtgtttatctttatgtcctgaaatatatacattttcttctcctgtttctgatgtatttgaattcattataggtctttgtctctaagtgcaacggacagcagttggttcacggctataggagagatcctatcgaagtcagaagttttgagtgatgagctcccactagaaacttttgtagggggtgttgctgcgtatgagaagatgaatgcatcaagaaagctcaagcttctaaatttcttatgtgatgaatcacttagcacatggtatgtgaatctttttatgccagtatcaactctttttttttgtagttaatgcttcgttaacttatgtgtgaaattttactagggcaatgaggaattacataaatagccaaactgaagagtgtggagaacggaaaaaggaagctaaacaaaaggctgcagccgcaaagcaaaaggtatttttgaaaatatgttagatggatttgtttttatataactctttgtgctaaagctcgttttgtctttatatttaggagaagcagctcaaacagaagatgcaaggtgaggttgccaaatccattatggagaaaaacggagctccattgtctattgaggaacacaactcaatcgtgtctcaaataagagatgaagctaaagaagctcatgaagaaatgatggaggcaaagggcatgaaatctaaaagtaagtctaaattctttgagtcttttgtttttgtctaacgaatgttatcttagatattattttgtttgacatggtgaaatctatctgcagtgacgcttatatgtgatgcgcgtagaacggaaccaatcatgttggatgataatggttttgttctctggaaattgaagtgttttgaagaagaacaattttttttgcttcaaggtttgaatttacttactctttgtttatgtttcttatattcaaatgtgtttagtaatttaatctccatcttatcaatgcacagatctaggaacatttgatgatttatgtccacatgaaagatggttagcttttaaacctgagcagaaaccagagatagagaatatatctcttgtaagaggtaagtcattcttataaagaagcaattaacaatgcgatatttggaatttgtaatggtgtttgaacatatttttgcttttgttttgtaggaggaaactgatgcaaatacaaaagaatgaaaatccgaaaaagaatgcaaatgcggaagcatcagaatcatcaccaaaacctaaatcaaaactcgagttcatcatttctgaacaatattgaatttttttttttttgtaactttgatatattataataactaaaaagtagagtatgtaaactttcagaagtctgaaaaagttaagtaatttttgttttctctttgggtcttttatcttctctggttcagttcggtttaattatattgcatcgattttaactgaccatggtcaaatgttttggtttaattaatgaaatttgaaaagtgaaaactgaatggagctcatattgcgtatttttgtggtgagcatgaaaaatctagagatcatttttttttggcatgccccttcacatacattactttgaaaaatctaaacattttttctccaaatcttatatgcatagtcggagttacaaggaattttgcactaaaagtatctactttgaaaaattgagaacatgatatcaattcttaaatgtttttcttttatattattttattttatttgattaagtattttatttattgtagaagctatgaaaatgtatgttaaggtttatggatggatgaatcccaatagaaatagaaatagaaattataacagtctttaagttagttattacatcaacaaaaacttaacttttagatgacataaaaaatagagaatatatcaaacgacatcgtataaaatatttttatacgacgtcgtgtgacatgttttgatcattttttcacttaggttaaaattttcttctattaaagatcaaactcattaactttagtatgtgtatccgctgattctcctaaaaaaaacattctgaaacatatctagaaaatttggtgaaatttctattgtcaacaaaaataattcagaatcgattaaacaatttgtgaaaggtatgttctaatgaaaaaacatttgtgtttttttactttcatttgatttcattttgagttttccaaatattattataatattttggttgtttttatcaattattctctaattatctcttaattacttcttgttaaattgtttgttttcttttctaatgtttgattgtttcatccttatgtcatgtttaatcatcttctatataaaaccttctcaatttttttttttaaatctatcatctttagaggtgggagaataatatctttgataccccgtccaatccacttcaaaatatagatatatgaagttttttttattcaaattaaatttctccatatacaagttcttcctatggatccaaaaaaataataatttaagattaggatatccagatttgatttgaatatacttccaaatatcattttttttgagatatatgtaagataaataaaactgttctttttcagtttcttaggaaaatgtgtggtatgtttagaataacccaaataaatgttttgaaaataaattaagataaattaaatggaatttattttccatttattttacaaaataagttttttctaatgaattttattattttaatttatcccagtttctacgtatttgagatcttgatactcgtctatctaacacgagtaatgtcttttggcggttctaaattaaatatttgaaatttcaaagcgtagctagggtctgtactctatacccaactctagttgttcttcaaaatattttatgtaattccaaattattactaattatgaaagcttacatagtttgaacaaaaacaaaagtgtataattaattaattatataaagaaatataatttttcaataattaaaagatttgttttaatatattctactaccatattatgctagtcaaaagatttttttcatagtcaacaaatattatatttctaattattctaccataatattatattagtcaactaaaagatttattatctttctcattttatcttttttgtacaagtttaatttcagtcaaacataaaatttggtaaaatgagaaagaaaataaatcttttagttgactagtataatattatagcaaaatagttattgaaaaaatgtttctacaaattttataaatgttagaataattctttctaatgcccttttcatgatgctccttttcaactctaccctttttaaatttttaatgaccattttacccttatttggaaattgtttttaggttaacaaaatgaaatattaatatttttttgcataaaatattccaaaatagatttcccgccgatattttcctgccaaaaattttcgaaacaaatttcccgccaatttttttttttttggcgggaaatagattcacaaggaattttaaaagagttttaaaagatttacaagagattttaaagggattttataagatttacaagggatttaaaaagggtgatttacaaggaattttaaaaggtttttaaagatttacaaagttcttttaaagatttttaaagggtttaaaattgttttaaaatgattttaaaatatttataagggattttaaaagggttttacaatatgtacaagagattttaaagggctttaaaagatttacaaaagatttgtaaagatttttaaagggtttaaaagtgttttgaaaaatttacaagggattttaacacctttttaaattacttgtaaattttttaaaacccttttaaaatcccttgtaaatcttttaaaactcttttaaaatctcttgtaaatcttttaaaactcttttaaaatctcttgtaaatcttttaaaacctttttaaaatctcttgtaaatcttttaaaattcgtttaaaatcccttgtaaatctatttgccgtcaaaaaatatttacaaggatttttaaaatcattcttttggctgaggaaaaaaatgttacgaaaaaaaaatttggcgggaaattttttttttggcgggaaattatttttttttggcgggaaaaaagtttggcggatactttttttttggcgccaaaaaattggcgggaaaaattcagtttccaattacatgtttctattagatgagggtaatttggtcattttgttcaaagaaatgggtatttttaaaaatggataacttaaaaggatattgttggaaaaaggtagtaaaaaaagggtaattttgcaaatcttcctaaatgttaccaatttatatttttccccttttttgaattttttactgactacttaagatgagggaaaatcactacattattcaccattctaacttttgttttctctatcttttctttgagtttcaaaattttcattttaaattgtctaagattgagcttctgtgtttttcttaaattaaatgcttgttctccttgaacggtagcttgtgtgcgagagtacttcacaattggaagtttggaaaatatgtatgcatgtaaaaacatgtaaagaaatcaaagaatatgggtactgcaaagaataaaattgcaaatattgccaaacaatgtttacaatcaaaggatttgaagggccaatttgatagctgttatcatatgttaattttgtctttcaaaatctttgattatattattgatcggtaacattaacacctttattttttgtaaacatattctttgagttgctttgcgtccttttatatgcatatgtgtttccaaagttaccggttatggagtagtcaaacacacaagctgccgcttaaggatctaaaactttatcatttactttattttgataatttgaaattctcgtgtagtttcattaattaacccattgagtttattggtgcacacttttagagttgagtcctcccattattattttttaacccaaatgtcaatgggttttgggttaacacatattggtgattatattgtatcatgtatcctcaaaatccaaatgttaacacgtatgtatatgcatataaaaggacgcaaagcaactcaaagaatatgtttacaaaaaataaaggtattgtatcatgtattgtatcatcaataacatattggtgattatattgtatcatgtatcctcaaagtccagtccattgtttggtaaatgtgaattacccccatttggtgtttatatattaaaaattaaacggtttatatttaaagcgagagatcattaagttatcgttaaattttgtttttatcattttttttgttgcttcaatttttcttcttgtttttgtagaaatttccgggcatatatatatatatagtcctcaagttgtttttatgcattaaacacttcaatataagtacagattgacttctattaaacgcgactaagttgacagtgattatggtgcaaagtaagaatataaatcactgtatcaaaaaataaaataaaatgaagtaagaatataaagtggaccgtatgctagttagggatatgtaaatcgtggctctatgataatttggcaattagaatgtatttgcttatttgatgtatttgttgtaccttaagttaaactgacagcaacaaaagcatacgaaagtgaatcgggttcaaaaagaaaacacagaagatgaatcttgacataggatcaaattagcggatcgaataaggtaccctatgtttgattcaccctagaaactacttcataaacgtgtggaatatcaacagtgttcatatggctcctcatggtcttatgatttattggatttcataacctattgacctgaaaactagttaaaaagaaaagtctctaaaaccttgctcgaagctcatagtatccgcagaaccagattacctgacataaaccccctagtttgatttgtctaagtaatgtaattaacttgaaataataatgtttgacgtaggaacatgtataaaaaataaaagataaaaaaaaaaacaaaaaagaagaaggaatatgtatcacaaataattagactcccaacaactcgttatgactcaattatttataataattaaaaagattatctaacaagaaatataaagtccattgtccaccttagaagaggcaaagagcatgcccttcacgggattatcacatgtcgaccggtctacttccgtacattacatgttttataaaactttatgctttgtaacatttagtttatttcctagtaactaattaaacgattattttatcccattaagattactttcaccctttgaataacctatagacgaccctacaataagatgaacacgtaaagagacaagaaagcttaggatacttttgtctggatccgagggttcgaggtaatgcgataagtttaatggcattgtctcctatttatcatatcactggggtttttttatgtccccacataacatggttacaaccaaatttatttattttaaaataaatcttacatatctaatcatttttcacatatttttctatatacttatcaatggtatgtatacaaaatttaattatgcgggaaaggaagaattttcaagaaactttcttaaaattcttttgatctaagacgccatttctgtggtaaatttgagataagttatttaccagttaattaaatttgaattatatggatagacatagtaactcatatataaaacatgacattgatccactaacaaaatgttctactcttcgtagttttctcattattcagagagtatcacatctcttgtatttgactttagcatattaaatttttcattttttattatggagcaaatattgcaggatacaattccaatcccacacacaaaaacattaaataactagttaagttttttcgaattaacatactaataatgaactgacctgaagtctctaattagcaacggcaaaccggttaataagttgaaagtgacaagaaaaagtacgtaactttttaaattaagaaatgttcacttatcagtatactatccagattaattaatgataatcaacttgaaaatctttggaaattggctttgcccgctaggcttagtgtgcaactaatcacgtgcactgtatctaatccatttgaccatttcgaaattatcattatacattcttaaaccatatgggtaatacacttcatctatttgtattgatcaaaggaatattttggatatctatcttttgagtgttaaaaaccttagacatccacaaagctcgaactcttttaaataacgtccgtatcaaaatgtaattctatagagcgtagttttttcttttctttttttaacattcaatttttaagatgcctaaaatatataattaaaaattacaaataatatgtataatattaactaagaaaatatgtgaaacgatattttggattagagatagatatccatgccaaagtaatatatatcatgattcatgagtattattaagtcattttccgtattcaaagatgagatttttgctatcctaaaattcaagataatatgatatcatacatgattgaaaatttcagatatttgtccaatcctaattaaatcagcctttaaaaacaaaaatgaacatccagcccacaaaatggggtatttgtgtctcttcattttgtatatatgtgtgagagcttcttctttttttttcttcaaagtatatataatatatatgtaatttgtagttgaatatatataaaatatataatgttcagatttactcctactggccaagaaattgaaatcatattaaaaagctcaccggattataaattgtattggcaagtctatttagtgaatcaaatgttgctcttttattaactatgctctacagaaatgttgctattatcattcataatggatccaacacacgatgaaaatgacagcttccaaatcatcaattacaagagaaaagaacataatgcgcgtggggttgcttagattcctttgtaatcttgttacttcttagaaatgttgatatggcatacccttaattaagagagactttttttagtttcgaatttaaatctcaagttcttttttaataaaaaaagtaatgatatttaatgcatgatgagagaaagcatgggataaagtcttcttgttacttatttatatttctttccatctatcatggggataatgtatacatatttgcctacctacatagtatatatgcatgtatgtgagtatatataagttaagtctttctcactttgcacaacatctctatgtgctaaggcatctctttctctccctttctcaccaaatactctctcaatttctctctgccactctctttctctagagattttcataatgaaaggtaccaagaagaagacgccatgcaacaaaaagcttggaggatacttgaaagagcaaaagggaaggctttacatcatcagaagatgtgtggtcatgctcatttgttggcatgactaatttacaacttatatgtgttatatatacatgcatatgcacatgcatattatagacaatatctacgttgtactacaacggtttgattgaagaaagggatcggatcttcgtggttgtggcgatttgtgatgtgagcggagttcgcaagatagagatataagggcttccaaccattcatatcatgtatatgagtttttactcgtatatgagttaagataataatttttgagttagtatgaaaatttatatgtagaatcttctctaatgttagtgtatgatatagagtaaggagagaaaaattataagcttagtttgtatatgcacacagagagtagttgttagttgaatttccttgtctctaattaatccaagtcttccttcttgttatgacatttaacaataataaaaataaagattacaagtaaaaactataagaacaatgattaataattggatgtaatttcgtcaaacaataatttaaaacaatttaaaaagatacatagtgtttagtaagaagtacccatacacgcaggttttactgatattcaataaccatttcgatgttaaaatatatgtaaattgccaaattttgaatagaatttaatttggcatttacgaatatgaaagtaattcgctatcaatcagatcaacctttctcatatcttgctcctatgttagaggcttcaagcacatgagtttgtttggacccagtgacttaaattctatagcaaaattattaaaaaccactgtttgtatttgcatattgcatatacttttcctacaaaaaaaataaccatatatcattgacagaattagaaaaatgcatttcatgaaaataacaagtcttgatttgtatagaaagtaaaaaaggaaaaaaagaaaagaaaaaaaaagagtcattagtcattactgttttgacttgtgtcttattaccgagtttgggtgatatgtaatgaaataatgcattactttcacattcagaaaaaatctgacaagatattgaagcctgaccaatgagaacgtgccaaaggatactcttagtgatgacagcttttatgtctgcccacgggcaaaggccaatgtcctgagacccacataccatcagatcggatcgccacatcatctccagtttgcgtttttataggacccaaacaaacaccttgtgataaattagacacatttagtcaccataagattttggaactaaatgaacgattataatcgctttcgggccggtggtggtttgaattttactacgattagatatttttctatacaacttgatatattttgttagttctaattctaggctcttgaaatcaaaaagttttgtgaagaattttctagaaacactttttaaaaggatcgataacataaaagaatgaaactaaggtgaaagaggatcattgttgttgatgaatttgagacgcaatgataaatgttgaagaaaattgaaagctgtttgctatctttttttcttcttttttttcctcttctctatttttttttatgaaatgtttttatttattttatgtgatattcccattgtaagtgcacatatttatacacaattttcagaaattttattaaatcaatgaaaaggagccaaaaggtagaatttcaaaactaatacaaagctattaaaattaaacttgattttgggtctagcttaactatgagttcatgatccgatcatcatttgttagaccggaaccaaaacaagacacatcaatttctccaaacggtatatcttacatacaaatgtattcttcaatcttagaatttttttttatcaggggtcaagaacatttgctatgagaataatactcttccccggatgagtcaatttctgaaacttggcatagacctcgagtagtagatatgttcaaacgaatttccgaaattgattccgtttggtgaaaagtattaatctcagagcaaagtttttaccctgacaaaaaaaaattgagagattattgaagaatcctccaacttcatgttcgaaaagtattaatctcatagcaaaggttttaccttgataaaagactcaaagattgaagaattctccaacttcacgttcgcctaacttgtccttcaacagatgtaggctagtcttgttcttcttgttgaacaattgatctaatgcctaccaaatggaactagccaatgtagaccttaatacatgctcatataagctgaagatattgaccaagcaaacattgctttggcttttttgtcatctgtaatgctacttccaccaacgacaacccataaattcttattcaccaagtatcttacaaatgctatcttaatatcttgaacattctaccatatcatctaaaattttatcatacaaatatctatatttttcaatatattaaaatttagatacttaacttatagatttctctagaaacattcaaggaggtataaccttgtaaaatgtttttagtgaaactttagcatgtgggcttaattttggatttggaacagagagataactggatcatgaacccataattaaactagacccgttatcaagtttaaatttaacactaccttaaatctgattatgtcagtcaacccgaacttcgagcaaagtaattcaagttggccttttgataatgatttggtggagatatatgcaatgttatcttaaagtttgtaaagcttcaattgtcccatcaaacatcttgtgctttatgaagtaatgctcttcctcaatattttcatacttacatgaaacattaaattgttagctagtttgatagcactttaattaactatctttgcgaacaaattttcaagatctacatggacttcgaagtctcctcaggcaagcatgaacttcaaaacgtgattgtatacattatgcttttgtcattgtataaaaactaataatatatgttttcatgtcagattcgaataatcaaaactaaaatattcagtatccatacatatattatacatgcacctctagattcttaccgcttttactcatattcatgatcatggacatttaaaaaatcgagacagatctaaaatcggtgtggatcatccaaataacttgtccactcctacttcacatcgtggaattagatcgcaaaatattcgttaaatgggtcgttcacagtgattacacattttactactcaaagcttttcagtagcccatcattatatccacacagcccatcttctattgtttcatttcccccttttaagccatttttaaatttgaaactgattattatatttgaattacagaaataactgtacatttttacgtagaggtaaaacttttcaaagtttataaaatatgaactctaaataatatcaaataacgaatacgtttacaaacaaaatttatcaaaggtttgagactttatagtttagtaccatttatatgttcattaaacaaaattttggaactaccttattatggtgtttgaactggatcatgatctaagtataagctgaattatactaggagtaggcctaaatatatttaaaataaacaattgctttttgagttttggactgtcaatataagggtcagcccatttgacatatgcctaattccagaattgcttattttccttggttaacagagagcactctctctttcttaacgttccaggttacctcaataatcaaaatttgtattcaatatttttaagcaatctcttgaccaaatactgtagtatttgaggctcaggattattataccaaatatatcattgctacatgttcgctaaccatctgtaagagattctacttagttgacaaccgacataaatggactttctcttactagtttggatactcgatgatgaaaatgaacgatgttctagcatcctagcgagatgtagattttggggatataaatttgttaccaatattagaagacttaagatgattgctttgaaaatgaaaatataaaatataaatatgtaaactaaagtggtagcccatgatctatagattttgggtggaatgcatccatgtctctaaaaagcacatattaaacgaagaatttaagagattttagatacatctatttaatacataaacaaacccacatattctaacatgaaatttgaagagactttagaatcaaataactcaaaaatgaccatttcctgtttaataaaaaaaaaaaaaaaacctctctccattgaagactctcttgtctccagtctccaccactgaccaaaaccaaaagctcattctccaaaacttccatctacaacaagtgttcgaaatttataccattgttgagtgaaataattgggcgacttcactatcttccttccttttctttatgtactctgtaaaccctaatatcctaaatacatgttcctcaattcctcaatttgctgttcgccacttcgtatttttcaaatctatcttcgatttacttcttattaaagaaaaaaaagctcagcgacttctgctggagtttcattttttagagacttacgttgatagatggcttgttttaatttaccagtttccctcacacattttctaagcttcccggatttgatagtcgaacatattcccttccttttagcttcaatcctagttcagatattttcctcaaaatcgtaaaataaccactaaaaatatttcaaattcaagtacctcatattgatggataaaaaatatccaagaaaaacaaagtacaggtagaaggcaaaataaaaaaatatgggtaagaagggcccaaaaaaacatttctgagaaaaaaagttcataaaatttattttcctatactcataacatataaaaaaatttataaaggtttctatataaaaaaataactgtacaatttacattgctagggacttattttaaaaattagccctaaggcctataaaatgtttaaaccgacacgaattataggtgttcaactcgtatcaccgtgtacttttagactctgcccaattcaccatgaactatatcataaacctcataattccacctaaactattaaattcatcacaattagacaacttcaattaattgagtcaattgcgatttaaaatccttaaacggttatgcgattatactaacatgagtttaatagattgaccgatttaaaagcctatttaaatactagggtataaatatctgtaaaaaatagctctcctggggaaaatttttttttccaataaactcaaagtacccaaaacagaaatcactcgtcccttaaacttactagggtagaaactagtgtagatttgtataaattaacaatactaactaaaatctaaactataaactttaaattataaactccaaactctaaaaactaaacactaaatccaagaactaaaatctaaaaccccaaattctactcaaccctaaattgttaagcttgaaaccgttataattatatagtttcctttattttgtcatgattcaacttattttttttttcatttcaaatatcttttaaaaccgtcgtatttatattgttacacatttcaaattactaaaatgataaaatactatttttatgtgataacaaaaaaaaaaactatattttctatggttttgtatataaacagttgggtgcatgaatgcatatattgcatttgcgcccactgtaaattagaacaacccttgactactagctagagacgtcaaaagaaaattgaaaacgacaaatcttttcacaatcttcaatcgtacgggaaaccaactcaggtcacattaaagcctcttttctcttttgacaaaaaccctaaataaagggataatgtttatgttacgttgttatatgtacactacacatttattccatatctatagtttcgttaaccggtcaaaactaattcacccaccaaaaaaaatctaaatttccatttccatggcatgtaggaaaaactagaaaccactggacaaaagaatagaagtttttttttatatccaaaacgaaagcaaagcagatcttgtctgagatccgacaaaaaataaaaacagtgaaatactatacattcaagaacatcgatcgccttcaatactgactcttaaaagcgtgatgtttatcattgaaatggaaacaaatccttcatatgtcgtcttctattgttgaattattatttttggactatatgggccatgttaattagatgttgcttttgtggagcactcatacgaaaggtacgttacctacttgtatatgtatacgtagtaaaagtaaaatgttaagaagatactaaaaatagttgagtttgaggttaatccccaatatataagttcataaccagatattagatctggaattgaaaaccctagaaaaaagttgtaaaccctagtgaaaaattaacctgtaactgagtgagagaggagaagaacagatctgcttttttgcgagcagatcttcaattacatacacaaaatcatgtcttcatcactgtacacttaaccattttcttgttacacatctcttacaccattaatatctctatagtttttttcttttctttctttttttgctggtgtgagaaattgtacgcttactatctctctctctctctgccagattctctctttttgatgatgtgaaagttgtgcttttgtttcttaagaaaaaggcatatttttaatacttgattcttggttcttgattcttgattcttggttttttttagcttcttaagttcggtgatgtcgtcttccaccaatgactacaacgatggtaataacaatggagtgtaccctctctctctttacctttcttcactctctggccatcaagacatcattcataatccctacaaccatcagttaaaagcatctccgggccatatggtatcagcagttcctgaatctctgatcgattacatggcgtttaagtcaaataatgttgtgaatcaacaaggctttgagtttcctgaggtgtcaaaggaaatcaagaaggtggtgaagaaggaccgacatagcaagattcaaacggcacaagggattagagacaggagggttaggctttctattgggattgctcgccaattctttgatcttcaggatatgttggggtttgataaagctagtaaaacgttagactggctgctcaagaagtcaagaaaagccatcaaagaggtcgtacaagcaaaaaacctcaacaatgatgatgaagattttggaaacattggaggcgatgtagaacaagaagaggagaaggaggaggatgacaatggcgataagagcttcgtgtatggtttgagccccgggtacggtgaagaagaagtggtatgtgaggccacgaaggcagggataagaaagaagaagagtgagttgagaaacatctcatcaaaggggctaggagccaaagctagaggaaaagcaaaggagcgaacaaaagagatgatggcctatgataatccagagactgcctctgatattacacaatctgaaatcatggacccattcaagaggtctatagtcttcaatgaaggagaagatatgacacaccttttctacaaggaaccaatcgaggagtttgataatcaagaatctatcttaaccaatatgactctaccaacgaagatgggtcaaagttacaatcaaaataatgggatacttatgttggtagatcagagttctagcagcaactataatacatttctgcctcaaaatttggattatagttatgatcaaaacccttttcatgaccaaaccttatatgtagtcaccgacaaaaatttccccaaaggtaaagtttggattcaagactcttttgtaaactaaattattgttcatatatatgtttgcattctatgatatgttttctttctcttgattgtttctggcaggtttcctataaatctcgacagttttgaaggactatgcatgatcaagtttaaacatgtaagccaatatagtcccttattcctctgaatgtatacaaaatctatagttatgtatatctgttcctttttaacgtatctttattgatcttctgtgccttgatcaaaattgtcattttaagattcagtttgtgtaatattttagctacaacttttaagtggtattattgtaaccttttgaactatatattttgaagatgaataagaacatgtttatatatttggtcatcccattacaatccaagattcatacttcgattaggcactacacataagagctagtctttaagattaagccatttttgtttaagttagagctccatatattagaatttgttcttcaaaccctaaattcaattaagacccacaaaaccaaatatgtatgatgatgaatattgagggtcgtagtgaaactgaagtagttacattgcaaattgaaggtgacactgagaattagtgtgtggaatgtggaggcgtgcctgccgtggtgtctatttgattcatagtttgtgatttggccatccaggtatgaggagaatatatcctactttcatattattgtctatatagaagatatatacacatttatatattggtgtatttattctcttactcggaggatgttttgcaatgatgctttttgaagcaaatatgagttgtttgtttatggggtttgaagtttggcgttttggaaacaatgattgttaacttaacatattcgagtaagatttgtttaaggcttttaggttaaactctgactagagatgtgaaaaaaaaaaatccaaaagaaaactcaatgttttgaaatgataacattcacttagtagtaaataagtacatggatcaattcagtcactaccaatttgtttgaattattataaatcctcaaaactgaatatgctatcatagttcaaactccaaacacacgttgacatgaacctaaatcaatattgttgttcctagctgaccccaaatagatccatatatacaagagattagccaatcaattctgcttatgaaacttgatattcaccaatttgagattctagaatttagtcgttttaatttaatttacaatttagtcggaaatcctatcaaaacgtaaaactttttaagaaactgaatgttaggagttaatgaaaacgtgtaaaagaatgatacaagatttgactgattctatttgttaataatttttaaatttacagtatatgcctaaatttatttggtttaactaactaattttaggataattagtcaaattagatgatcatatatggttaaagctagtctaatttaattagactaagtacgtaataaggttgttcttaaaccgaaaaaaaaaaaaaagtaagaaggttgaacattcacgttggagcagtcaagataaagatgaacaataagaatttctttttaaccttggaaggaatctaatctcaatatatagggacttaagattccactaagtttgaaccacacacatcgaagattgtaagattctgttttgaagaatgagaagttggcattacaagtatagtcggtacaagttttagaaagcttatccaaatgtagtttctttttgaagctgtttgtgcatgtgacaattttttcgctgtacattcctaatctcataaaatgagaaaataatcaaagaaataatatattatgaaaataaaaatttgttttaacatgtttgaaaaatataacaaaactattttaaatcatactttagttgaaaataattgattgttaaattacgaaaaattttataaacatgattgaaaaactcataaaatgatagtttttatcaacaaactggtgggatatggtgtgaatcagaaagtgtcactcgcttgtcaaaaatgtgtatcatgaatgtatacgaagcacatatatatgtaaggcaacacttcatcatgtgaaataaaagctctcaaaataccaccattcggaaattaatcatgtagacacacttacaaatgtattttgaataagctcactgcaacatattaagcttacttttttttttttcgcccaacatattaagcttactaaaagttactgaatgttgaagaactgtcactgccagaagaaagcatactaaagtttgcaatgctcgataggtgattgagaaatatagtctgatatgaagatgtaatttaacttttgcttcttattattattttttcatttcatttttgttgtttattctttctttttcatctcactgaccttaatatctagacttgcctacacttgcttaggtcgctggattagtatctacacttgtctaggtcgttggattagttaagtccctatgaataatctacaatatataattcgtaaatgcctggaaactgatttaccttcgagattttgttgcaaagtgaagtaaaatttattatataaaatttcatttgtcagatcctatgaaataaactcgccgaaatagctaattttaatattcacattacatcttttcaacatgcctttgtaagagtacctttgtttattttattaatctgaccttgagtggacccttcttcactgcgtccaatcttcaagggtgtctttgcttaccataaatttactgatttacaaaattaggtattgaatataaacataaagaaaagatttacctaaaggtaaaaggaaaaacgaatactttgaaaataatttacagatttcagttttaaaatctgtaaattcacatcacagtcattgtcttacgtcattttttgtagtatgaaaataattcataattattaatatgtaaaataactaataatgaaattataaccaaccaaaaagcaaatgaattgcttatgtatgaaagaagatagttgaaaaaatgaccaaccaaaaaattgcttctttatgaaacaagacattgttgaaaaaaaagttttgaacaaaaaaattcttaagaaaatttagacaaacaaatccatctttgtaggcccaaatacaaaattaatgggccttagatttgggattatttatgtgagcccattattaaacttcgtctcttactttttttttttctttttttcttactttgcttgtcccgaaagtcgcagagcgagctacaagaagaagcgaaacacacccagaagaagaagaagaacaacaacgaagtaaacaatggagtctgagaaaaagatagctcatgagatcggtggtgtcaaaaacgacgctcttcgatttggtcttcacggcgttaagagcaacatcatcggatctcacccactcgaatcgtcatacgaatctgtaaaactatcctccccgatttagtttttctttgtttgttagtttgaaattgaatctgtttgttccttggttaactgagaaattagcttacgaaaggaacttaagtgtgtttgattagcattcctgaatctcttctatcgcctgattagttgattactttgttttgcaattcgcaaatttagggttcaatttgagtagaaactgttgtttcaatcttactagggttctaaattgggttaataattagggttctgttcttactctctagatcttgaatctctgttgattcatcggtttcaggaaaagaaatcgaaagaggcgttgaagaggacggtcattgcgcatgcctacgggactgcacttccgttgaagatggatatggataggcaaattctctcaaggtaagcttctgctaatacttctttgtactggaacactcagatttacatgaaatgtgtgaatcaatgcattgagaagctattctatgttgcttagtaagatgcacacacttaataggtcccaattatgtataatggttgtgtgcattagtggtatctattgtgtactcaaaactatctgtgtgtatcattgagctcagggtctaaactgtttgctgtattatctgctggttgttaatagcactatgaaaataagttgtatagttctcaattttttctttttctctggaatatttaggtttcagagacctcctggaccaattccgtcgtcgatgctcggtttagaagtctacacgggagctgtggatgactttggttttgaggattacttgaatggtaaatgtcttttactccaattgcaagtgtctcaatgctagattcacttctttagatcagtagaaaccaatttgatggtatctcagtaattcagtatgtatatcggttagctgaatctagtttttttcatcacttgcagatcctcgtgattccgagacattcaagccggtagacttccaccacgggatggaagttcgtcttggcatctcaaagggaccgatttacccaagtttcatgtaacccttcatgggtggttttttttatcggttgtttttggatcatgactcatcgtgtatgaacttatttcaaccttagacttgtattctctcttgagttaagtttgaaatcagatgaaacaatgatgaatatgattgaacaatcaattctagtatatgttaaaactttgaaagaatattgtcaaatgaaggaatcatcacgtatccactcaaggattgacactgtcagcagtaataagagagtcagattggctaacacagttacgtaattgaactgagagggattcacacgtatgaaagtgagaaatcgagagggattctaaaggagaaaaaagcttaaaaaatcctcatttatttttaatttggtcgtttaatatctgtacttttaaaattggaagaaaaatacacaagttaatttcgattgcctataaaagcactgattttttaaatgttggtaacttcatgctctcgagttaacgattgttagttttgctaacagaaccactaaatgtggttaaaacataaccacacgtggttaattagtccaatttaaagacactgttgccctttctcattctccccaaatcgatttcaaattcacaaaccctaaaaaaatttctatctttgcttatttctcaaagatgatgagccaaagttcatgatctgatgcaaattcaatcagccgtagctggggtcctgtttgcagttgtggtagggctacgacaattactaaggcttggacaaatgaaaatcctggtagaagatttgttagatgtggtgttcatggcttcatcaactgggcagatgcagagaagccatttggttggcaaaaacagagcttattggaggctagagatgagattcggcagctaagcgagtgtataaaggctttgagggaacagaaggtgagtgtctcagtgtctggctcaaacgaccatttgaagaagtatgaggaagagaataataagcttgaggaagagaagaagaagcttgtagaagagaagaagaagcttgaagaagagaagaagaagcttgatgaagagaagaagacacttgcaattgaagttatgggtgctaatgagagagaaaaaatgcttaggcaattgattgtgttgtcttggggatgtttcattgttgtcattgggatgtgccttggaatgggaaagaagtaggtcctagttcattgtcttgttcgggacataacgttgttgatgctaaggttgtttgttgttttgttattggggaacctttgttgttgtaaaactttaactctttgtttcgataatcaaaatgctactttaattgatcaaaagagccgttagaaatagtaagatcccatcaaaaacaattcaggatcttaccaaccaaaacacatcatcctacatagatatcatcctagaaagtaatcctacaaagtcattaaggacaaagagaacataagtcattcctacttcttctcaggtcgccatacatcgaagaccttatcagtttaaggggacataaaaaagacaggaggtcttggagcttcatcggatcctttaccacgtcccttgcctttacttttacttttgccttgaccattttttactcctggaggacgtccacgagcacgacctgtaccacttgaaggagctgctggagcactagaatgctgcggaatttgagtcggttgactgagagcaataggtgggttggactgactttgagcaacatgtgggttggaatactgactttgagcaacatttggagcatttctccaccttcttggagcattgttgatgctccatggatcatcatcctcctacaacaattgtgaggaagaaggctaagatggtcgtgtgcttaaatatgggccaagagagagtcagaatacgtaccattgacttccttggtcttcctcttttgcgtggaggagctgattgcactgttggttttttgcaagttcccttattgtgacctatttccttacaattgctacaagtcactgtttttccttctctggttagcttatttggattagttgctgattcgcctggctcttttatcctatcaaacttctttggtcgtcctcgtttcttcctcttatctggcacctcatatatgttttcactgcttttgagaactgaacaaaacttggctgacttgcggttgccttcaaggatctccattattttaggtggaaaccttgtctcgcatttcattgtcttcccacacagcttagcaatacgcttcatggaggttctccttacttcttctagcatatttatcacagggaggttccttgcgtccctaatggttctattaaaactctcacaaagattgttggaaacatcttcacatctagaatgagtactgaagaaggctctgcaccatgttcttggatcggtcttcagcaaatcgtcatgtgcttgtgggtcatataatctcaaagcatccatgttccatctgtaatccccatttgttgagctgtaagcaatagcccagaaatagctttcatggctgtaatcgctatataccttcctccaattagcataaatgtgcctagcacagtgcctgtgttctgcttgtggaagtaaatcagcaacaacattgattaaccccttcttcttatctgatataacagtcagaagactccctaaacctaaacccaaatctgtcttcaagtgctcaacaaaccaggcccacgagtcattgtcctcaactcttactattgcccaagcaataggataaatcctattgtcagcgtccctgccaactgctgctagaatctcacccttcagttcccacttcaaaaaagccccatctaaaccaacaataggcctacaacattccttccaagttcttctcatattctcaaaacatatgtaaaatttatcaaattgctgcttaccgcaatcctgaggaatcgtgacaatctctgtgtggatgtccttattagacctttgcaactctgcctcataatcccatagttttgcaaactgttctctctgtgtttgtatcaccatatcaaatgccaatcttcttgctttttgacaaatccacttagaaacagagatcgtgtaacgcatcataatctcatctttaatgtcagtccatctcaaagtcggcctccttcttgcttcatctctgaatagtctagcaattacaccttgcttcaacatcctagctttaccacttatagcatgttcatgctcatcaacatatgttttgactacacccacttatttagccgcttatcaactgaacagtaaatcttccatttgcaattctcatgcctacatatagccatcaactgtgtttgagcccacttacacaacttcacatcgtagtttgccttgagaacatacctcagtagatgatctttgaactcctctccactgtgaaaaatctgcttaatccataagtaaggtggcttatcttttgagtatttagctcttgatgtctccctttcttcacgatcaaaggcatcccattcttcatctgtatccatagcagggtcgggtctctcattgtccatgcattgcatctcaaagtcttcatcatctaattcagtttcgcccgcaacatccctttcagtttcctcaccacccgcagcttcctgttgatattggtgagtttcatcacccgcagcttcttcttcaggaacttggtgagcttcttctgcatttatttcttcatagaaagctctaaaccgaggatcaacaccattttccctaacttcttcgactggatcaactccatcagtttctaatctttcttcctcagcagatttatcttcttcttccactgcttcatcatcggactgctcttcaacaacaacttcttcagtaggctgagacagaggaaacggtgaaggtatagacacaccttgctgaatatacacatccacttcaccaccaatcaaagcttcattgcacaattgcctaatcccactatctctatcttctgagatagctctaactgagactaagtcttcgtgagcaagcttgtaccacactttctccaccggaccagatacaccattctctttcgggaaatcatcaaaaattgaccatgtcatcaagtctggatccatacacatatctctcttctcgaatcctccaacgtagtcgaacaattcatccttaaataccacatcacctccgaactttatgttgagtttcagacactcgaaatcactacatagagagagagagattaagttaaaatcaaaacccagacactcgaaatcaatacccagacactcgaaatcaaaccccagacactcgaaatcaaaacccagatactcgaaatccaaaccctaaaccaaaaatcgaaacaaatttcaatcgtttgcatacctcatcacgacgcgaccaagcagccacgacgcgacaaagcgaactccacaaactcaatttcggaccaatccgtaaccaatcaaacacccaaacacatcgaagatcccagtttgaaagagagcgaatttctgagagaaaattagggttcgtgactgaatcccaaatcgatttgggggaaaatgaaaaagggcaacagtgtctttcattaggactaattaaccacgtgtggttatattttaaccacagttagtgattctgttagcaaaactaacagtcgttaactcgagagcatgaagttaccaacatttaaaagatcagtgtttttataggcaatcgaaattaacttgtgtatttttcttccaattttaaaagtacaggtattaaacggccaaattaaaaataaatgaggattttttaagctttttccccgattctaaagaattgaattgaagaaatgaagaataatgaaaagaatatgtttaattaggttgagtatatgtctacgtcatgaaaataccctaaacggctctaaaaatgttgaactaacttcaagaaaaaaagaatgaatgagatgaaaatacattcttcgaactttttatctttaccttattcatttttttccttctcatttatgcttttgccttttaccatttggagtgtgtttgacaacaatgactatccttttagtaacttggaggaaaattcatctcaactcaacaggtgatttcttagaggaaaagagaaggaaacatgtttcttcagctgacaaattggaatcccaatttctcatttcaaagatgctttttgcttacgtctttgtgtttttctatatattaaaaaaatgattcccaaaaataaaaaaaacgattccctaaataaaaaagaaaagaatattagcaacggtcacaaacacgatttgcatattggaatggaaggccctcatgacgacgcttttaactattacgttcttctcacgtaggcccactaacactccattacccctttcatcacttcttcatatcatatgtttcttttttattaatttctgtcaccaaaattagacctcttttttctgttccatttacaccaaacttctacatttcatttcttttttctttccaataaaatgtatctaaagttatatatcatgttaaactattttcaaatccgttggaatccatcaaaaaatatgtaagaaatgctcaagccatcgctggtcgccccttaattgatgtgtatgcgtcatcgtcttatatatagtggtcatttcttttgtttacgtctcattgttgtcatcttctagacaagaaatgacatctatattgtcatttcattgatgcatcatcgattcatcgtcttatattggtcattacatatgtttttttacgttttattgtggtcttcttctaaacacaaaatgacatctatattttattgcaaaatttccttacgatatatagttattattaaattagttattatcgcaaattaaggtgcttttcttatagcatagaatgtcacaagagaagaaagatagcaattatatgaatcacaaaactaccgtttttagctacgaatgtgtttgaaaatgataaatgcattacatagatgtaatgttttcatgtagttgattgccctcttgtctttattgcgaacattttgattgttatatcacatgagtcattcagaagagaaaagaaaaattagatgtaactggaggtgcgagcgacggcggcagccaacgacccactttatcaatttttatttgacatgtctccatcgaaattgtaaactattgagtagtaaattctactacgattatttcatgactaattacgaactatcataaacagatattccccttaacattattatcgatacataaaacaaatattaaagctaaagctttcttcatacaaagcaatctcctaaagttagagacttttgttgcagcaacaaacttatatatattagtattttcaaacataatgatttaatactatggttataatttgttaatatagttaaggagttactcaacaatctattagtcaagtcttggaaaaaaaaaaatctattagtcaagtcaatctattgtacatttgtacatatctactacaaattttaaaggtaataacaaattagttcaatacattcttatatcttctctttgctagttcaattcttcttattggcaattagtaaattgacccccaaaaaaaagtacattcttgagttttaatttgttttttttttaaaaaaaaatcttgagtttaaaaccatctataatagatctacatttatttcttcttctttttattcataatataataaataaatgtattgtgtttttttggataaagcatttccatcttcttaattacatgtctattgtgtctactactgcaaatattattttaaaatactatcattaaacattaatactaggaagccaaacaaattaatctgaaaaagaacaagacagagtgaagagcacaatgatgggagccacatggagacagaacatatgcttgcatccaaacacaacagcagccatatgcacagctcttagccaccttggctttcctttttttctttctttcttttagttactgtattcctttttcttcatattatccatttccaaaatgtacatctttttttttaataataatatatggtatttattgtttatgatcacgccataattgactttcaaagtaaaagttacatgaaaatttattataaaatataatttcctatttttgctgtaattctaagacaaaattgacaaaaattagattttttttaatttatatccaaaatatgtttttcttattttcggcgaatttatggatgcttccataaattttcgtattcacatttaaaccagtcaaatcctataattattaattaattaaacactaatcatcattacattttgtagagggtatttttgtcttacaaaagtttccacacttgcacaacgcataaccgttgtaattccaacgaaattccagttctacccttggaaccttcgagcaaatctttaagacggcggccaaaaatgtaaataaagtaaaaatatagggtccacttttataataaaaaaaaaagaacaagaacgtgaacgatccgcgcgagccacacaataaaggtttccagcacagagaagagagagagagattgcttaggaaacgttgtcggacttgaaaccagtttcggtaccggaatttagaaactccgttcaaatccggagccaatctctaaaggataaagcttccaactttatccattaattggagaaaattctcagagagactgaagtcgacaaagtcagagggtttcgttttttggcttctgggttttttatttcaagtgttcaatttccgaattaggtaagaaagttaggttttgagatctgtgcgaattgtgagagatgtccacgccgttgaaggtgtggcaacgttggtctacaccgacgaaagcgacaaatccagattcgaatggctctagtcatggaaccggtttagacatggtgaccccagtttcgggtcgggttagtgagatccagttcgatgacccaagaatattgcctgagaaaatttcagagcttgaaaaagaggtttgtgatctgttttttacttttgtctttttgtttcctctaataactttgtcgcttgtaaattaatcgtctttactctctcaatatttgtcattatagttcatgaatctttgaatacgttatgaatttagtttctcctgtaatgtttcactgtgaataatgattcttacttacattgggatgtggttttgtttcaacaattactgatttgttgatgttctgtgacagcttttcgaatatcaacatagtatgggtcttcttctgattgagaaaaaggagtggagttcccagtatgaagcgcttcaacaggcttttgaagaggtgaatgagtgtctaaagcaggaacgtaatgcgcatctgattgctatagcagatgttgaaaagcgggaagagggtttgaggaaagctttagggattgagaagcaatgtgcacttgatgtaagattctaaactcttcttttatgtatataattgttttctctaattgagagacgttttggccataagcgtaatttgttagcacatgtaaggtttatgacactcttgttctgttgcagctggagaaggctctgaaggagctacgcgctgaaaatgcagagatcaaatttacagctgattcaaagttgactgaggcaaatgcattggttagaagtgttgaagaaaaatctcttgaagttgaggcaaagctgcgtgctgttgatgcaaaacttgctgaagttagtagaaagagttcagatgtggagaggaaggcaaaggaagtggaagctcgggaaagttctcttcaaagggagcggttttcctacattgctgagtacgtattggacttctttccttatatcatttttgtatgttgaatagttttatctttatgtcgtttccttgctgcttagtgggtgatgactcaacttgttttggtctttttatttctcagacgagaagcagacgaggcaactttgtcaaagcagagggaggacttgcgtgaatgggaaagaaagttgcaagaaggagaagaaagagttgctaaatctcaaatgattgtaaaacagagagaagatagggcaaatgaaagcgataagattatcaagcaaaagggaaaagaactggaagaggcacaaaagaagattgatgctgctaacctcgctgtgaagaaactagaagacgatgtcagttcgaggataaaagatcttgctttaagggaacaagtaagcagctcaatttttcttttagtatttttagtatttaaagtactttgaatcttttcaacttacatacttcctctggatgcaggaaactgatgtgttgaagaaatccatagagacaaaagcgcgtgagctacaagctctgcaagagaaactggaagccagagaaaaggcaagccctcactctctctatctctctctgtggataaaatctgatacctagtaattcagtttgataattagttgataaattgcttgctgacttagttctctgggcaggaaaagttttcaatttccatctcgattttgcgtatcctgcaattgttatcatgtcttaaaattaataagtattcctttatctgtattagtaaacagtgtttacatgttgacaaggttgatatcacgtttccatgtcatttgtgattatttacatgtgtgcattcggggtgttaattgtttcatgttggctaattgacagatggcagttcagcaactagttgatgaacaccaagctaaattggattcaacacagcgtgagtttgagttggaaatggagcagaaaagaaaatctattgatgacagcttgaagagcaaggttgcagaagtggaaaagagggaggctgagtggaagcacatggaggagaaagttgctaaacgtgaacaggcattagataggaaactggagaagcataaagaaaaagaaaacgattttgatctaagactgaaaggcataagtggcagagagaaagccttgaaaagcgaggagaaggcattggaaactgagaagaaaaaactgctcgaggataaggagattattctcaatcttaaagctttagttgagaaagtaagtggtgaaaatcaagcacagctatcagaaattaacaaagagaaggatgagcttagagttactgaggaggagaggtcagagtatcttcgtctgcaaaccgaattaaaggagcaaatagaaaagtgcaggtctcaacaggagcttcttcagaaagaggctgaggatctgaaggcccaaagggaaagttttgagaaagaatgggaagaacttgatgagaggaaagctaagatcgggaacgaactaaagaatataactgatcagaaagaaaaactagagagacacattcacttggaagaagaaaggctgaaaaaagaaaagcaagcagcaaatgaaaacatggaaagggagctagaaactcttgaagtggcaaaagcttcatttgcagagactatggagtatgagcgttcaatgctctctaaaaaagctgagagcgaaagaagtcaactgcttcatgatattgaaatgcgtaaaaggaaactcgagtctgatatgcagactatactggaagaaaaagaaagggagttgcaagctaaaaagaagctatttgaggaagagagagagaaggaattgagcaatattaattacctaagagatgtagcgagaagagaaatgatggacatgcagaatgaaagacaaagaatagagaaagaaaagctagaagttgattctagtaaaaatcatcttgaagagcagcagacagaaatccggaaagatgttgatgaccttgttgccttaaccaagaaactgaaggaacagcgggaacaattcattagtgagagaagtcgtttcctttcttccatggaaagtaataggaactgcagtcggtgcggtgaattactttctgagctcgtacttcctgaaattgataacctggaaatgcctaacatgtcaaaactggccaacattcttgataacgaagcaccaaggcaggagatgagggatatatccccaactgctgctggcttaggattgccagttactggtgggaaggtgtcatggttccggaaatgtacttcaaagatgcttaagttgtccccaataaaaatgacagaaccctctgttacttggaatttggctgatcaagaacctcaatctactgagcaagctaacgtgggtgggccatcaactaccgttcaggcagcgacgacctattcctttgatgttcaaaaggccgaatctgaaactggcacaaaagaagtcgaagtcaccaatgtaaactcagacggtgatcaaagcgacatcaacagcaaggctcaagaagtcgctgcagattctttgtccaatctagatgttgatggccaatcacgcatgaaagggaaagggaaagccagaaccagaagaacacgctctgtcaaagatgttgttgatgatgctaaagctttatatggagaatctataaacctatatgaacccaatgattcaacagaaaatgttgacgactctactaaagcaagcacaggtgaaactggtcgttctgataaagcaatttcgaagaatggacggaaacgtgggcgtgtgggttctttgagaacttgtactactgagcaggatggtaacgagagcgatggaaaatcagatagtgtcaccggaggagcacatcagcggaagaggcggcaaaaggttgcatcagaacaacaaggagaagtggtgggacaaagatataatctcaggcgacctagaaggttacttcaaatcccatttgctttcaaacacagtcactgaggataatgcgtttgagatgtttattcatctttttactgaggctgtttgataaatgtttctcttttgggttattagggtaactggagaacccgcacttagtaagaagaatgaagatattggtggagtgcaacaagaggaggggattcactgtactcaagccactgccacagcatcagtaggtgtagctgttagtgataatggagtaagcacgaatgtggtgcaggtagaatgctctcacaacttagctggatttgtgtttttccctcttcttatgatttctctttcttgacaaaactgtttctatcaattgtctgtttcaatagcatgaagctacggcagactctgaggatacagatgctggttcgcccaaaagaacagatgagagtgaggcaatgagtgaagatgtgaacaaaacacccctaagggctgactcggatggtgaagatgatgaatcagatgcagaacatcccgggaaagtctccattggtaagaagctttggactttcttgacgacgtagcccaatctttgatcagagaatgtagctaatcttcttctgttgacaatattagtgttttgcttcttgatctttagtagctacttaggagggcttgtgttaatttcgtttggatattttttcaccacaatgtagtgttttctttctagctttctaccacttagttgctatcttgttaaagatgatcttcaagaaatctccattcttttggtatgttttagatgatgatttatttattttatgagagtgtgatccttgtaaccacaaagtgtttgcattttgatgatttgatccatttatatgtgtttgcttggatacaacttttttggcgtcaaaattataactttctgcattaaatacacggtaatgatagatgagaattattgcatgaacaatcttaaaataacaaaagaatgatgtaagttgcacaaaaggaatgatattatataatatgtgtaatagttttgcttatctttataatatgtgtaataaaatctacaacgaaaccattttttattttttttcgcaatggaacttttattcaattcttcaaacgaatgaagagaaaccccattacaacgatattgaccagagaacacatgtaactctctggatatttagccggtgaaaacgaaaatttctcggaattaaaacacaaactaagattatcaaaacataagccaattacaggaacaaaacaacaattaaacaacgaaaccattttgtttgttatattttgaattttatcttttaatgttatttatcatagtgttaaatagatttgtaaatattttaattaaaagattatgattgttcatgggaaaaaaagttatgggaaaagataaaagttgcacaaaaggaatgatatatattgacaaattatttatttattttatgttacacaccaatagaaaaaacgtcacaagcaaacttattttctatctattgaacaacaccagagtccatcactcttgacagtattatagaccgaataattatcgatgtaagaaaaggtgttagctctgtacaatttcttgtatagtcaaacactatcatcatcacagcacctatgcaatgttcatattcctccttctgactcctcttttagtgcctttacaccttcctaatcaagacttccttcctatctctgagtatataagagatatcaaagttatataaaaaagctaaagttgcagagatgatcattgaaatcataaatagaggaatggaaatttacctgcactgcggtacggggcaattgagatcttggcaatggtacacatgaatccttattgtctgccacaatttgtagcaagtattacaacgagttcccttctttctgattttgcattgtacattgtgagtgaacaatgctttaacttcgtggcatttcgggtatgagcatgacttagtggtcttgtgctgacacagaagcgcatgcgatattgcgttcaatatctcaagaacctaagagagtaatacgttgattaatttagtaaacaagtcaaaagtaaaccaaagaaacgatatatactttcaggtaacatatacttaccattacggttctcgacggcgctctattagctgaagggagtgtagggaaaatatgaagatgacgaagggttctgtttttggtatagcatccagtgcaagctcggtaatccggacagagcaaacaagggaagtaaatcgttgtcgaaacatcttttttgcaggccgtgcaggtgagactgctagagttttgagagcaatgatgcttgtttgaggtgtgaagatggtgaagtatcatcatcgaagaatgcttggcatgtcgaagcgtgtggaagttgtaattatgcttttgagaaaaagctaagaacgcttgtctgctttcgaacatatcgttttcttggatgatatcattatcctctgttgtagaaaacagtacgccgttcacctgaacctttgagagctgatgcttctctttgtccatcctcttatatatgtgttctccaggaagctcttgtcctgcatcatagcagctttcacacaaatgaagattcttgcacttctcgcaaaaccatctcaatcctgataatacggctttcgaacagcgtgtgcatgaataattcaattccaccaccattaaatccttcttatttgggaatacctctttttccagctacacaaaacagaattgtcaaagattaatcaccttcaaaagttaccaaaataaacgaaaaaagatccgtatttaaattctatgtgcattcaaaatgtaaataattaccttttccatcaggagaatgtttttaacatcatcaacatcaacatcacccgtagttttgtagctcatagtctttacttttcttctagaaagcaatttaaccttcttctgcaactcattattgccttctctttcaatgtcttgaatcataatctcagccctattggaccagaaagatccttcaaagtaaggcaaccgcgcagctgtcatatattcctctgtcgaatcgaagaaccgatcatacaagtttgtaacattcatcactaccctctgctcggctgctttttggagcattgacacatacctgtattaacattgttaatgtcaaatccaatatcttcacaacaacaatgaccaaaggataaagctgggatcaaagtggagaaaaaggaaagaaaatacttaccatttgcgaagcttcttagtgtcaggtgtttgctgagtcttaggatgagaatacattatgtagtcttgtcctattttaggtggacacgcccatatataactcgtcgtgaaacctcgaagcttacaatattcaagatatccaatctatcagagataaaaacacagaaacatgtcaatatcaataacaactatatttttattggcatttaagcatgattatgaaaaaagagagatgaatatttaccaatacttcatgataaacgaaagttcgaagagcttctcctgcgaatgttactctctcaggtttaaagtatttgacagaatcgagataaaatatgtatgtgctgcgttggtttggttggctacattctgatccaaactcttggacaaacaatgcaaagatgcatatatcaactccatggactttctgaaatagaagaataacctgaaagagtagaaattaataacaactaagttttgaaatacataactggagctaaagtcaaatattcaattgtggtactactgattctcacctttgatctgtaagggaattcactaggaaagttttctttgtgaagtaaactggcaaattgtttgttgacagttaaggttctgtcagccgaaaacacgactctgagagtaagaccctctggttcaggtacctggaaagaaaaaaagtaacaagttcagtataaaaaacagaaactctaaacagaaactcaaatgaatcgaaaccacttcatattcttacatcattgatgctcttcccagtagcctttgctgtttggtatctttcttccttgaggcgcttgaatagcctttgctctagaaagtagctgaggacagtttcaggcaaatcttttgctccagaatccgtatagtcaacgagtgccatgttgttgatactttgacactcctctaataaacatgtaggacaaatatactctgcggttttgtcttcgtctttaagcttattgtagagaccacatatctgatgttgccatttttcacaagattcacattgaacccactgctccaacaaaagtagcttatgtagttagtaagattcatgaaatgagagattaagaaagagagagagatagagagagtgatgaagtttacctcctccgtatctgcgttgtcaaagttactccttttaagcattttgtgtttatcgataaagactccacataaagggaacttggttttacatctactgtgacaaggactgcagatttgatgttgcgcattgcttagttcttcttccccaggggtataatagaaagatctgtcatcgatgcggcggctgcataataagcagtatagtggttgtggtggaaacaagagtgtgccatcgtcacacaattgacatgattcctcctcctccttgaggtcacacattccttcgactgcgctctgtgtacttggcttctttagactcattatatgcagctttatctcttcttctgtgaaacgttcgaccaaagagacagctctcttgctacgtttttgcagagacattgtgtcagcattaacctcacacttgctctcttcattacatttcatcggctcaacaatatccacaccaattgtgtcaacattaacctcacacttggtcacttcattacatttcattggctcaacaatattcacaccagttgtgtcaacattaacctcacacttggtcactttattacatttcattggctcaacaataaccacatcaaatgtgtcagcattaacctcacacttgttctcttcatcacatttcatcggctcaacaatatccacaccaattccaagtttcttctcatagttcaaagacctttcctcggtttgaatctttcctttgtttgtcgtagtaacctcacacttggtcccttcatcacatttcatcggctcaacaatatccacaccaataccaagtttcttctcatggttcaaagacctttcctcggtttgagtgtttcctttgtttgtcgtagtaacctcacacttgctcccttcatcacatttcatcggctcaacaatatccacaacagttccaagtttcttctcatggttcaaagacctttcctcggtgtgaatctttcctttgtttgtcgtagtaacctcacacttggtcccttcatcacatttcatcggctcaacaatatccacaacagttccaagtttcttctcatggttcaaagaactttcctcggtttgaatgtttcctttctttgtcgtagtaaccacatccgcgaaagaataaaccttgattaccttcggtttttcagatttgctagtactagaaccctgaacctccttactcctttcatcacatttcatcggctcaacaatatccacaacagttccaagtttcttctcatggttcaaagaactttcctcggtttgaatgtttcctttctttgtcgtagtaaccacatccgcgaaagaataaaccttgattaccttcagttttgcagatttgctagtactagaaccctgaacctccttactcctttcatcacatttcatcggctcaataatatccacaacagttccaagtttcttctcatggttcaaagaactttcctcggtttgaatgtttcctttctttgtcgtagtaaccacatccgcgaaagaataaaccttgattaccttcggttttgcagatttgctagtactagaaccctgaacctccttactcctttcatcacatttcatcggctcaacaatatccacaacagttccaagtttcttctcatggtttaaagaactttcctcggtttgaatgtttcctttctttgtcgtagtaaccagatccacgaaagaataaaccttgattaccttcggttttgcagatttgctagtactagaaccctgaaccttcttactatccgaaggagaatcgttcttaaaatcttgcttcgttatatcagaaccgctgtttgtctcggaagcagaaccgctacttcccggtatagaagatgtatttaaacatcttctagcattagtagcagcctcctcaaaacttggtactggaatcaaacatgtcttctccacaatgaacttagcagagctaatcgactcaggactacataaaacattccaaggactacgaagattcaactttaatggttcttcctttctccatcgctttgactgacattttctcgattcaagaaactgtgcatcttcatcagacgtaacatttgactctgcaggtagattgttcaaccgctgattgaactcatcaaaactttcggtgttaagaaacttaggcatcaagtcccttgtccttttacgcggtggagccatcagattatgttccctgcacaatgcaaaacagagagatattagaaaaaaaaaaatcaccaaacttgaaaaagacaccgaagaagaaggaattaaaaattgtcaataaagtttgaaacttgcacatacaccaaatcaattttgttttagcttgttgctcaagtcatacactaaatgttggattaagagtcttcttacacaaaaaaatcaacagaaccaccttaaaactaatcgatcgctttcacaatctaagcttattcaacactctgcgatctccaaaatccaaatttttaagttcttcaaaaatttaaaaattttgatttttccaacgaaatccccaaaattgattgcatcacgatcgcgaaaaaccataatttcgtgatgatactcgacaaacgaagcatgacgaaaccctaattagctacgtcagctacaattcaacacctgatcttaaagacaattacacgaattgctcgacgaagaacccaaaatcaaaaccctaatcgagtaaagaagaagcagacaggacgaagaagaaaagtgaaacctttttccttctatgcgtcagacaaaagaaagatagttgaaagagaaagcctctgacttcgttgctctctgttgtttaccttaattagggtttgagagatttatttaatggtcagatttaggattgttcttagatatatagcatttttttcgtaataatgtaataatactcaaggctttttattttgtaatgttaatataaaaaaagagttttctatttaggtgattttttctgtttattctattaattttaatatttgatttggtaaaaccgttataacacgaatttgcgcgggtattaataagatatatagttcgttattcgtaataaaaaaataaatctcaaattttttatggaactaaatttatagataagaattgtaataaataatttcgactgaattcaccaattataagttgatatatatgcgaaataaatatatgcttatgttataatttgttatcgaaagttctgtatactaactttgtaatctcgatttgatatcaatagatttagctagaaaaaaaaaaattattcttttccaaattatctgttttaagtttattagatggatacaaagtgtttcgataatttatggtgtgaagcataaatggagctcgaagcataaatgaagtttgaattatgttacttattagtagtcgatttccataatccataccaaatggtggatatgaaaacatggagagacaagattgcagattaattaggaacatattaccaaaacgtagttattattactggacatataacgttccggtaatacaaccctcgatagcgaaaattctacataaaaaaatacaccaaatctttttcgattttcatataaatacacaaaaaaattctctcattatgatcggtggcttgtgtgatagtgtagcattattatactttaaacgagtttaactattatgttatcgttaatgagtgtcggaacgaactagattcacgtactaattttagtagagagacaaacacaaaaacaaaacaaaaatcttgtacattgatggacatgttacaacaccaaacgtgtataatcacgattccagttttacgaccaaagacgtaaaagttcgattctgccttaagcatagactactttggcttaggcctgaatgttttaaccgtagttggcttgtggttaactctttaactaatggttatcatacatcccacattcactaatgaatctatcttctgctgctaaaactaaaatggatcttaactctttcggatcccgggcttattggtcataaaccgaacctatgatcatatctaatgccatgcattggaggaaagcttgaagacagttgaatacctagagggcccatctcatattgtggtcgaaggtgattatgataattagtatgtcctgtgttactattcctctgttcccatagccacgaatctgcgttttctggaatgggtgcgttaataccgggaaatccaactgtcattatctttcttggctcttgagggctagctttttccaagatttcaccttcttcagtcttaacttcttcctcttctttagtctcttcctcaccaaatatagttattctcgagtgatcatcatcgtcttcttctacagctaagtgatacaaacaaaaaagaagagacaacgtagtcatgaacaaagatgcctttgatatgataacaagagagagtatgaaagcttaccaaaatatcctggtggatatccaatctctcgcattctgttaagccatggaggaggatcgagttcctacacaagataaaaaccgcttaatcaggaatagcattttctctggtctaattttcaatactgcagaggaaggttgaaaaaatacctttagaccgagaagcttacgcgtctctgcatcaagtgagccaggcttcaagccatcatattttccacgttgaaggctctgataatatctggatggtagacgggatccaggagtctgatttctttttcttttatgttgcctccgagcattactaactgctgatcgatcaaaaggccttggacattctctaatagaatgactgtatgcgccacagttgaagcaacgtggaggatcatcaataatctccaagcctctggaacaatgaagacaacaaaaattcaaaagaatgcacaaggcagataataaagtatcaataacacattcactgtcacaaggtaaaacgaaatcagattgaaagacaaaactagaaactgcaacaaaaagaatctacaaatctagatttgtttacccttccacgttatttgaacctgaatctaaaccaattgtaaatccacggttataaagaggagtagtgctactttccactggaacagacttcttcgaagaactgtgaccagtttggtagtcaaaccaaaatgactgcacaagtaagaacgtatctatcagaaaggattacgaaaaacctgaaaatttcaagattgtatatgcttgaaagaacagtttcactcactacagatgatgtcttctgcaatcccacacgcaaagcaggaaagtatgtctcatcaccagcttctagtacttgttcttgatcctgatcatattccaaacgaaaagtttctagcttagttaataacatgaaatagtcagcaaacaagtgtccttatcatttcttgcagaattgcgaaatttcgtctacaattgttctttcaatcacaacttgaaattgattcacttttgcaaaccacaaggtttattgtattggctatataaagcactacagaagagttcaaatcatagatacctcggacaaggaattttgttctgcctcccattctgaccattgctgtaataaactttccagcttctgcttactatctctgaaagatgcaggacaataagaatcaaaacaagtagaacaccaagaatcacatataatgatagcaatgttttgagcattcaaatgttaaaagcttcttgttatcgagttaagagtcttcgtttcatcgaaccttgttaagtgtttataagtaacatggactgaaggttgctgttccagagagattgttctggctcttttaacaccagatttagctgacacatggaattatggaaaagaaagaaagagaacataatcacaagcattcaagtcttggagcaaatgattgtagaaactatactcgaagcagaggtgtttaagtaacacaagcattagcaagctccaacaataagaagaagaataaggatacaactaacatctactttcacggtttcgactctcacatcaacagcatccccaacctccacgatcgatgcttgtcctgaaaactggccagacacatttctgaaatcatcttctgttagatccatgtcttcctccatgtctatacttatttccccctcctcagctgatatagtcaagagcaaaaaacagaataaatcccaaaagctcttctttattcaaatcaaaacaatacatacaaacaaaatacctcagcaaagccaataaacaaagctcaaagctaccctataaagctctctaaattgatgagtctcagaaacaagacctcattcttatttaaagttaaacgtaaaagcaaaacactctaagaaacggaaataaagaaatggaaactcgatataacttcctaaagtcagtatacacaaagaatacataacaacaaaaggattgaggtcatgtttctaaccttccaaaccagagccgcttgaagctgccatttttaactaaaacatgtgaactattatctccttaaaaagtttcactaatcatccaccaaagataaaccctgcataacaaaagcatacaccaatgagcaattccaaaaactctacacaacattcagaatccaattgtactatcatcaagaaagaagaaaccaattctctgtgtaaacaaaatcaagattcttcgagctagacaattcaatcacagctcatagtgttttctccaaaacccaattgataaaaatgaaaacttgaagcaacaacaagaatcaaaagtgtttcacttcaaagcccttgcgcaacccttttcaatcaaattagggaatatgaaacggcaccgtaggtcacgaaagagaagaacttgaaatcgaaacaagaagaagaagaagaaaggtttaacctttatcaacgggaaacaaaaattctggcagacacgagggaagaagaggcgatagatctgtgtgggggattcaaaagagaggcttttattggtccgcccaagaacaatgacaaattatccaatgtgaccaagttcaccgtaactattataaaactcacccatcatcattttccttttttttttattattattaattgacaactgaaaacttaaatgtttttttagtatatgcttcaaaaacttaaacgacaactaatttgaatcgaacgatacgagatgacttaagtaacatgacgatgatcattggcattgctttcactatcaaacttgactaatggattgtgccaacaggcaagaaaggcaagtaaggtaaaattacatcagtctttgatcttcacagcctctctcaagcaccacctcgattctgtgtacctgctcgagaacacaacaatggagattcaagaatactcgatcctcttcaaaagaatgctgatatcttcacctctaagctcttgatcattgtctataaacacattgatcgcatttcgcctaagggcttccacgagatggctaacgaagttgtggcgtagctgttctccacgaaaagtgatataaacttgatgtcgcggcgagcatccttgcggttcatttagatgagaccacgagagatagagttaattatttaagtaagggttattttgcacatctaatatacatgatcacaattgagacaaagccaagtgattttggtcaataatttaaaagaaataccctaaaataacacgaaaacaaattttatagacacatataacacacacactccataatttttcaaaattaacataagtgagtttacacattaattattatatcgtatctaattatgtacaataataaaatcaattacaatttagaatcatgattagaatacgatcgcatgaagcatcaatcaaatgcttatattagtttcttaataataaattccttacctttttggaactttggagatggtgtgcttaacttggtaacaaaatcagaattaaaataaagtcagttgctagtcttaattatagtaaatgaatagtattaaggaccactgcaacaattataaggcccaaaatcaaataattatttgaccaatgtaaattaaagtttcataacatggaatatctaaccatataatcgaatgcaaattgcaaagtagtcaaaggtttagccaatccatttacagagatgacttgttgatttgtagacccttcgatggttgataaatatatagattgaccaaccgtatttatttaaaagaccaaaagcttaaacaatggtagcatcaataggagtcataagactgaaaagcagttttacgagaaagtttgcaagaacatttgcttttctctggattaaaaagagttttggttctagtaattatgcatattaataacaaaaaatgaaacctgtcttaaacaacaaatacatatacaattctaagattttgtaagctttaaccctaatttcattaagaacttgaatattgattttgttccctcttgtgcttggtttatgaccgaggacttacctccaacaaattcatcttatgactctctgcttcttttagttcaaagcctacgaaatcataaagtctctcggcaacagactaaatactagttaaaatggagtgattttgtttcaaccaatccgtagtttttgtttaaagcaaattactatcgaatcacgaattagaaaactcacaaattacgatcgaatcaagaattagaaaactcaccaatttttaccaacttgatggatatatatttcttttttacggctatctgtaaccaaaagaaaaaacgtatgagatagctgtttgcatattgatgtacacaactacacatgtttcatgcttctaactagttaaaataatcttaagaatatggaatcataagtcataagttgcgtcgtaagagatattttcaagatcacgtacaattttcaacttctatatttctttttttttttctttttcatttcctgtccacactgttctcctttatgtcctcacaaaactactaggcagttgtcgggatcataacaaatattttattattaaattaaaaaataattttacttataattttcttcgatgacttcttttagatttacttatatgtttaaataaataaaattaagaaaattaacaaactaattaaaagtattattttaatactaaatatgaaaaacataattattccgatattaaattagctaatcttctatgtcttttaaaagaagaaaaagttagatgttctaagttacgtggtcctttcatatttatttagttagtaagattttccaaagttttaaagctgttgacaaaagaaaaaagaaaatatttttcaaaggtttataatcattaagattaactagatatcacagtacacatattctggctctattcgaacctttttaattgtatgtgatgtacagaatgttcaagttttcaatgatcaccctatactttgaaatatatttaaacacagccggaacaaatatatgtttttgataacatcttgttctatcaaagtcatggaataacaaaaataatataattttcaagtggaggaagcaaaacaaactacttaaaataatccttgtgacaactgacaagtaccacacaagattttctatcttatttagatttctctatttggtattcatctttaatattcaaatgattactcaacagatctttactgtggagatacataatatctgaaacaaattccccaagaaccatgatttggtgatgacttaaaaatctgaatctttgactaacaaaacaatggtactagctattttagaaaataataaacattggctaaagtttgaaaaaataaggtcacgagactcacatagcttcacaagtcacacaacctttgacatcagcctccgccacacacacacaatatatatatatgatctacatatatatattatcctccattttcatcttctctcatatctacaaaccacacttttaaggttcaatatttcttcaactctatctgccctcttttgccactttattacatgtatatatattagttcaatacttcaatctttttctcttacagattaactatttacatgtaaaaaaaatgatttgtctcttaacttttttgttgggatatactgtattcttgaattaagttgttgagataatgtttatctccgactccaaagtgggatctaattagttttcttcttcttcagttcttctacatatattagatggtggtgaggatgagactaggaaagattgtggaaggcttgaagtcgaagataaagactggtctaaggatgcggaagagatcatcattatcatcatcatcatattcatcttcatcatcatcgtcatcatcatcatcatcatcgtatgagaagatagagaagagtgagagtatgagatttgagttgagaagcaaaaaggctcacaaaattatccaagaaacccttcaaattgctgactctcccacttcaagaacttatgctttctgatttcatctttttaacatccaaaacatattcatacatacacatacatatggatttacgtgtacgcgtctgttatacatatctatcaaaagcattgtacgtgtgttttgtatgtgtgatggctattatgttggctaaatgataattaggtgaatgcaacaatattattctgcttatagttgcagctataaaagaaaagtttgtctggtttttacttttaccaatttcttctttctaaaatcacggaattc

SEQ ID NO: 123 - DNA, 55721 bp, Arabidopsis thaliana
aagcttttttggaagagtttagagtttatggttaacctttttttttaagagattagtgcgttatagttgcaaatagtgcgtttttttccatcagaaaagttagtggaaacatgaacaaattgtcagttaaattatgttatcccacttgaatatttttgcattttgcttttaatttctaacggtccaccaaatcaccaaatggagtattttaattattcttgaattaaaaactcactcaaagatttgcttcttcccatccacccaggcggattgaagtttttagcgtctttttaattatcattttgtatttataatttattagatttttaaatttataatttgaaaattattatcatttatttattttatatcagacttaaatataaaaatattgtttttgagttgttatatttgttacctaaattcttgccaaaaaaaaagaaaaagagagaaaatcttctagcttcgaaaacatctaatactgtaatagtaaaatcattaaaacttttaaattggtttatcaaaactatgtcgtatattcttctccttctccacggaacccacacatagtagagaaacaatatgagcagtttatcacactcttgagttaccaattttctctcatttctcattattccttcactttctttcgaggtacttcatacatagtcgtctttctcaagttgttgtggattgtagagaagacctaataagctagagaatggattcgaggaagtctttatcttccatcgatagcttcaacgattgttacgtttgcttgtaacccaagattcgaaggtcaacaattccacggatgatataccttacttgagtctttatttctaaccagttatatgttacaagctaagtctgattcttgtattcttttctaccattgaaaccaataaaatggtctccttaccaagtaaaacagggttattattatgtactctaacaacattttccgttcaatcaatacaagaagcttttggatttcttatttcttttttttttttgggtttttttctttcaacaaaatgattataaattatttatttttctttaccaataagatttggggttttatgaaccatgatgaaatacttttttgtctttttatgaagaaatgatataactctgtttctcctctcttggtagcaattggctttttatttctcaggtaagtagtctcccccttttaaatccttattgggtgttgtattctcccaacaggcgtgagatgttcgttaaaaacaaaaacaattgctcaagagcatggcgtctggttctgttatgtatgtgtcttgttttaggtaataagagtcaacttcaattttgtggtcactttcttgctaattagttgtgataacagctgttgcttagaaacttcaacggccaagacttcaattttgtctcccagcgtagtagacttggaacttctgatatgactttgatcacaaacaagatatatctttaaaaaaccactttagaaagaaatctatttgccaaatcatccatctttctgaaactatgtgttcaaatggcatctttgtctctcttcttactttatctctcttgttaggaaaatcatgcagtgaaacagatacgctacatcagggtcagttcttgaaagatgggcaagagctcgtttctgcttttaaaatcttcaaactcaagtttttcaactttaagaattcagaaaacttgtatcttggaatttggttcaacaatctttatcttaatactgatagccaggacagacctgtctggattgctaaccgtaacaatccaatctcagaccgctctggaagcctcacagtggattctcttggcagattgaagattttaagaggagcatcaaccatgcttgagctaagctctatagaaaccacaagaaacacaacccttcagcttttggattctggaaatcttcagctccaagagatggatgctgatggatcgatgaagcgggttttgtggcaaagtttcgattatccaacagatactcttcttcctgggatgaaactaggtttcgatggcaagaccaggaagagatgggaacttacatcatggttaggtgatactttacctgcttctggatcttttgtctttgggatggatactaatatcacaaacgtattgaccatcttgtggcgtggaaacatgtattggagtagcgggctttggaataaaggtcggttctccgaagaggagttaaacgaatgcggtttcctcttttccttcgtttcaaccaagagtggacaatattttatgtattcaggtgatcaggacgatgccagaacattttttccaaccataatgatagacgaacaaggcattttgcgtagagagcaaatgcatcggcaacgtaacaggcaaaattataggaaccggaattgtttggctgcaggttacgtagtccgggatgagccatatgggttcacttctttcagagtgacagtatcttcttccgcaagcaatggttttgtacttagtggaacgtttagttcagttgattgcagtgctatatgtttgcaaaactcttcttgtcttgcctatgcttcaaccgagccggatggtacgggttgcgaaatctggaatacttatcctaccaacaaagggtcggcttctcatagtcctagaactatatatatccgtggaaatggtatataacttgtggaaatatattctctgttttttttgtcagtgtcgctttagtaactgcagcaaatctattggacattaagttttctggaatattgaatatgttgtaggtcaagagaacaaaaaagtggcagcttggcatattgttgtggcaacactgttcctcatgacacctataatttggtttataatctatctcgtgttgaggaaatttaatgtaaaaggtagaaattgtatcagaattactcacaaaacagttttagtctcaatggttttcttactaacaagttcaccctctttctttctttttatgatccaggacgtgttttatttcgtggaatatactactttctatggagagagctcactcctcaaggtacgtacgtacctgagatttagctgaataatatttgtaaaagcatgtctattaatgtaatatttgctattaatatgttagtgattggtttcatacggaggagaattttatcactaaggtttggttcaacaatagaccaagaaatgctactacgtgaattgggaattgataggagctgcatacacaagagaaatgaaaggaagagtaataacgagcttcagatttttagctttgaaagtgtagtatcggcaacagatgacttctccgatgaaaacaagctcggtgaaggaggttttggtcctgtatataaggtagtccagagtcttcatgttttttagattaacttaaagcagatttttatgtttctgctactttcttgaagggaaagttattaaatggggaagaagtggctatcaagagactatctttagcatctggccaaggattagtggagtttaaaaacgaagctatacttattgcaaagcttcagcatacaaatcttgttcaggttttaggatgttgcatcgaaaaagatgagaaaatgctgatttatgaatacatgcagaacaagagccttgactacttcctctttggtgagattttggttattaaaaggctaagaatctttcgagattacatctgaaaaaatgtcaacaaatatgtgcagatcccttgaggaaaaacgttttggattggacgttgcggttcaggatcatggaaggaatcattcaagggcttttgtaccttcacaagtactcaagattgaaagtgatacatagagacatcaaagctagtaatattttgctagacgaggatatgaatccgaaaatatcggattttggattggctcggatatttggagcggaagaaacaagagccaacaccaaaagagttgctggcacattgtaagttaagagtgactagaaacaaggagaagattctttgatcacattttaataggctctcttgtgtagtggctatatgtcgccggagtattttagagaaggactattctcggcgaaatcagatgtgttcagctttggggttctaatgctcgaaatcatttgtgggaggaagaacaatagctttcaccatgacttagaaggacctttgaatctcatagttcatgtaaaagcaaaactttcttctcttatttgttaacattctcatctttcttgcttgcgtagtcgactagtcgctgaaactctgttttctcaggtgtggaatctgtttaaagagaacaaaattcgtgaggtgatagatctgtctttgagagattctgcgcttgattaccctcaagtgttgagatgcgttcaagttgctctattgtgtgtacaagaaaacgcggaagatagaccaagtatgttagacgttgtgtccatgatatatggcgaaggaaataatgctctttctttgcctaaagagcctgctttctatgatggtccccggagaagctttccagaaatgaaggttgagccacaggagccggaaaatgtatcggcgagtattaccatcacggtgctggaggcaaggtgaattgaaaataagaaaactgatataatgtgaatctcattgttacttgaaatgtttttcttcgtttaatagagatataaacggattatatattcgggaattaggatacatactcttacaagagcaagtaatatcttaagtatcaatatacgtgcatgcatgactcttataaatttttccgttatccgaatccgggaaagtaaaagatctatacatattcatctcaacttaattgatacataaaagaagaccaaattcaagagataacatgtaaaatataacacatggaagtaatatttaaggtctaaataacttggacaagaacttctaaccacattcaccaataatattaatattaaaacatacaactttatatgataagtattgtattatatagaactcgcaaactgaagaaattccgtagaaatctagctactatatgtcgttccggtagaatattaatgatgtattcatataaagtcatgctcataacttcttcttttttgggcaaaatagtattattatgttatacagtacataagtttagcaaaatagggtctacctctcttcttcaaaagacgacataggagccaacataatgcaagatagaactaacgctaattaagataatcgaaaagaatatgacttgggtgcaaagcaaaaggattacggtttcttgagagaaactcatccaccggtggaatcaatgagtgcttcatcttcttccaatatgctgatatcatcattaatattcttggtgtaaaacttgtaacagataatccagacatcattatacctaggaatccatatactcatttctttttctttttatcaattgggtgtgacggctaaatgatgtaagaacaatgaaaaataaaaaaaagagcaaagtagaagggaaaaagcaaaattcgggagaatatttttccaccagtatttgtattggaaattttttgttggtaatacaaaactttaaagagctgctgaagttgagtaatctttacgatgttcattttcaatcttgagactatatctatatgtgttaagattgtatggtagaacgtgatataatatctgtatggtaacacgtgagagtagtttgttggtccattctacaaatcgaactaccacatgacagaaacatgtatgatgtagatgtactgtatattttaacagttgcggacaacattggtcggaaaaaaaaaactcataccaaattggtaagtagtgatattaattttggttcaatttcttgatcatgtgaataatagaattaaaatttagccaagccagccaaaaccaaaagaatccgtaagcatagcaaatataaagccactttcgaaactagcaacaatgacggtgaaataattttatcctagtttagtagactagacagtagaaacatgatgtgataaataaaatgatttaatctcatttctcatacttcacttaaataagatattatcttatagatttcatgctttagttagcttctaagcgtgttttaatgattatagggggacataacgacattaacaacacacctcaaatagtatagtttaaatgtacatttacagaaaattcattttaaactgattctaaaatgtaaatttacagaaaaattaatttaaactaaattgataacccttttatgaaaaatattctaagatgttagtcgcaaaattgaaataataagaaaaagatttataataagaaaaagatttataaaactcaattttaaacacaattattggaaaaaacttctatacagagactttgagagaccagcgagcacgtgtcaaaggcatggcatttacttcgacggctaagtgagggacagggaccctgaccgtaacagttcccaaggagttacaatgttccgtacctccttcatttgctaatccctaacacttacgtgagtagtgttagttatttaccctaatcaacatttggattaggctaatccatgtttgtgaggaccactatgatatttttctctctttttttgtttctttatcattatgatatcattataatgaaaaaaaaaaaatggcgaaaaaaaaatatcattatgataaataaatatataattggcaatcaattacacatgccaccatacttttacctttgttcacaaagtctcaaaattacagtactcacagtcagtcaaaattatagtactcatcaatataaacattactaatttagataattttatgttaatagtggatctaatttatgaacccccaaacagtaaaacttttttttctaaaacattacaataaaaatgatatttgtaataccgctatatattttacgattagtcacaatcaaaacggtatcaatcgacaaaattactgatgaccaatagaaattttggcaaacattattacaaaaatgtgttatgtcaaactaaattaaatgaaaacaaaaaatttgtaattgaattattaaatacgttgccataaattgatgttttgcccttaattaattgattacagtatgattaaaaaggtataactaacataaataaatacccttcaagaaccaaccaatctctcattctttcgtcacccaccttcttcactctctgttattttcacaaaccagaaaaattcaagtacagagaaatgatccttctctcacttcttctccatcttcttcttcatctcctcaacacttctccttctctttctctttcccccgacggtatcgctttactctcactcaaatccgccgtcgatcactcctcctcctccgctttctccgattggaacgataacgacaccgatccttgtcattggtccggaatctcctgtatgaacatctcagactcttctacctctcgcgtcgttggaatttccctcgccggaaaacatctccgtggctacatcccctcagagcttggctcacttatttacctccgtcgtcttaacctccacaacaacgaactttacggttcaattcctactcaattattcaacgcgacgtcgcttcatagtatcttcttatacggtaacaatctctccggtactcttcctccttcgatctgtaaactcccaaagcttcagaatctcgatttgtctatgaattcgctctctggaactctttcaccggatctcaacaagtgtaaacagcttcaacggttgatcctctccgctaacaacttttccggtgagattcctggtgatatctggccggaattgactaatttagctcagcttgatctctctgctaacgaattttccggcgaaatccctaaggatatcggagagcttaagtctctctctggtactttgaatctctcctttaaccatttatccggccaaatccctaattccttaggaaatctaccggtgacagtctctcttgatctccggaacaacgatttctccggcgagattcctcaatctggttcgttctctaaccaggggccaaccgcatttctcaataatccgaaactgtgtggtttccctctccagaaaacttgtaaagacactgatgagaactctccggggactcgaaagtcgcccgagaataatgcggattctagaagagggttaagtactggattaatagtgttgatctcggtggcagatgcagcaagtgtagcttttattggtttagtgttagtttacttgtactggaagaaaaaagactctgagggagggtgtagctgcacagggaatgcgaaactcggtggtggttcggtgaaggggaaatcgtgttgttgtatcacggggtttccgaaagaggatgattcggaagcggaaggtaatgagagaggagaagggaaaggagatggagagcttgtagcgattgataaagggttttcttttgagcttgatgagttgttgagagcttctgcatatgttttggggaagagtgggttagggatagtgtataaagtggtgttagggaatggagttccggtggcggtgcggcgacttggggaaggaggggaacagaggtataaagagtttgttacggaggttcaagctatggggaaagtgaaacatcctaatgtggtgaagttaagagcttattattgggctcctgatgagaagcttttgattagtgacttcgttaacaatggaagtttagctgatgctcttagaggtattacattacttcttccttcttctttttctgcttatcgaattagtctactaactaaagtttgagatccggttctgttctattgacttaagaaatttatgttgactttgactttgtcaacgctagattagacattactaccttagtgagagatgagattagatctgagagatagtttgtgggattgtcaaagcaagagtggaccaagatttctttctctttttaggcatattttggtattttaatttagaatttagtcaagttacatgtaaaagagacatgtcttgtaagagaattcgacatgtccgaataataaatatcttttttaagtattagtatatgatttaagtgtggtagagtcttagagtagaagtaattagtaaaaatagcagaatgaggaaacaatgatgagagaagtttacttgtgggctaagagtaatgattttatacacccactctgttgagcctctagctgtcccgtctttttctcatcgtaactcattacttactttaatattggatacttgtttgttttggtgtgtgaatagggaggaatggtcaaccatcaccgagcttaacatggtcaacgcgtataaagatcgcaaaaggagctgcgcgtgggttagcttatctacacgagtgtagtccaaggaagttggtacatggcgacgttaagccttccaacattcttcttgattcctccttcactccttacatctctgacttcggtctcacacgtctcatcaccatcactgccgcttctgcctcttctaacgaaccttcctcctcctctgctgcgggtggtttcttaggtggagctcttccttacacttccatcaaaccctcagatagatccaacggctataaagcccccgaggcccggctccctggagggaggcctactcagaaatgggacgtatactccttcggtgttgtgcttatggagcttctcaccgggaaatcgccggattcttctccgttaagctcttcctcgacgtctacggtggttgttgaggtgccggatttggtgaagtgggtgaggaaagggtttgaagaggagactccattgtcggacatggttgatccaatgttacttcaagaagttcacgccaagcaacaagtcttgtccgtttttcatctagctctcgcttgtaccgaaggtgaccctgaagtccgtccacgtatgaagaacgtctctgagaacatcgacaaaatctgattcaattattatattcttttttctttaatttttcctattatatttttgtatctccgatagttcttacacgaggtcgttacgtcactcccacgtctgggactagtggtcgatttgtttttattgaataattatttgttatgaaaattgaatcaaatgagttatactttaggctttaaatggctttgtcttttattttgctgtctttttctcatctgttaaaagacaactcctagttaacgggcacttgtcttgtccttcagttgaagatacacatacaagatctaatatcttccaagaaccatccatttgaaatttcgcttttcatagagtttatgcaaatgtggatttgggtttttagatttaaacgggtcacagaatatttaacttggggtaaattttcaaaaaagcataatggataattaaaatttagattggcccattatatttatcaggcccactaattaaatgtttgttgcttttctgctttttgacattttacaccggcaacctttgtcggagaacggttaagtagctgggataactcaggcggcgtcgcggttaggtagagtagaagaaactacaagcaagagagagcgattcactgaaggtaaccacgtcttaaacaaaatgaaccgaactataaccgtttggttagaagatttaaaacggaatgatccggtttgattttttggtttcagattctgcgggtactggcgccaaatcataattcgtggttccggtcaaagtcacggcgaaacagccatggctgattctcaatccggttccaatgttttcagtttacggatagtttcaatcgattattacatggcttctccaatccctggttataatatttgctacagtagcttccaaggtaaggcaaaattctctctttatactttctaaagcttacgcctttttgaatccaatggttgacttcagaaattttgactagagtaatgctccagtttcgttagatgttaaagggcaagtttttgacttgttactatttgatttgttgctgggaatttaaggtagtgaggtaaatgaagtccctgttataaggatatacggctctacacctgctggtcagaagacttgcttgcacattcatcgtgtaagagttttaattttactatcttgttttaagaaaaaaaagtttgtttgcttgttgctaagattggaaactttgtttctcttataggctttaccatatctctatattccgtgctcagaaattccacttgagcatcataaaggaggtatgaattcgtaacccatttataagtctactgagaaatatactagagttagctagtcaagcaccaatgacaattttcctttttttttgcttcagtggatggaagtacacttgctttatcccttgagttagagaaggctctaaaggtgtgtattttataccaagtgagccatggttttttagtcttgactcttgacaatgagctgcgtttatgtatctggctttttttttttttttttttttttttttttgtggtttctgcgtgttcccatagatgtgttacaatcaatattgatacttgatttgggcttgtagcttaagggaaatgctgcttcaaaaaggcaacatatccatgattgtgagattgtaagagcaaagaagttttatgggtaccactcaacagaggaggcttttgtgaagatttatctgtatcctgtatatttaattttcgagcaataccattttcttgagcagtttattatttaatcaccttaacagtatagtagctaccatccacccgatgtggctcgtgctgccagtcttcttctggtacgatatcttgatgattccactccgccattattctgtactttatgtatgatgcatataattttggtgaaaatagtatgctgataactctttttattttcctctctaggcaggtgctgttcttggtaaaagtttgcagccttacgagtctcatattccctttattctccagtttctggtaatttttcgttgttatgtattccaaagaaatcgtttagtgactaggattttgtcaaacttagcaatttcagatatgaaagttattctgtcaaaattgctacggattatgtaccatcaaaatgtaattaaaatgaaaaacggagctggggggatactttttctatgggatagtcatgcacatattcatgttaataagtaatgctgatccaaccacaactatatataataatttgagaatagtcttttggtgccctgaagccttccttacttgtcagttttcagctacttttcacttatatatttgctcttgaacccttccaaccaaaccttagatactaagtgtccccctccctgtaattccacgacagtttgtctgcatttcaatactgaagtttctgtgattttcttctataggttgattataatttgtatggaatgggtcatgtgcatatatcaaagatgaagttccgtagcccagtgcctcaccatttccggccaaggagatttgatttggatgattgtccgggacaaaggattgacgaagtggctattacaaaggtagatcttcaaatacttgatgctttgcgttatattgtgtggtagttttatcttcttttatatcacaatactgaaacaatgtagcaggcaaattcaagtgctgctgcaagcgtcagttttcctgtttggagcttgtcaacaatcccaggtcagtggatgtggaatctctctgaagaatctgatacaccgttgagccagagccagcataggcaccaacaccattacagacgtcagagtctctgtgaacttgagggagatgctactagtagtggtaattttcctgattcgaaatttaattgtttgtgtttcatgtatgaccggacgtttgaactagcctcttctcttgtagatattctcaatcaacagtttaaaatgtacaactccctttcacaagcccagtctgatactaacatggttcagtcgcttgtggcaatttgggaggttcattctactttcttggttctactttgaaattatttagttggtattaccttgcctaacctcgtcacttttgttcaggaggagtatgaaaggactggtgtgcatgatgcacctatacctcctgatcctggtaaaccctctgcagctgatgtgttgcagactatgtcagattatgttgggtttgggaatatgcttaaagaaatgctaaacaaagttgaattgtctccgcctggtatgaagcctactgcagtatcttcagctggtccagatatgcatgccaaacctgaaattactgatctacaggctttgaatcatatggttggtacatgcagtgagtttcctgcatcagaacagctttctccacttggcgagaagagtgaagaagcatcaatggaaaatgatgaatatatgaaaacacccacggacagagatacacctgctcaaatacaagatgctgaagccttgggtctctttaagtggtttgcctcatctcaggctgcagaggacataaactcagatgatgagattctccgggaaactatccttagtcctcttttgcctttagcgtctattaacaaggttcttgaaatggctagtacagattatgtgagccaatcccaaaaggaatgtcaagacattcttgattctcaggaaaatcttccagactttgggagttcgactaagagagctttacctagtaatcctgatagccagaatcttagaacttcatccgacaaacaatctcttgaaatagaagtcgctagtgatgttccagatagctccacttcaaatggagcaagcgaaaattcattccggagatacagaaagagtgatttacatacgagtgaagtaatggagtataagaacaggagcttctctaagagcaacaagcctagcaactcagtatggggacctttaccttttacactgaccaaaaatcttcagaaggactttgacagtacaaatgctagtgataaacttggtttaacaaagattagttcttaccccatgaatgagatgacagacaattatattgttccagtcaaagaacatcaagcagatgtttgtaatacaattgacagaaacgttttggctggatgttctctgcgggacttgatgagaaaaaaacggttatgccatggagaatcgcctgtttcacagcatatgaagtctaggaaggttagagattcccgacacggggaaaaaaatgagtgcaccttgagatgtgaggccaaaaaacaaggtcctgctctttctgcagaatttagcgaatttgtttgtggcgatactccaaatttatctcctatagattctggaaattgcgagtgtaatatatccactgagtcatctgaacttcattctgttgatagatgttcagctaaagagacagcaagtcaaaacagtgatgaagttttaaggaatttgtcatctaccactgttccatttggtaaggatccacaaactgtggaatcaggaacactagtgtctagcaatatacatgttgggattgaaatagatagtgtccaaaaatcggggagggagcaagagtcaactgccaatgaaactgatgagacgggaagattaatatgcctaaccttaagcaagaagcctccttctctcgattgcctaagtgctggactgcaggattctgcacattctcatgaaattcatgccagggaaaaacagcatgatgaatatggtacctttactcatcttgttctggttctagtttctgccacttctacagttaatgcaaatgcggttgaaatataaatttataaaactgaagttaggtcaacttaagttcttgcagaacttctctctggctgtgctctttatttatttttacttcgacctgagatacttctgacatcctgtttgttttttgttctcttggaagagggaaattccaacgacatcccgttttttcccttggaggacaacaaggaggaaaagaaacactttttccaaggaacttcccttggtattcccttgcatcatctcaatgacggctccaatctttacctactgacccctgccttttcacccccttctgtggattctgttttacaatggatatcgaatgacaaaggtattgtgtagagttagtcggaagtcactggactgcctaatttaattcaatttaacatattctcaaagtttcaatatacatgcttaaagcgttttcccttacgaaaatggtactgtccctgattaagatattcatttcattaaaagtaagtgaaaatgataacttttgttttaaacttttgaatttttccacgtccaggagactctaatattgattcagaaaaacaaccattacgagataatcataatgatcgtggagcaagtttcactgatcttgcttctgcatctaatgtggtgtctgtgtctgagcacgtggagcagcataataacctttttgtgaattcagaatcaaatgcttatacagagtcggagatagatctgaaacccaaaggaacgtttcttaatcttaacttgcaggccagtgtttcccaagagctgtctcagatttcaggccctgatgggaaatctgggcccactcccttaagtcaaatgggattccgagatcctgcgagcatgggtgcggggcaacagcttacaattctgagtatagaggtgctttaacttaaccctcgtctttgtgaagctacagcttcaattactaagagtcctcaaatggcctttgcacgtatagattagtaatggacacttggaatggtttacaaacagtggacttaggaagtcaaaacgtgcagctcgttaaaatgagttttgacctttacaagctcgtcttagtatattatattttgttaatgctgttaccaaacggccctctgtagtacaaatgaactttcttaatttaagatgatgtcttctgcgaaaaggttcattgatacatgttaatatctataaacttataggttcatgcagagtctagaggggacctgcgacctgatccacgatttgattctgtcaatgttatagctctcgtcgtgcagaatgacgatagttttgtagctgaagtatttgtgcttttatttagtccagatagcattgatcagaggtaatataccagatttacttttttttggtttcttagaaatcttgcgcctgacgtattcatgcttttattgttgtctcactacagaaatgttgatggcctatctggatgcaagttgtctgtattccttgaagagaggcaactattcagatattttattgagactttatgtaaatgggatccagatgttcttctgggctgggatatacagggcggatccattggttttctagctgaaagagctgcacagcttggtataagatttctcaataatatatctaggacgccatctccgaccacaacaaacaattcagataataagagaaaacttggtaataatctgctgccagatccgttggtagctaatcctgctcaagtagaagaagtggtaattgaggacgagtggggccgcacacatgctagtggtgttcatgttggaggtagaattgttctcaatgcatggcgtttgattcgcggggaagttaaactcaacatgtacacgattgaagctgtgtcagaggctgttttgaggcagaaggttccatcaatcccctataaggtattgacagaatggttttcaagtggtcctgcgggtgcaagatatagatgcatagaatatgtgattcggcgagcaaatttgaaccttgagataatgagccaacttgacatggtatgtaacatttagaacttgatttatatagtgaattatctgcaagttgttgatcccactaaatcattgtttgcagataaatcgtacgtcagaacttgctcgtgtttttggtatagactttttctcagttctctcccgaggttcacagtacagagtggaatccatgcttctgagattagcacatacacaaaattatcttgctatttctccaggaaaccaacaggttcgttttatctgctacttccaagtgatttacttttaacgtttcttggattataaccagtcgtctggccttattcaatggactggtcatgccttgttttgtcttcatgatagctttcataatcttttcacgcccttcttactcattagtattctcctaactaaatcatgtgatcatgtaggttgcctctcagccagctatggaatgtgtacctcttgtgatggaaccagaatctgccttttacgatgatcctgttattgtgttggattttcaatctctttacccttcaatgattatagcatataatctgtgcttttctacatgtctcggaaaacttgcacatttgaagatgaacacccttggggtcagctcatactctctagacctcgatgttcttcaggatttaaatcagatcctacagaccccaaacagtgtgatgtacgtgccaccagaggtaatgtgcattgtttttcttgagcaaattaaatcttgtatttaaagtcatcataatcaatgcaaacaatgatcttatttcccgaaagcatcattgttttctgcatcgatgagttcttttcttatttagcttaagcatagtagtcaccttctcttctttctataggtgcgtagaggaattttacctaggctgctagaggagattctgtctacaagaataatggtgaaaaaagcaatgaaaaagttgactccttcagaagcagttcttcaccgggtatggttatcttgatcagagtccaaatttttggtttgaagataaaatttgcaattttgatggtatacagtgtcttctttcagatatttaatgcgaggcagcttgctttaaagctgatagcaaatgtgacttatggttatactgctgctggcttcagtggtcgaatgccttgtgcagagctggcagatagtattgtccagtgtggtcgtagcacacttgagaaggctatttcattcgtcaatgccaatgataattggaacgctagagttgtatatggtgacactgataggtaaacattaaccaccatctttcatggcactattttaacttcctacaatataaagtatagccagggtttcatgcttgcataagttaatatatattcgtattacttccgagtgtttattatggtcatttcagcagccttgacaagtatgtatcacagtttctttatttacttcttcctcgtggcctcatgcattttaattacttctgtagtatgtttgtcctcctaaaaggacgaactgtaaaagaagcttttgtagtcggacaagagattgcatctgcaataactgaaatgaacccacacccagtcactttaaagatggagaaagtctatcacccttgtttccttcttacgaagaagcgttatgttgggtacagttatgaaagtcccaatcagagagagcctatatttgatgcaaaaggtattgaaactgttcgaagagacacttgtgaagctgttgcgaaaactatggagcaatcgttgagactcttttttgaacagaagaacatctctaaggtacaaatttgatttcttgcactctttcgaattatcagctgaaactgcagtgtcgtacatctgcttttctctattcattgtgcaggttaagtcgtacttgtatagacagtggaagcggatactatcagggagagtgtctcttcaagattttatctttgcaaaagaagttcggttgggtacttacagcacaagagactcttcactccttcctccagcagctattgtggcaaccaaatcaatgaaagcagaccctcggacagagccacgctatgctgaacgagtgccttatgttgtgattcatggggagccaggagctcgacttgttgatatggttgttgatccactggttcttttggacgtcgatacaccctaccgactgaatgacttatactacatcaacaaacaaattataccagctttgcaaagggtatttggactcgtgggtgcagacttaaaccagtggtttttggagatgccccgtctcaccagaagctcccttggtcaacgtcccttaaactctaaaaactcacacaaaacaaggattgattatttttatctatcgaaacattgcatcttgtgtggggaagttgttcaagaatctgctcaactatgcaaccggtgccttcaaaataaaagtgctgctgctgcaaccattgtttggaagacttcaaagttggagagagagatgcaacacctagccacggtaagtactccaaaatctaacgtttatgaactgttacagaacttggtaacgtttacaaccatcatcttactgtctttactttccaagagatcgtgtgcttcatagaaacttgtacactttctgatgtgagcatttgcatttaatcttgcacacactttgaattcaaagagacagtttcatctcatggtagtcgcaaaacaatttatgctaaaaagtggagacttattagtttcagattatctttcagaaatgtttgctattttataacaagaacgagtgtagacctctttccatgtgtgcttaagttgtgaccttggtgaatctctgtagatgcattcagttccaactttgttggtccattaattgatttttctttatattatcttatttgcagatatgcagacactgtggtgggggagactgggtggtgcaaagcggagtgaaatgcaattcccttgcgtgctcagtcttttacgagagacggaaagttcagaaagagcttcgtggcctctcctccattgctactgagagtgagctttaccctaaatgcatggctgagtggttctaaccttgacgaaaactcaaaaaaaaaaaaaaaaaaccagtaatctaactctatcccatacgtatttccactcaaactaatctaaaccatcctatcctgttaagtaacgatgtgaatttttgtatttgcaggattttgagcgaactagtaggtttatatggttgtgatcaaagagcatttttttcaaggacgtgtgaatatgtgtatagatagtagtagcacccacgagtacagtactgtcactcatcattctgttcaactcctttgtgttgtgttgtgtataagcaatcttggaaaaaataattataattttgtatagcataccaagttcacgagaaagatagatagatagataaagaaacaaaaacaacataacaaaaaaaattaacagaagaaacaaaaacgcctacgagtcttttgggtggtggtgagatggtgcaatgcttcaatctctctctttttaagactttcgagcacaaccaactgtttcacacaaaatgggtgataatcccttcaatgtaggcaaaacttatagaatgcttaagaaaactgaataaggaaaaaacctcacctcttcaatagcacgctcccgcaaaatcgtaaagtgcatagccctgtgtttggatataatcttcgtatccatatatgataaagcaactacatggaaactggcagagttatatcaaacatataaatggtcatggatatgagtgtacaaaaagtaaaacagatttggtcatacacaatttgaatttcttcccgtaataaacatattcttaggctctatatatatatattgtatcaatgttattgagatcaataacacataataaagagttttcccccaaacccttctctagttagtagtttctataattttggcaaatagtattcaagtgctcttgcattctcaagtgattaattcaattcctaggtttcggtttcggtttcggtttggttcggttcgtctcggttattttaggaaaagaaaacaaaattagagagcaaacacgattggtcaaagtcaactcttctctaccttcctcacttcccagcttcactgatcatcgccaatcacaaaaccaactacacacattcatcatcatttcgattatattttacccgaccatgaccggagctagccgtcggagcgcgcgtggtcgaatcaaatcatcatcattatctcccggctccgatgaaggaagcgcttatcctccgagtatccgccgcggcaaaggcaaggaacttgtatcgatcggtgctttcaagacgaatctcaagatattggttgggttaatcatattagggattatagtaatctacttcgtaatcaatcggctagttcgtcacgggttgttgtttgatgagtcccagaagcctagggttatcactccttttcctgctccgaaagtcatggatttgtcaatggtacactaatattatattcactactcgtttttttaaatcatcaaagtcatgaattggaaagattcgttttttgtatatgtgtaccagtttcagggcgagcacaaagagagcttatactggggaacttatcgtcctcatgtttattttggagttcgagctaggtatgcaaattccactgtgaatgaatctctactctgggatattctttgtacaagtaaagaagttgtatatggcaatgcagaactccattgtccttggtagctggcttgatgtggcttggtgtcaaagatgagatgtatgttatgcggcatttctgtgaaaactctgatgatttaagtacatttggctggagagaacataatggacgggattatggtcggcaagagctggttgaaaacgatatggtaatagagacgagttttgtgaagtccaagggagacggccttggttatggtggggattgggcagttcggattgatgtaaaaaataaagggtaattgctaatatgcattcgtactgtaatatacttttcttcacagtgtcggctttttgttattttggcttattgatagaaattcattttacactgtggcatgacaatgggttttttatttgaccatggtggaactaaactaggttgaatgatgatgtgaagagaagtgcacatctcttcttttatttagctgatgaaggtggcaatgttttaaatttaggccaagatggtttagatttccaagggagctctctcctggtttcggggtcacgtgaagatgtaggagactggcagatacacttaaaatcacaggtaatttgtgattgaaattgctctgtagaattcttaggacttttgtagctgtctctgctggaagtggatctgcgggtggtttgacattttctgtcatgtttcggatgtcatccgctgatgctcatctggatataaccattttgattgttcttcatttgcagaatcagctcgagacacattattccggtttcaagacgcctcacatatataatttgtctgatctagttcagcaaaatcttgctctgcaggtctgctagttttcgagctcataactcattttgaaagggtccaaagtatatttttttaaagaccgcaatgcttacagttctctttgcttgtatgttttcaggcaaggaagtttggacgacttcagctctctgacacatcagaggattcttctaacatttacatctttcaggtaatcagtcttaataaagatgtatgcatgtgtatttttgtaaaaatatatagaattttcttaactcctatggaatctgtgatcaatatgtttcaccatgtccaatggcaacatacagatttctgggaggctaccatttacgattgatattcccttcatctccgggatcaaaggagaaagttcaaatgtggaaaagcgtttaacaagtctcacaggtatagttaacctcctgttattatcaagcatcattagtgatgtgttttgattttcttaaccttagtttgtggatgtgacttccatttgagtttgagtatggaagaacttctcctccgtttatgagttttttacggcaacattatccttttgagtttcataactcagataaagaatgctagtctgaaatttatgtttgggttctgtgtgtatttttgtgtttcttaagtgtccctccaacctgaggaaaagcagtagcttattattctgtagcttcgctaagaatactaattatgtgtatctgttatgattcagtggagcgtccatttaagaaatgttctctgatggcactatatcattgatgttgtctacttttattgcatttgtactaagtttcatgtatatgtcgtgtaggtttgccactctctgatctacttaaaaagaaacatcaagaatttgatgcaaagtttaatgaatgcttcaagctttctgaaaaggtatgctacacatgttacccatgctaataaatattctttagctcacccagaggtcttgtttcatggatcttcatgttgttgtgaaaaaatcactgttaacaactttgtctggatgtgaagtcgagaacagcgattgctgagcacttgctgtattgacttcagcagtttcattcttcacctctcagaatctccttccactaggattagtctctctctgcttatgtgctattctgtttctcaatggcgtacatatgttgtcagctcctagttgtcataacgtacatatagttaatactttgcatctattcaaatcgatgttcataaaagattgagggtctcaatctcagtttcctctggttccagcatgattcagaaacattgggggttggaaggactgcaattgcaaacatgcttgggggcattggttacttctatggccaatcaaaaatttatgttcctaaaagcactcaggcgagtttatttccatccagcatcttatgtattattttttcatcctatttatgttcctcccatctgcaaactagcttggacctctcacagaaccacacaattgataccttctattgcagcctggaagtcgggataatttcttgctgtattggccagccgagctgtacacagctgttccaagccgacctttttttcctagggggtttttgtgggacgaaggtttccatcaattgttgatctggttcgttcttattaatcatttgtctgttgaagatttctttgctatgctattgccacttttgtttgaccaattattattacaaaattacaagctatattcctcctactagttgatcatactttggaatttgttgtgtgtgctttgatcaggcggtgggatattcgtataaccttggatatcgttggacactggttagacctattgaacatagatggatggattccacgtgagcaaattttgggtgctgaagctttgaggtatttactctctctcactaaccgtggtagtcatggttattgttgtaattgttttatagtgtttctctacctgcagtaaggttccagaggaattcgtagttcaatacccgagtaatggcaatccaccaactctgtttttggtgatacgtggtaagaatctgttgttcttttatctctacttactttttcgtttgtcattgctctctttgtttcatgtatgcctttgtgtcataaaaattagtttattttactaccaatccttgaccagcatttattatagaagagggaatcagcaatatcgttatcagcttccttccgtttgttgtaccgatatttctgttcctactacaattagatgtttagaactttgtagccaagatcataagagtgctttcggcttcctactaattttgtggattgaaaatgtgacctatccttgtaaatatagataaaggcttacaattaattcagctccatatagtgacaatctctttttttcagatctgattgatgctataaggatggaaaagtttgtcgcatcagaaaaggatgaagtattgtcattccttgagcgagcttctgtacgcttagatgcttggtttcagtggtttaatacttcccagaaaggtaacaacatggatgtcctctagtgtatagatttatagaatcctttcagtcttcaactgctatgtgttttagagttagtagtaatatcttaagtgactattgcttaccaatcacaattggatttcttgttgttaatcacgatccgtagatgtgatgagtttttatatagaactgatatttttataggcttaatatggttggagtgggctagttcatatgtttagtaattaatgaattgattaaactctaggcaaggagatcggaagctacttttggcatggcagagacaacacaacaactcaagaacttaaccctaaggtactatttctttgtttctcataaactgaaggctctatttttaaccctcacatagactgtgtcgagttttaaggttttctctgactttagctgcttccgtatgctctatatcaatatatgataccattgattgatgaatttttgctgcagtatattcttgttagcgacaaaatgtctcaaaatttattgggtgtgtgagcgaccatttttagtaggattgctactgtgtcagctgtttatttgcggatatggtagatcaattgacagatcctcagagatgaatttgatatcttaaatttcttgcagacgctttcgtcggggctggatgattatccccgggcttcgcaccctagtgaagatgagcgacatgttgatcttagatgctggatgtaccttgctgcagattgcatgcattccatcacagagcttttaggaaaagaagacaaactttcaaaggttagcacaagatggaaaagaaaggggcgtcttttttttttttttttttttcacatgttactgacgtaaaaaaaaaaaatcctgcaggagaattacaattcaactgtcaagctgctttcaaatttcaatcttctgaatcaggtttattctctatcagatgccaacaattttctcactttaacttcattaattttctttttcttctcaccattctctattctcattcatggataatttctgagcagatgcactatgatagtgactatggggcttactttgactttggcaatcatacagaaaaagtaagagaagcttcataaatcaacaagtctgagtgtcaaatttttgtcatatagaagaagaagaacggatgattcttggtcttttcattaacccaaatgttcggtgaattgatccccaggttaagttgatatggaaagaggtaattcaagaaaatggtcaattatctcgacaacttgtaaggaagacttttgggaagccaaagctaaaattggttcctcacttgggttacgtcagcttctttcccttcatgtctagaatcatcccacctgtgagtttttggccaatatgttttccactattcgtgatctttgaagccctcatggatcagttgttttttaaaatctaaatcgtcacatatttttggttgagaaaggattctccaattctcgagaaacagctcgatctcatttcaaataggagcatcttatggagtgactatggactagtttcgcttgccaaaaccaggtaagcccacaagaaggagcatacatagtcgaaattatcttcttcaatgataagaaagaacattgttttgatgcagttctatgtatatgaaacgtaacactgagcatgatgcaccatactggagaggtcctatatggatgaacatgaactacatgattctttcttctctttaccattactctataggtaattttctaccctccacttggtcaaaagcgccacatcatactacaagacctctacgttttcttactatcatatgcattcggtttaccatgtgtcaaaattcctgcagtggatggaccgtatagagaaaagtcgaaagcaatttacacggaactaaggagcaatttgataaggtatattattatatggtatctgcgatagagaggtctggtttgatattaacttgaaacatgtcataaaaatacaggaacgtggttagaaactattacgagacggggtacatctgggaacaatatgatcaagttaagggaacaggcaaaggcacgcgtctcttcaccggctggtctgcgcttaccttgttaattatgtcagaagattatcctattttttagattagaacctcttcgggaacgaaactttaaattaccaacacatttgagttagaagatcagttttgatgtagggttttattattttctcatggtggttatattatagtgttacagagttaactttggtcgaggtatatgccccagattttgttacgttaagcccaaattacgataaattgttggaaaagatataccggaagctctagcttctctgcacatcccttattctcgtggtcttgactgatatctgactaaaacagcaaatgctaattgccttttaacatattccaaaataaaccactcaaaccacttcaataggaaagagattcatgacttgcctcgttgaactactatagttatataattcgtaaactataatcaatcaacatctaaaattataatatatctaagaaccaacattttggtaattcattggttgagagtagctgtgtctttttaataactttaaaatccattgtttttttttttttctttatctcatgcaaaagtgagttggaaatttcattttctttctcttttatttggtcaaaagagtttggaattattcttattcatgcttttaacccattgttgacctaacaaccacttgaacagaagagatatatacatgctggtattacattaatacattatgcatgagccaaccaccacctagtaaatgtttttttttaactttactagtactatatatacaacatccttattaaaggagagactcataacgtttgtcaatactcaaatacacacactcgaaatgttttatttttcagaactttcaatttcttgagaggagaaaattatggagaataaaatgttttattttgcaagcaatgggagattttttcttatgatactactactaagcagtatcgctgcggttgcaaacggactcactcacctgttgatgatgatactgaattgtggtgactcgatagacgctttaagcaccacagatccagaaaacatggttaaagaagttttaaaggttagattcttcgattgcttttaattattgtctttattgatgtaagttcttttacaaaacattgttcgtgaattacaccgaataacttaaaaaatgtaattacaacagaggaatactaattaatcgattattttacattcattgctgacacaaaatactgagagtgtgatggttttgatgcacaggttgggatattcatacaagtaacagcaactttctttggaggattcatgtttgcctttataagaggtctgcaattagcgtttgttcttctcagttgcatcaacttctcggttgatgtttaagtaattgaaattaacgttggttctttgaggttttccaagcttgtatagtagaaaaaagatctagctaaactggaagaagttaaaacacaacgtccgttacaactatcattctcactcactcatgtgagcagaaagagtagcatgatattttcttcaaggtctttaccaacctttcatcgttcccttctttgcaataacgctgttttgcaaaaccgtgatagtgctgagccgatgagcctctaatgaaattatagactcatcggctcaggaccattgcggttgtgcaaaacggtgttattgctgagaagggaacgcatgagaggttggtaaagacctcaatggaatcttatggtactctttttgctcacatgagtgagtgataaccatagctgaaaccaatgatgtgtttttctttttactctataactaaatatatgttttctacttcgaagtttagaatcctcattcttggttttgcattttaagagagtgtttccaaaaatgttgtaatttcaaaactggattaataaaagtctctgtaacttctcaatgtaagccattgtaaataccaaccagctttgcctttacacaaattccaaaataaatcaaaacgtaatcaatcatatgttacaagaaacaaacagaggagaaattcacaacaacactacaacagtttcaaacaaaacactctccactttattaaatcagtgttatcatcaacttaaaagagacgacaatgctctctttggatttggatcataaaaagaaatgtaaacaacacaatggtatcaatcaggctgtgattgtgacactgcatacgcaagaaccagagagtttgatctcagacgttttccactgtgtgcctggtgaagcatccgggtcatacagtaaagtacattgaccggtttcttcctgagacgagaatagcaaaagcttcccactcagcttaccaaactgaaacccggccctcgagcttcctgatagcggaagagccaccacttcccaggtttcgtcttccgcattgaacaccgacatcttccggtggttcttccagtcgatacagaacagctttttccctacttcaacatgagctgtgaccatctgcaagtgaacatatcaaaaagttgaatcttaaaaacaatcgctatactcgaaaaccgagctaaggaataatactcaatgagcaaaagactcaaaaagacttaccgttaaaccgtttttgctaccatgccaggagccacattgagtgttgtacacatcaagaagttttgagtttccaatagtgaagttggatctcccacccatcacatatagcttcccgttgaaggcgctagcgaaacaaccccacctcggacgccttaaagactctatgaaagtccatgtacacgtctcaggatcatacacctctgcacttgacagactctcaccatctaccccatgacctcccacaacataaacatgcccgttcacctcagcacaagcgaaatcataccgagctacctccaggtctgctagtctactccagctattgaggcatgtatcatactgataaacatcagcagatgcaacaagcgaaccgttgatcatacaacaaccagcaatgacaagaagtttcccatcaaccacaacaaccttaaaccctgtttttgcaggaccaggcatcggtggaagagatgatagcttctgtcccaaacagtccatcacctcccatcggttatctttcccaccagcattcatcgttaagacataaagccactcctcaagcataccagcgagtcttctcacagtaataaactctttgctctggacaacaaacctccatttcttgcatacacttcccatggatgggaacctagcacgcggaacaagcgctagacactgcttagcgacatcatcaggcaatcccgggatcaaaggatcatccataaaattctcagacaagcgtgaaccgagatcaagatttcctttggaaaaacacatgccgtgattcacaatccttttcttcccacttaaagcaaaagcttgcatctttagaccaatcttttgaacagagagatagctaaatctccctaagaacaaatctctaaactatttgtgttttgtgtatggaaatgttattaaagactttcgtgaaacccgtcacgtatagtgattttcaaagagagaggaataaacaatgtagcggagaagaatggaattgcagtgagcactgaagaatattgatgtctagcagaatctaattcatgttccataccaatggcttcgttagaatctatgactgttgttaaattgatgttgtttcttctcatacacatctctgtatctgccaagaacatgataaaaaagattagtcaacaacaacaacaacaagattcttccaaaaggaatgtttcttttttgagtaaagaagatgttaccaataaaggtcatgctagggaagaagagtcatcagccacctacaacatccatctttagaagtaatgaattttctgcaaaatatttttttacagataagtcaactctttgaaagaagtcaagaaccaataagatcaacatcaaacaaaaagatagggtgctccaaattttgcaaaattacaagcaccatataccacaaagaaacaagagaataaatctgaatggctataaattatttcctaaaagagcaaaacattatcaagaaaatctgaaaattgaagaattctctcacagaaatattatcaagaaaaccaaacactagttccaagaattgggcaagatctcaaagatcgaaactttatgacttgtttggttccaaagaaaaaaacaaaacatcaaatacaaatataggaggaaaacagagtaggagaatcaatggagacctgaagaagcagatgattcatttacttggagggggaaaatctaatccaaaatgggtaaagacatttatacaaagaaaagagaaaatggcggagaaagaagataaagatgaggttataccgagagaataggggaactttgtcggtttttgggttctgtcttctgcttcgtaatgcgttgaagttggtgcaaagaagataatatttttgacagaaagaaagagacagagagatctaataatggtaatggaggaataaataaatggagcgtcagattagggattatatagcacaatcagatcttacggtgataataatgtcaactagtcaccacgtcaatgaccccatcatcctatagtttaatactatattagtattcatatatgctctcaagacatgtttttgatcgagacaaccaagaaaacaaagacatgtttttgctacaaaaataatattatatactgcataaactaatttttgtccagatttgtcattttttattttttttgttaaagtttaccatttttgatcatattttttatatatataattatttttggtagattaatcctacaatttcacaattacatacattaaaattttaaaattctaaaactaaatttgtattcttaatcgtgaggacttcaatttgacatattatttgttcaaattttataaatttgacggtagcaaaaaaaattatattatatattattgttgattttgtatgattaatctatatttttttaagatgtaaataaagttgcaataattaaagtcttttttacacaaaacccattttaaaattagaaatggtttttatattttctgtatattgtaggttatttagttgtagctataaaattattgatggtaatggtattgaaattaatatatgtatattgtgaaatttagaagaaaaaaagaaagactcagaagatgggaaaaaagcatatcatcagatcagatgatggtgaatcggtgatctttggtgtctcaatctgaaagcacaagcaatcgtatcgtatgcctttgtatacgtctgacgtggaccaactggtatgggtagtggtgaccatgaaactctattaaagtcgcatcccatttttcactttcagttttattccttctttgtaatcctcgctatgtagggggcatataaataattcaaattatctttatcaaatggatgtgaaaatgagaggatgaatatatattgctaacagtgtggcaagatgacgatgataatacgctttgtagagatgatgattttttagccactgctctcgatatattaagcaaggatcaatagaccaaattcggatcatatcgaatacgaaccgagctggaaaatgtatggatcaagcattttgatactatattaaaatataagttttttaacttaaaactaattgacaatgaatgaatgagatatattatctcattcaaacaaaaccacttggcaatgagtaaatgatgacatatatcttatatactatcatgatcttttcctaatttccgatgtgggatattgttatcgtaagctatactgaaaaacataaccgacggttaaacaaataatcaaaaaaaaatccgaaaaaacatattttttagaaatttagtttggaaaaaaggaagctaaacatacccaaaaaaactaaaactggaatgaaatccaaagccatgataataatactaagagggtgttattgattcttaatttacaaaaaaaaattggtgacattaatcaaatcatagaaagtaacactttcaaaagattttgattttatttaaatgttaagcatcatgaacatctcaggaaaaaaaagtatccttctagtttttccgaaactctctaaaagaccaaaatggtaaatcattacaggcttcgttggtattaaaaaaaaaaaacaaagttttccaaagtacatctttgattccgaatgactttaagaaatctggaacttcaatccaaatatacacattctttagtgttaaaacttagaaaaaggataaagtcatccaattattaatgaaaagtaagacaaagcaaacatttcgtgaagtttgacttaaaccacccaccataatgaaaaagaaggcttgttaatctcttatttaatctatagcctacttatttatgaaattctgaatctaaaagcggcgacctgaaagcgatcgtttcactttttaaaaatcgttttctttgtaataatcatttgtccgcgcgatgttgacaagttatgtggtagctagccatttttgacggttcatattttaattttgattagcctttaacgtataaaaccccatttgatccatttgttaattagagtaaaccacatatgttacatggccgtgagtcacctcaggctttggataaaatctttttgtttttcgttcggatgttttggaaatcttgaataaaggtaatacaactattttttagtttgacacaaaaaaaaaaggtatacaactatttttcttcgtgtttagacagtttataaatctaactagaatatattatttaaaatataatcaaacaatcagttcactatggagggaggcaatgaagaggactaaaatgagtagttccaaaaggagaacaaagcgattacatgaatgaagaaagaagaggaagaccattatacaattgaagattacaacgctattcgaattattaattgtctatcctttgcacaaccgttcaaagattgattcgatttaggtttagaaagaaagaaaatgaatcaagctttgataggcaaaagtcacataaaaagaaatagaagttttgtgtacatttgttagaagtgcttggcatttgtaatcatctgaagtaagcaataaaagagttacaaagttaactactcttgttctgttctcttcacaaatacacaaaaatacttatatatgcttgcctttctagttgtctcggtgccatcttaatctctttggtcatttttcccaacaagatctgacaaaggtaaagaaactaaagctttgcgattgataatgtctgaataaaaaaacaagaaccgaagttattttcagcatattcttcgatttcttctgaaaaaacgaaaccaattcatcataacccattgaaacatttcgtcaaatacgtggcaggcaatacatcttagcaatgccctagtgtctttagtttggtttgagaggattaccgaggaagaaatgtcttgatgagagtcgaattgggtttcaactgaaggagaaaaagtgtcattgtgaagacatctttgaatactctttagttctttagccacttccaccatagttggaacttccccaacatgaccggtgcatctcagtgagagcaataggaaagctttcatttgacaaagctcttcttctgaaatttcgcccatttctggatctgcaatctcatccatttttggctcttccataaattttgatgtaggaaatggtcttctcataatcctatcaaatattttttcccccattagaagcatttgcatggaatgtccaacggcaaagacatccgtttcctctgagactacaccatgcttcaagtaattaggcttcaagtaatcaactgttcccgctatatagtcaacctggacaaatgtttctccttctggtattgagacgcagaaagagaaatccatcagcttcgcgacaccatcttcatccaataatatattcgtaagagacaaacacctatatacgaagggccttgggaaggcggtgtgaaggtaagctaaagcagtagcgatatcctctgctatcttcattctccttttccacggctgttcacttgattctaaatgataatgtttcttgacaccatgataaaccatgactggctcttcaaactcaagacaatatccaatcaatttcaggaagtttttgtgaccactcaccattgatgaaactgctatgtcgcggaaaaatgtatctttgtagtagacggactgggaaaaagctttcctgacaagtatcatgtcatggttctcgttcttgcctgaataccatttgtagtcaaaatcatgagataattcggaaacaagattagacacgccgaaattgttggtggctttgcggatctcatcagcagaaaagaatttgatgggattggatttgccatcgcagcattcgatcagatcttttaacagcttcgctcctctttcggaagctatctcggatttaggcttcttcttcttcctccaccaacccatctcaaaacgtaaattagaaaaaggaaaaaaactttctcttgaaaccaaatgaagaaagacctcacactgagttgatgataacgaaatgtatttagctaaattctttgttgaatattcaataccgcgtaaagatagcaatacaagtgtactactactacttttcttattttattttttaagagtgtcaaccggtttgttctggtctgttactgtgtaaaaacttaagtcaaactattccgaatcctttgaggctttgactccctctgcttattattctttcattctttctcaaagcaacactccaccaatcaaaacattcccctttttttttttgataaacacaaaacattcccttaaatcaacatttaaaacaaagcaagaagatattatttttcagtgtttgatttgccttgtaaaacgacggacatccagatttttcgaatcgaattcaaccgaataacggatcaaatcggatctaacgaatattttgcccagcgcaagagtaaacatcatatattcagcaattacaaatttaatgcgaagatctctctccctctctctctgtaatcaatgtcaacactaatatcttggaagacaagccatttcttagaaccttctagattttacctatgcagacattttcttccgccgccgctctcacctccatcctccgtcgtacaacgatctatcacggcggatttggaactggtctccgaatccgccgcagcttttattttctctcagcgatacgacaagagaaccctaatgtcactaaaaatccccacccgaacaagactattctcagatccttcttagctccggttctcccgttagacgaaaaacctaacctcgttgagcttcaagccatcggtacaatcgccaccgctctagctgactacatgcgcgtcattgttcaagatgtacctgagagtgataatggagaggatgataagattggcgttgagttgctttgtgtggtgagaaagttactgaagaagataggtaggactgttcttgttggtgataaagttctcgttgataaagttgattgggttgatcggagagctaagattatcaatgtgtttgatcgagtctcggaggttttggatccaccggttgcgaatgttgatcacttagtgattctgttttctcttgatcaacctaagattgatccatttacacttactaggttcttggtggaagctgaatctattggaattcgaatcacagttgctttgaacaaatgtgaactcgtcactcaagaggtaaggatgatgaatcatattgactcaactaggttttggtaggaagtaaattgcatagttcactactagtttatactctccatttcaggggtttaagtagagcaatgatcttgtttacaggacttggaatcttagaagataagattgtgtagttggaactatgcaccactgtttttgctagaaagacattgcgtagttcacgactagtttagaccactttgatcctttgtactctatttcaggggattgattagaaccatatcctggaatttcatagctcattagttcactactagttcagaacacttgctgctttatagtttagactcgatttcagggtttgattagagtaatgatcttgttttcaggaagtggaatcttggaagataagattgcgtagttggaactatgaaccattgttctgtagtgtgggaactaaagtcggaattgatgagattgcgtttaacctgcgaaatcagacttctgtcattgttggacctagtggtgttggaaagtccagcttaatcaatatattgagaagtagctacggtggtgacattaaacacgaagaagtgtttaagcctgtaagtttttttttgtcctacttcattctatagctaaaccttttgttttttaccatatcctcatgacaatgtataaaggccaaaacaagaagaataaaaaaaagtggtttgaagatcagagtgtaggggaagtttcacatagaaatggaagaggtaaacatacaacccgaaatgtaacgctacttcctctttgtggaggtggataccttgctgatactcctggctttaacaagcataagttgctgaaagtaacaaagcaaaaacttcccttgtgttttcctgaggtttgtaccctttttgcttgtgcccatttccccatatgtgagactgattgattgtgcactgatggtgtttcttactctttccttagatacggaaaatggtcgagggaggaaaatgtaaatacaaggattgctcgcatttaggggtacaaggctgtgctgtgacaggtggttgggaaaggtatgattactttttacaactgcttgatgagatcaaaatcgatgaggagtgtcaacttaagaagtatggaaccaaaagggaaggtggtgttaggtatttttcgattctcttgaaacaaacagcttttattttgagatttggcacaaatttggaatgattagggaagctttgacacagttgccacatgggagagaagggtgtggaacaagctaaaccacggatagatcccaagaagtataggagagaatcgaggaagacgatgaaagatgaaagagctatattaagacagcatagagaacaattaacctaatgagcagttgagaatgagagtaagggacgatgagaaattcaccaaagaggcaaagacaatgttaactaatgttttccacatagaattctaagtcatataatatgtaacctgttgtacatatgtcttttgttctcagttcttttctgttcatcaaccatatttggtaatcaagttatcaaggaaagtggaaacccagtacttgtgttgttccataaatatttgggttaagccttcaatataacaaagcttttgagtatcatatgattaaatatatatcaggaaaaaaacaatcattgtatgactagacttattcaaaagaaaacagagtcaaagaacaaaatgaaggtgatgaacgaaacaaataacataatgtaaataagactggttgataatcttgatattttcttctgaccaataaggggtagttcttggccttggttgatttgctctaaacttggagcataagagcacactggtagctgacgatacggcacggcagctactccaagatccacagttctcaagtttccagtctctccaatgatgcaagctacggatccacaagataagcttgaatcaaaaatcacagcgtgtttcttctcttggtcaatgaaaaaactcccaactaaaatcggaagtgtacagtaagtaatttttaagaagttgctccataagaaccgcattgggctcaatattagttgtcacccatatctccatcgcaaatgctccccaattatgcaataacactgcaagttgttcctctcaaatagaagatagagtcacagtatataaatgagcaacgtgaaatggtagaggaagactcggcccaaatctctctcttgtaaaatcaaaacaaagtaaacatccagttggtccttcccctattttctctcctccattgaaaagataagtaattccctttattgaatgatatgcaacctttacgaaaattgttacccgagtggggaatgatattaagaaccctccacgaatgagatttaaaatcgtagatttcgtaatttataaaatacctcaagattttgtggtttacggttgttatcatatccgagagtatacctgttttcggaatgataagcactcctatgttgaatcgaccatattttccccaaatacgggttccaaaccacgagcctagtgttgctgacctccttactcatcattaacaataagccatcgcaatgaaagacttgagatatctcaacatgattaaacttagctatttgctttatagatggctcaactacttcgacgttgttattttggattccatgaagatcaaatctcattgaacaaaccttagatccctttatcatgaaaccagcaaactgttgtctagcttctgctttacatatgacccgagctttagataaatcgttccatctcaatgctcctagagatattattgaaaccctagacagtatctcttctaccatatcctccggaagatcggatatcatcatcgtcgtcttcaaatgaaaatcagggttttttgacctatcatgtatttcctacagtttttcgatttgattatatatatgcgcataactttgggcccataactctaattttcttcttgcttcccgtttgtgtataacacaccttatatgccctcatatttcataaggaacattttgtagaagattattacaagattcacgaagagaaagaataaagacacaagacaaaacaaaaagatgcacctctctaaaacatctataaaacgctctatataatgtttatgtgtttgcgactgtgataaccacatctggcacatgcacatctcctagaagatctctactctaaaactcgacatacctctcccggtcatggtctcgtgcactgtctcggccacaatccatatggaattgcattgagaaagaaacccaagacataagtccaagtaaattgtttgaagctttgatcccaaattattttcacaattattacaaaaatttaacaattacaatcattctatagtactagaaatcttatttttagtccacgggagcaagttgcagtttgtcgcttctccttatgaacttattgcgaattttcttttctttttttaccctggaactttgctctaattcattgttcgataatagtaataattctcaacatcacaactacaaggggaaagcccggtacaagaaactcagtaagatttgttgatccataataattggtagtcttcaatcatatgatataaatgtatttataaaaaaccataaatgaccaatctttttcaaatgaaaacagaagaaatgaacgagaagaagatgatgaaagaaacaaataacgtactgtaaacaagactggctaataatctcgatcttttcttttcctcgataaccgagagttcttggccttgggtgattttcactaaactaggagcataagagactggtaggttagatggtatgaaagttactccgaaatccaatattctcaagtatccattatctccaatgacgtaagctatgttgcacctcatttgtttagataagcttctaccaaacactacggctaatttcttctcttggtcaatgaagaaactcgtaactaaaaacttaattctaaaatgagtaaatgttaagaagttgctccatgacacagcattgggttcaatcttagttgtcacccatatctccatctcagattcttcccaattattaaataacaccacaagatgttcctctctaacagaagatagagctacattatcatcaaacttagcaatttgaaatgggagaggaagacacgacacaaatctctctcttgtaaaatcaaaagaaagtaagcaaccagctagtccttcccctattttctcacctcgatagaaaaaataagtatttccctttattgacatgtcacgtacataaatatttgtatgcaagtcgggaatgatatcaagaaccttccatgaatcagatttaaaatcgtagatttcacaatttttcctattatacatcaagattttgtggttacggttgttgtcgtatccgagagcatacctatatttgaaatgctcagtatctctgcattggatcaacctggtttgtcccaaatacggattccaaaccacgatcttggaatctacctcatcagttaccaataacaacaagccatcgctgtaataaacttgaaataactcaagttcaataaatttatttatcttatttatagagagctcaactagttcaacgtcttcattttggatttcattaagatcaagtctcattgaacaaaccgtagattcgttcacatatctcgtgaaccctgtaaactgttgatttgcatctcctttacatacaatacgatctttggataaaccgttccatcgtttgcaagtagatctcactgctcctagagatgttatcggaaccctagacaaaatctcttctaccaaatcattcggaagatcagacatcatcatcgtcattttttcaaatgaaaaattagggttgaactatcacgtcttttccacacttttaagatttattctgagattgttcacagcataatatggattaatcttctaggaagccttatattgtgtaacagattaattgtacagatgcctttcatttgcagacttattaaagatgaaatgattaataagagcagatttgttctttttaatcatcagtcatcatcaatgtcaatattaataagccatcaaatcaatgaaagacttggaaaaatatctcaaacttacttacaccttcccacacacatttacggtcgattatatatgcaatagatgggccctaattttgggcccataacacttatcacaaaaggcccatcactttaaatcttcttcataattcactgctctcttcctcactacacagttttctattcttctagaatttgcttatgcagacattttcaatttcactcctccgtcactcttctccgttcctccgtcacaccgcgatttttcacggcggagttggagttagattcaaattccttcgcagcttttctcctctctcagcaagacgagataatcccgatgtctccagaaaaccccaaccgagcaaaaatatgctcagagcgaagcacatcggtaaaaattactcctcctccttgtcaccagttctctcgccggagcataaaccttcgctcttagagtctcaagctattggtactgtcgcaacagctcaagcgaactttatgcgcgtcattgttcaagatgtagctaattctgtgacgagtgatgatgataatgattcttcaaagactggtgttgaattgctttgtgtggtgagagctgtgttgaagaaaatacgaaggagagttttagttggagataaggttcttgttggatctattgattgggttgatagaagaggaatgattgagaatgtgtttcatcgacgttcggagattttggatccacctgttgcgaacgttgatcatttgcttgttcttttctctttggatcaaccgaaacttgagccgtttactcttactaggttcttggtggaagctgaatctactcgtattccattaacacttgctttgaataaaactgaactcattagtgaagaggtaaggaggatgaagaaattgtattttagatcactttgttggtttagggattgattagaatcataaacttgtttacaggaattggaaacttggaagataaggttgcgtggatggaactatgaaccattgttttgtagtgtgggaactaaagatggacttgatgatattgcgtttgttctgagagatcagacttctgtgattgttggacctagtggtgttggaaagtcgagtttaatcaacgtattgaggagtaatcatggtggtggtgtggtggaagatgagaattggtttgagcctgtaaggttcttttgtgttatttcattttacagcttaagttttgtttgccagattcttatgagttgagcttttgtgatattcagatgttaggtaataagtggtttgatgatcagcgagtaggggaagtttcgagtagaagtggtagaggtaaacatacaacacgaaatgtatcgctactgccggtttctgaaggtggttacctcgctgatactcctggctttaaccagcctagtttgctgaaagtaacgaagcattcactagctcactgttttcctgaggtttgttctttgtacccttttgcttgtgccaatctcccttattggctgactgtgacgatgtgttactttttaattgtttcttttagatacggaacatgattgagagcgaaaaatgtggattcagagactgcttgcatattggggaaccaggatgtgttgtgaaaggtgactgggaaaggtatccttactacttacaattgcttgatgagatcagaatcagggaagaatttcagcttaggacttttggaaccaaaagggaagatgatgttaggtattgttgggatttctcctgaaagaacagctttatttttagattgagattggtcgcagtcactaatgttgtttactttggaatgatacttgacacaggtacaaggtgggagacatgggtgtgaaacatgctgaaccacggttaatgcctaagaagcataggagagagtcaaggaagaaaacgaaacagacaatgatcagtgagctggatgagttcgaagatgaagacagtgatttgtacatagagaacgacccaatcgtccaagccattgagaatgagaataaaagacaatgagagaactcaagtttccactataactaagtcacatgatgtaaaagattgtacagatctttttaagttctcagctcttttgtttgtctgaattattgactaatcgaactatcgaactaaccaaaacttgcagaaccatgatcactgatttcataagtcatagaacgaaaatttccaagataaatctatccattgtcttacaaaacgattcgagctaaagaaaaaagagaacaaaatctcgttcaagaacacaagggacatgaaaataaagaaagaaagcttaagctgctgatttcttggacttggcagccaactgagtctccggctacaattatcaaaaacaaatacgaaatgagaacactgttgttattaacactagtcctgaatttttccaatgagatgaaatatatattacctcttttttgacaggctcttccttctctgacaaaatcaactcaatgtggcatgggttggacatgtaagctgcaaccaagaaagacaaactgagtcatacaatggattacaaaaagctatcaatgtaagtgatttacaaaatctcaaacttacggttgattcttccgtgagcacggtaagtccttctcctttgctttgcggcctggttcacttggatgtgtgatatgaagagggcatcaacatccaaacctttcacctgaacattcaaagtcaaaatatgcttattagcaaaagggtacagagagaaacaagaaaaagtttccttaattaaatgaatgctcgtctcacctcagcattgctctcagcgttcttgagcaaatcaagaacaaactgagcagacttggctggccaacgtccttgaccattagagtgcctgttcttagcttgagcagttctcccaacacctctgcagaaacgtgtgaagggaattgcttgcttgtgagctatcacatcctcaaggtacctcttcgccttgatcaatggtagcttcctgattgcgtgcgctgtttccctagtattctgtttcacacaatccgaagaaaacaaaacacaataagaaccaaccaacaaattcaaaaacacagtattaattatgtggaatcactaaccaaaacaacaagtcactaaaattctacataggttcacataagaacaataacaaagcaatactaagcgattaaccaaaagccctaaaaataaacaagcctcaaaaagtgaaatgataaatcaatgtaccatcatgtactgaatcttatagttatgagatatataaacatagattcacccaatcacgatgaccaattcaatttccctgaagtatacgtgagatctgtcaaattgcaacagaactctgctttttctcaatcaggtttaacctaaaactacaatctcctaatcataaatctaactacatcgaataatcaaaatgacaattgacagagctatacataccttgaagtgaaccctaagatcggatcctctagccttgcaagctgcaaaatcaaaaccaaaggattaccacaaagatcaaaacaacgaaatggtactaagaagttgatacaaggagctttacttacacttggtctgattgtcgggttcttgcgagtacttcacctgcgaaatcagcaaagacagggtaaagaaaattagggaagaagatttctaggtcaaatcagcgagaagagagatggagtttgagaagcttaagcaattaagcaattaccatggcggctaatagaagaatcggctgcagaagagatgtgagatttgtgaagacgagagtttttatataagagtgaagcaataaaccctgcgaaacctaggtttaaatgggccttgtccatttttaatgggctttctaataatgcccatcaagactatgaattggtaattaacaattacttattacaaaggttgatatccttactcatttttgtttcatcaggccagatgtatttattttatgtaagtaaaatctctcttcattacttttttttataagaaatgcaattgattaattcgttcttataaccacaatttttttgaaaataagttaattaatcggaaaatgagctagagatccaattttcactattttgttttgtattaaactaaccaacttgcattcttttagttgaaattagttgttactatgtaatatggcctaaaaactgtccaatccatcattaaatctctaaaataaacatggtgagtagttttcgggtctaagaatagagttatgctcaactctcatcaggttcaatagaattctacttacttatcaaaaaaaagtgtacgtattttgtatatattggtggagtatgttgttttagttgtagatcatttgcttaaaacttcattttttgttttatatatataaatatgagacaacaatcacgaatggttactatgtcatttgacttaattgttatacgtaatttcttacttactcagttatatcatatgtcatgtcatgtcatttgacttacttgtacgtaaaatattatatgtaatgaaaatatagaagattaacaagtttgctacatgagtaatgattgcttcatatgtagaagccaataagatcttgaataccttgggaggaagctctatcgatttcatgggggagaaactagctaagtatactatcgatatcattgaaacctgaagagttgattcaacatctactgatatcgctgataagcgtatcatcacacatattaacgagtggattgacgattatttgatggtgcaccacgagggaggagttttggtggtatgcatcggaaacgttgaccttcgtggctcaacttagaaatgataggacacattatttgatggcgcaccacgataaaatagctgtcgtttatagagtcttactcttgtcacatatttgagtccaaaagataacgaaaaaaataaaaacaatattttgaaaaattatttatatgaaacaatattatttattttgttgcaattagacttattcattacctcgtggcatgtacgtggactttgtaattgtaacagacacttctattggtttttcatgtgtttgttatttatgtggtttttcatgtgtttgttatttaggtcagtacggttgtttagcttactcttttaaattttttcatttgcaaattgcaattgtaaggaccacttgtatttaggtccgttatttagcttattctcttaaaaatgcagagaaactatcaatttgtggtattactctcggtagacaataatgctaatgaaacttctcaacaaaacaaaaaacaagactatatcttttgatcatgaagttaaattaaggataaagttaaattaaggatataagactatagttgcaccaatcaaagtataagattataaattatcaaagaaccaagtaaatgtacacaattactatatcaacaaagaaaatgtacttaagacttgctcatgttagtatgatttaggtataaatagagtatgcggttccgatgtcaaaaaaaaaaaaactttcccatgttaagaacggatttatttattctctaatgttttagaaatatcaaaaggagaatatgaaatagtctacgatcagaacaagtaagtagaaagaaaactagtgtaggcaatgacatcggaccattttgggaaaagacccttcaaatgtatagtttcttcatcaagacgttgatcaagaacagctacatctactctcacttcttcttcactacttgcctctaaccagaagttccacttctcatcgctgttgccactcagtctcaatatgtacgagggaggaccacccggtgggagttcaggtgctgcaacaacgattagtcattttggttttacggtttttagtaaatgctttaagagaacgaaaaagaggttctgtgtgtgtcacctggaggtttgccatcggcaaaggaccaccctgataacggtccggttatgttcaaaaccgtgacccaaatctcctccaacgacctgcaaatggaatagttaataaccaacaagaccaatagaagttctttatggagtccaactaaccccagagagagctccagatgaactctgcgagttccattttcaaatgttgtttgcggtttatgcgcttgtaggagtgggaattggctatatcgttctaaaatattgttggctttagcagggaacctcccgtttgttgttaatacacatgaaatagggaaaagtgcctgcagataccaaacaattctttacttcaaaactgaaaacacttgctatcttaccaatagcatgtacatagaaacgaatctaatgaacgtaccatccaagcttcttgaggagacgcttcagcgtttcccaatgaaaaagaagggccaacatgaagttcctttgccacctccggagcatgcttaaaaatgaactccatagaatttgaatcaatgacagctaaatcataacttgagcctgtgatttcatttccacctgcaacaggcacattaaacatttacttcatttcagcagacgaagattactccgaaaggcgaaaacagttccatatcgtgtgagaaaacgctaccagtagagatgaatgtgtgttggagtacaactctctttggtgcatctttgctataaggaaagaactgtgatgataccgccaacatgactacagtgaagtgaagcaagaatttcaagatcgacgacttggccagccaacgatcacaaattggtattattggacccaaacacaagccggtgacgattccaatgactgcagctactgctacatctgctagataaaatcctgcaaaccaaaataatgtacaataaacatctccacagtgaaagccagacttgcaatcacaacaagctatttaaatgttttaatggtaaaattctcaatcggtttagctgaaccagagatgcttttggaaagaattgagttcagtaaagctaaccataaggtggtggaattgctcccatcattcccgtcttctcaattaataatagtgtaagaataccaccaaaatagagagaatacagaaggcatggaacaagagctatcacataaaacatgggagacctggatgaaatgaactttatcataaacaaggatcttattggctaaagatatgtcctatgatccaaaaggaatattcaagttaaactaatcatcaacttcacaaaagttaggtactgtctagaagtcttacttgatcgaattatagccataggacttgactgacaaatagaaagcaatccaccctagtagcatagaaatggagatgacaaatgtcatgaatcctccatttaatccagcgaaaaaatatgcctgaaaacgtttctccggttagtcaacgatcagacaaacaaacaacaaattctgaggtaaaataaccgataaaacaaaaagtgcataccgaagttgcaaaagcatagaacccaaatgctccccaaaaccttgcttcatcagatggttcctaaaagatcatagttagaagacattttctagtaatagacagggaacctaatgagacaagaggaaagaataaggactttacaactttcataattttcttggatgaaacaccttgaaaatgtgagacacgatcagagatagctcttggaattaaaaggccaaaaaatgagcaggggatgaacatcaagaaagctaagtatgaatgagcaaacctacatttccacattaatttgagtgaacacctttattaagtattaaataaaacgtggaacaacgtaacacgatatacaaaaccaaccagctcatgggataagcaaagaacaatctgatgactgcaaagagaacagggactattacaccaagtaagatcccggcgaaatggtgcataactcctgatcaggtaaaaatttacaacgttaaatctctaaaacatcgtacaatgaggaaaagagtacaggagtacaaaaatgattaagaaaataaaaagattgcagaattttacctttaaagaaagcccagaagaatgataacaaagggtgtgtcctagggtccatcatatacaaaaagaaaggaacacaaaggaacaaagcagctggaatgttgtgaagtacgaaagctactcttcttgggtagaacacctgatagatatcacgatttcagcttgtcaagagtgtaaactagctatgagaaaagatgatgaacaatctcaaaaacacccaccatgaaccatgttaagtaatcaaagaaaacagctctttcaaccatgtcactgttggcatccacgtcaagcgtctttctttcactagcaacctttagcctagaagaactcgcgaaggctttaagcacgctgattaagttttctccacgtgcttgcatgcttccaggtctggttcaaaggtattctgtgaaaagaggatcatactaaacaataaacgatagtaaggaaaagttcaaccataatatataccaaaacgatgcatacactattctgtccactgtatcgaaggtagtatggtagtagtaaccgcccagaagaaagataatgtctagcccgggaatgtcggcataatcttctgcaaacattctgtaatctgtgtctccaggaattacagggaaaacatcctgaggaatatcataggagaacttaaagtcagtgacagagatgaactagaaacaaaatggctgaatacgttttgatcaatgaccactatcacttggcaaaagtagagaagacagtgtgtgtgagtgtccatgtatgtcatagagagagagagagagagacctgtgcagaactctgtgccattggatacactgctgcttgagagtagacataagatggccacgagccaggccctgattggcagaccagatctaccaaccattaacaaaaagtcagaagtaggagcaataagcacaacagaaacttaaaatataaatactcattgacaagcaaacacttaatactgtcacaaataagactagcacatattcctcttaatatttacaggataatgtatgtatatgcattaattttctagggacaggatgttgcaagagaagttcttcaatggtctacacagatgtttaaagataagcttttttgttccaatacttaggaaagataagagaatcaagatcaacttaagaacatcattgtcatctagaggaagagactggccgagaaaggaccttgtcataagtaaaaattgtttttagggaatatatcttaccaataccccctgtcccagaggcttccacgtttataaaagctccaatggtatctttcaacttatgcttcgtcatgaagccgtgtgagccctaaacacacacaccaccatgtaaaagaagagcttattttcatcagcttgactataagagaaacctcatactatgtatcaataacaatattcatcaagaacaagaagatgaatgttcattaaacaatattccatacgaaagagtactaagcagcataactgtattaccagcataaaaagctcttcagcaccattgaagagaaaaattacaggttgaggcgggacccaaccagaatccactaccagtcttgctaattcaagtagtgatgctgcaaaacggaaacacataaatccatgatttaatggtttagaaggtaaatctaaagatatagtaccaaactcacctacacatgacccacaatcaccagctccaggagagttaacaggactgtcataatgtgcattcatcaatacagatgcatcagtgtcaagagaattcattgacgagatactgcaaaaaaaaaaaaaaaacgatgaaaatgtttagcattaataattggggacacaatcattcaatgttgcagtctattgatgactgaataaaataacacaaagaatggtcaaccccaacgtgaatcataaatacaaacaacaaagtctcctgaacaacacgtaaaaaccataaatctcaatgtaccagtaaaggaacaaactttagtaccgcataagtatattagtatggtttctgtatccaagtgatatgctgtgtcctagaaacatcatgctaaaggaaccatccacttgagtctcttccacttcaaccctataacagcaacaaaaagcattcatttttcagctcagacacaaaaagttcacaagaaaaaaacattcttttcttggagagtgatgaaatctcaagcatttaagttattcaaaaaaaccttaaatttggtccagctctctccttcaccatctccaattgcgattttatatacgttgcagcttctttaagtccaggtcgtccttcctacaaaacccatgtcgtaaaaacaagatcagagagagacagagaaaagagagagatgaaacggcggcgaatcatcacctgacgaccatcgatctcttcagccaagacacggatgtgttcgacggctctagcttcagagaatcgttcgagaggagcgtttgccggaagcggagagatgaatttcatgtggaggacggagtaaacaatagctgacattaaagcgtagatgaagacgagtgagaagaggaatttgaatccagtgacatctcttgcgctcatcttccaaaacggcatcactgaaatggattcaaatcttcgaatcggcgctttggaaaaatcagacaaatctcgtacttgaagacaacgattgttcagttctgtaatataagtccgaaacttaacggaacggaacagaacgggaacaccgtcgctttgtgtcatagagagagactgttacggcgtgagagtgagatgcaaaatgacttaaaagtcctcacgatttattccataatgaagtctttacgtttccctaaatctaattttattcagattcattttgttctgaagtgtagatttggtaaaattttgatttaaagtttgaagtcatttaatttgaatatcttagacaatttaaaggtgatttcataaatttgaatcaattttgcatgtctatggacagatgtcattatcaaagtgacattgttgtttttctgacttttaaatacgatgcagcaaaagtagatggtataatcttacaaaatatttccgcttgcttagacaaaaaaacaaactttgtacgtaactcgtgaactaaatacgagtctaagaagaataagaggaataaaatcaaggcttaattagtttactacctttgaaccaaaaaaaaaaccaaaaaaaagatctactaccatgtattggggtatatatctagggaagaaaatttggttaaaaggaaatgacacgttgttttaattaaaaacatttgacacaaatgttttttttttgttttgggatgtaatccaacacgcaaaaaaacatgtagacattaaagtgtcgtgaacataactatgtctatgtatgttaaataaagcaaactacgtttcctttctttacgtgatgatatgttcccacacatcacgtaccaactatttgtgtgagatattagccaagtctcggaccaatagttatcttgatccaagatatcaagagagtattaattaatggattttcaatcatcatagctggggagagttttcctctggttttacaagttggtcgtcgaggaaaccaaatttcttctttgaggcaagcacaattttagtccattcttcatagttgtccgatcctcacaaagcaaggatggatatcattatcaggatatctatatgtatgtatcctggactgtcactcgtctagtctatatgcacctatgtgttttggttatacataaatgctagatatgagctttatccctagactcggcccaagaatgaaatttgcttagaaaaactttgaccaagtctgagtcagcagggttcggcccattcgctcgttattttcaaacatgtgaacaaaatcggattgtcaatgtctcaatgatcaaattgttggtaacaaaactgaaaaccaaaagaaacccgtaaacgttttttccaattgaccacaatcaaataagatgaacaagagttgcaaaaatggtaattcgaaccattacctctataactcagtctttcaacatcgaaccggaaaaccaaacatttactttttgaatcctttgtgtgttcaacatccttagcttctattatagtatagtgatcattttacaaaaaaatattgattgtaatgtgcaattacctaatcttttaaaacttctaaagtgaatgtgcaatttcttgaattacaacacctatgttgtgtgtaaaagaaaaagaaaaaacaactacagtaaatttgtttgtaactgaaagaatctttcttaaatcataaatcattaaatgtctaatgactcaatacgtttcatttcatcaaaactcattacaatcaccaagcaacgaaaaaacccaaaacagagaccgttggatctaaatctctcactttcttcttcttcttctctgtatcatctctctcgaagaagaaatgtacggcaaaacaatatgtacaatcgtcttcttcatcttcctcgttgcttcattctcaatctacatgggaaccgtcgatccaagaccttacttctacctcctccaatcccaacccaatggagcttcttctccttgtagctcctctggaaaacctctccgtgtcttcatgtacgatctcccacgaaagtttaatatcgcgatgatggatcctcatagctcagatgttgagcctatcacagggaagaatttaccttcttggcctcagacttctgggattaaaagacaacatagcgttgagtattggcttatggcttctcttcttaacggtggtgaggatgagaatgaagcaattagggtttttgatccggatttggcggatgtgttttatgttccttttttctcttcgttgagttttaatactcatgggaagaacatgactgatccagatactgaatttgatcggctattacaggtataattttgatcggaaatttttgaaattccggtgattttgggtgatgggtaatggcaaattcgttgactttttttgcaaagtttgaatctttatgaatcgccaccattgcagcgtctggcgatcgaattatgaactataaaccctaactattgtcaaattttaatcgaaatttttgaaattccggtgatttgggatgatgggtaatgtcaaattcgttgactttgttgccaattttgaatctttatgaatcgccaccattattgtttcatgttgtgtgatcaggttgagttaatggagtttcttgagaattcgaagtattggaatcgttcaggaggtaaagatcatgtgattccgatgacacatcctaatgctttcagatttctaaggcaacaagtgaatgcgtcgattctcattgttgtggattttgggcgttattctaaagacatggcacgtttaagtaaagacgtagtttctccttatgtacatgttgttgagtctttgaatgaggagggcgatgatggtatgggagatccttttgaggctcgtacaacgcttctttactttcgtgggaatacagttaggaaagatgaaggtaaaattcgtctgaggttggagaagttattagctggtaactctgatgttcactttgagaaaagtgtagctactacacaaaacatcaaagtggtaagctactattacttttatatttcagggttcagaagtcttagagagagtccatgtagttgaaatcttaggaaaatgtggtaaccattctcagtccaaggttcagaactcagaaatcttaactttttagaaagaccaatgtgatagggtttcatctagcatgagtatatagctaggatagtgcttcaagtgtttaggcgtttgagtcttttggggacctattaggctctttaacaaactaaggtttctatctttggtttattgtatcagctagttcgtgctcttcattttgtagtctgatttagagcagaatagaggaagatatctaatgttaacctatcagaatgatagtaattgttctacttgtgttttgttttgttaccagtctacggaagggatgagatcttctaagttttgtctgcatccagctggagacactccatcttcatgccggttatttgatgccattgtcagtcactgcattccggtcatcataagcgacaaaatcgagctgccctttgaagatgaaatagactactcggaattctcactgtttttctcaataaaagagtcgcttgaaccgggctacatcctcaacaacctccgccaatttcccaaggagaaatggctggaaatgtggaaacgactgaagaacgtatctcatcactttgagttccagtacccgccaaagagagaagatgcagtaaacatgttgtggagacaagtgaaacacaagatccc
